United States Patent Application Publication US 2007/0054278 A1 - sequence listing, part 6

SEQ ID NO: 5553 - DNA, 4455 bp, Homo sapiens
ccagcgaagcggaccggccgggtggaggccacacgctaccccgaggctgcgtaggccgcgcgaagggggacgccgtgccgtgggcctggggtcgggggagcagcagaccgggaagcaccgtgaggaccgaggatttggggtggaaggcaggcatggtcaaacccatttcactgacaggagagcagagacaggacgtgtctctctccacgtyttccagccagtaaaagaagccaagctggagcccaaagccaggtgttctgactcccagcgtgggggtccctgcaccaaccatgagccscctgctctggaggaaggtggccggcgccaccgtcgggccagggycggttccagctccggggcgctgggtctccagctccgtccccgcgtccgaccccagcgacgggcagcggcggcggcagcagcagcagcagcagcagcagcagcagcaacagcagcctcagcagccgcaagtgctatcctcggagggcgggcagctgcggcacaacccattggacatccagatgctctcgagagggctgcacgagcaaatcttcgggcaaggaggggagatgcctggcgaggccgcggtgcgccgcagcgtcgagcacctgcagaagcacgggctctgggggcagccagccgtgcccttgcccgacgtggagctgcgcctgccgcccctctacggggacaacctggaccagcacttccgcctcctggcccagaagcagagcctgccctacctggaggcggccaacttgctgttgcaggcccagctgcccccgaagcccccggcttgggcctgggcggagggctggacccggtacggccccgagggggaggccgtacccgtggccatccccgaggagcgggccctggtgttcgacgtggaggtctgcttggcagagggaacttgccccacattggcggtggccatatccccctcggcctggtattcctggtgcagccagcggctggtggaagagcgttactcttggaccagccagctgtcgccggctgacctcatccccctggaggtccctaytggtgccagcagccccacccagagagactggcaggagcagttagtggtggggcacaatgtttcctttgaccgagctcatatcagggagcagtacctgatycagggttcccgcatgcgtttcctggacaccatgagcatgcacatggccatctcagggckaagcagcttccagckcagtctgtggatagcagccaagcagggcaaacacaaggtccagycccccacaaagcaaggccagaagtcccagaggaaagccagaagaggcccagcgatctcatcctgggactggctggacatcagcagtgtcaacagtctggcagaggtgcacagactttatgtaggggggcctcccttagagaaggagcctcgagaactgtttgtgaagggcaccatgaaggacattcgtgagaacttccaggacctgatgcagtactgtgcccaggacgtgtgggccacccatgaggttttccagcagcagctaccgctcttcttggagaggtgtccccacccagtgactctggccggcatgctggagatgggtgtctcctacctgcctgtyaaccagaactgggagcgttacctggcagaggcacagggcacttatgaggagctccagcgggagatgaagaagtcrttgatggatctggccaatgatgcctgccagctgctctcaggagagaggtacaaagaagacccctggctctgggacctggagtgggacctgcaagaatttaagcagaagaaagctaagaaggtgaagaaggaaccagccacagccagcaagttgcccatcgagggggctggggcccctggtgatcccatggatcaggaagacctcggcccctgcagtgaggaggaggagtttcaacaagatgtcatggccygcgcctgcttgcagaagctgaaggggaccacagagctcctgcccaagcggccccagcaccttcctggacaccctggatggtaccggaagctctgcccccggctagacgaccctgcatggaccccgggccccagcctcctcagcctgcagatgcgggtcacacctaaactcatggcacttacctgggatggcttccctctgcactaytcagagcgtcatggctggggctacttggtgcctgggcggcgggacaacctggccaagctgccgacaggtaccaccctggagtcagctggggtggtctgcccctacagagccatcgagtccctgtacaggaagcaytgtctcraacaggggaagcwgcagctgatgccccaggaggccggcctggcggaggagttcctgctcactgacaatagtgccatatggcaaacggtagaagaactggattacttagaagtggaggctgaggcmaagatggagaacttgcgagctgcagtgccaggtcaacccctagctctgactgcccgtggtggccccaaggacacccagcccagctatcaccatggcaatggaccttacaacgacgtggacatccctggctgctggtttttcaagytgcctcacaaggatggtaatagctgtaatgtgggaagcccctttgccaaggacttcctgcccaagatggaggatggcaccctgcaggctggcccaggaggtgccagtgggccccgtgctctggaaatcaacaaaatgatttctttctggaggaacgcccataaacgtatcagctcccagatggtggtgtggctgcccaggtcagctctgccccgtgctgtgatcaggcaccccgactrtgatgaggaaggcctctatggggccatcctgccccaagtggtgactgccrgcaccatcactcgccgggctgtggagcccacatggctcaccgccagcaatgcccggcctgaccgagtaggcagtgagttgaaagccatggtgcaggccccacctggctacacccttgtgggtgctgatgtggactcccaagagctgtggattgcagctgtgcttggagacgcccactttgccggcatgcatggctgcacagcctttgggtggatgacactgcagggcaggaagagcaggggcactgatctacacagtaagacagccactactgtgggcatcagccrtgagcatgccaaaatcttcaactacggccgcatctrtggtkctgggcagccctttgctgagcgcttactaatgcagtttaaccaccggctcacacagcaggaggcagctgagaaggcccagcagatgtaygctgccaccaagggcctccgctggtatcggctgtcggatgagggcgagtggctggtgagggagttgaacctcccagtggacaggactgagggtggctggatttccctgcaggatctgcgcaaggtccagagagaaactgcaaggaagtcacagtggaagaagtgggaggtggttgctgaacgggcatggaaggggggcacagagtcagaaatgttcaataagcttgagagcattgctacgtctgacataccacgtaccccggtgctgggctgctgcatcagccgagccctggagccctcggctgtccaggaagagtttatgaccagccgtgtgaattgggtggtacagagctctgctgttgactacttacacctcatgcttgtggccatgaagtggctgtttgaagagtttgccatagatgggcgcttctgcatcagcatccatgaygaggttcgctacctggtgygggrggaggacygctaccgcgctgccctggccttgcagatcaccaacctcttgaccaggtgcatgttygcctacaagctgggtctgaatgacttgccccagtyagtcgcctttttcagtgcagtcgatattgaccgstgcctcaggaaggaagtgaccatggattgtaaaacmccttccaacccaactgggatggaaaggagatacgggattccccagggtgaagcgctggatatttaccagataattgaactcaccaaaggctcyttggaaaaacgaagccakcctggaccatagcactgcctggaggctctgtatttgctcccrtggagcttcatcggggtggtgcaggctcccaaactcaggctttcagctgtgctttttgcaaaagggcttgcctaaggccagccatttttcagtagcaggacctgccaagaagattccttctaactgaaggtgcagttgaattcagtgggttcagaaccaagatgccaacatcggtgtggactacaggacaaggggcattgttgcttgttgggtaaaaatgaagcagaagccccaaagttcacattaactcaggcatttcatttattttttycttttcttcttggctggttctttgttctgtcccccatgctctgatgcagtgccctagaaggggaaagaattaatgctctaacgtgataaacctgctccaaggcagtggaaataaaaagaaggaaaaaaaagactctatcttctc

SEQ ID NO: 5554 - DNA, 1579 bp, Homo sapiens
tgcgtacacgtcacttccgaggcgggaggatgaagttgattgactatggtctctccggcwaccaggaagagtctgccraaggtgaaggccatggacttcatcacctccacagccatcctgcccctgctgttcggctgcctgggcgtcttcggcctcttccggctgctgcagtgggtgcgcgggaaggcctacctgcggaatgctgtggtggtgatcacaggcgccacctcagggctgggcaaagaatgtgcaaaagtcttctatgctgcgggtgctaaactggtgctctgtggccggaatggtggggccctagaagagctcatcagagaactcaccgcttctcatgccaccaaggtgcagacacacaagccttacttggtgaccttcgacctcacagactctggggccatagttgcagcagcagctgagatcctgcagtgctttggctatgtcgacatacttgtcaacaatgctgggatcagctaccgtggtaccatcatggacaccacagtggatgtggacaagagggtcatggagacaaactactttggcccagttgctctaacgaaagcactcctgccctccatgatcaagaggaggcaaggccacattgtcgccatcagcagcatccagggcaagatgagcattccttttcgatcagcatatgcagcctccaagcacgcaacccaggctttctttgactgtctgcgtgccgagatggaacagtatgaaattgaggtgaccgtcatcagccccggctacatccacaccaacctctctgtaaatgccatcaccgcggatggatctaggtatggagttatggacaccaccacagcccagggccgaagccctgtggaggtggcccaggatgttcttgctgctgtggggaagaagaagaaagatgtgatcctggctgacttactgccttccttggctgtttatcttcgaactctggctcctgggctcttcttcagcctcatggcctccagggccagaaaagagcggaaatccaagaactcctagtactctgaccagccagggccagggcagagaagcagcactcttaggcttgcttactctacaagggacagttgcatttgttgagactttaatggagatttgtctcacaagtgggaaagactgaagaaacacatctcgtgcagatctgctggcagaggacaatcaaaaacgacaacaagcttcttcccagggtgaggggaaacacttaaggaataaatatggagctggggtttaacactaaaaactagaaataaacatctcaaacagtaagagttgtagtcttccaggactagaaccttgtgtcctttgaattctcgccctgccagctcctagaaatagtttcaatcttggaatcagatgttatgtcacctgacccagttgtttctgtatttgacttaaacctcattgttgtggcagaaagaccacctccagtactgaggggagaaagttgtagtttcaagaagtcagcagtcacgcccatttccaggtccctatgatatctcatccaacttaaaacgtgggccagtatgtaatggcttatttggtgtatcccaaggga

SEQ ID NO: 5555 - DNA, 1559 bp, Homo sapiens
cgggaggatgaagttgattgactatggtctctccggttcttccaggaagagtctgccraaggtgaaggccatggacttcatcacctccacagccatcctgcccctgctgttcggctgcctgggcgtcttcggcctcttccggctgctgcagtgggtgcgcgggaaggcctacctgcggaatgctgtggtggtgatcacaggcgccacctcagggctgggcaaagaatgtgcaaaagtcttctatgctgcgggtgctaaactggtgctctgtggccggaatggtggggccctagaagagctcatcagagaactcaccgcttctcatgccaccaaggtgcagacacacaagccttacttggtgaccttcgacctcacagactctggggccatagttgcagcagcagctgagatcctgcagtgctttggctatgtcgacatacttgtcaacaatgctgggatcagctaccgtggtaccatcatggacaccacagtggatgtggacaagagggtcatggagacaaactactttggcccagttgctctaacgaaagcactcctgccctccatgatcaagaggaggcaaggccacattgtcgccatcagcagcatccagggcaagatgagcattccttttcgatcagcatatgcagcctccaagcacgcaacccaggctttctttgactgtctgcgtgccgagatggaacagtatgaaattgaggtgaccgtcatcagccccggctacatccacaccaacctctctgtaaatgccatcaccgcggatggatctaggtatggagttatggacaccaccacagcccagggccgaagccctgtggaggtggcccaggatgttcttgctgctgtggggaagaagaagaaagatgtgatcctggctgacttactgccttccttggctgtttatcttcgaactctggctcctgggctcttcttcagcctcatggcctccagggccagaaaagagcggaaatccaagaactcctagtactctgaccagccagggccagggcagagaagcagcactcttaggcttgcttactctacaagggacagttgcatttgttgagactttaatggagatttgtctcacaagtgggaaagactgaagaaacacatctcgtgcagatctgctggcagaggacaatcaaaaacgacaacaagcttcttcccagggtgaggggaaacacttaaggaataaatatggagctggggtttaacactaaaaactagaaataaacatctcaaacagtaagagttgtagtcttccaggactagaaccttgtgtcctttgaattctcgccctgccagctcctagaaatagtttcaatcttggaatcagatgttatgtcacctgacccagttgtttctgtatttgacttaaacctcattgttgtggcagaaagaccacctccagtactgaggggagaaagttgtagtttcaagaagtcagcagtcacgcccatttccaggtccctatgatatctcatccaacttaaaacgtgggccagtatgtaatggcttatttggtgtatcccaaggga

SEQ ID NO: 5556 - DNA, 1524 bp, Homo sapiens
gttcttccaggaagagtctgccraaggtgaaggccatggacttcatcacctccacagccatcctgcccctgctgttcggctgcctgggcgtcttcggcctcttccggctgctgcagtgggtgcgcgggaaggcctacctgcggaatgctgtggtggtgatcacaggcgccacctcagggctgggcaaagaatgtgcaaaagtcttctatgctgcgggtgctaaactggtgctctgtggccggaatggtggggccctagaagagctcatcagagaactcaccgcttctcatgccaccaaggtgcagacacacaagccttacttggtgaccttcgacctcacagactctggggccatagttgcagcagcagctgagatcctgcagtgctttggctatgtcgacatacttgtcaacaatgctgggatcagctaccgtggtaccatcatggacaccacagtggatgtggacaagagggtcatggagacaaactactttggcccagttgctctaacgaaagcactcctgccctccatgatcaagaggaggcaaggccacattgtcgccatcagcagcatccagggcaagatgagcattccttttcgatcagcatatgcagcctccaagcacgcaacccaggctttctttgactgtctgcgtgccgagatggaacagtatgaaattgaggtgaccgtcatcagccccggctacatccacaccaacctctctgtaaatgccatcaccgcggatggatctaggtatggagttatggacaccaccacagcccagggccgaagccctgtggaggtggcccaggatgttcttgctgctgtggggaagaagaagaaagatgtgatcctggctgacttactgccttccttggctgtttatcttcgaactctggctcctgggctcttcttcagcctcatggcctccagggccagaaaagagcggaaatccaagaactcctagtactctgaccagccagggccagggcagagaagcagcactcttaggcttgcttactctacaagggacagttgcatttgttgagactttaatggagatttgtctcacaagtgggaaagactgaagaaacacatctcgtgcagatctgctggcagaggacaatcaaaaacgacaacaagcttcttcccagggtgaggggaaacacttaaggaataaatatggagctggggtttaacactaaaaactagaaataaacatctcaaacagtaagagttgtagtcttccaggactagaaccttgtgtcctttgaattctcgccctgccagctcctagaaatagtttcaatcttggaatcagatgttatgtcacctgacccagttgtttctgtatttgacttaaacctcattgttgtggcagaaagaccacctccagtactgaggggagaaagttgtagtttcaagaagtcagcagtcacgcccatttccaggtccctatgatatctcatccaacttaaaacgtgggccagtatgtaatggcttatttggtgtatcccaaggga

SEQ ID NO: 5557 - DNA, 9127 bp, Homo sapiens
gtcagtttggggcatctccgcggtccggcccggggccccgggatctcggctgtccttcctcccggcataagatgcacatttttctgctctggagccgggaatgaaatattcttgagttcttacaactttatgacgagacccatgtgtggtgctattgagaaattcattgggaagttggaagacatttcaawcaacaggttgttttggtttctatagtacaattggggtggcattctgttttgtgaaaggaggaaggacttaggccagaaaactcatatgctatggttaactggttcccagcctccgagaatcttgttttccatggtgtaaaacttactcagcatcaggataagggataacgactctatggatrtacagaatccttcaccatggtaaaactcgcaaacccgctttatactgagtggattttggaggccatcaaaaaagtgaaaaagcagaaacagcgtccttcagaagaaaggatatgcaatgctgtgtcttcatcccatggcttggatcgtaaaactgttttagaacaattggagttgagtgttaaagatggaacaattttaaaagtctcaaataaaggactcaattcctataaagatcctgataatcctgggcgaatagcacttcctaagcctcggaaccatggaaaattggataataaacaaaatgtggattggaataaactgataaagcgggcagttgagggcttggcagagtctggtggctcaactttgaaaagcattgaacgttttttgaaaggtcagaaggatgtgtctgcatyattcggaggcagtgctgcctctggctttcaccagcagttacgattggctatcaaacgtgccattggccacggcagactccttaaagatggacctctttatcggctcaacactaaagcaaccaacgtggatgggaaagagagttgtgagtctctttcctgtttacctccagtgtcccttcttccacatgaaaaggataagccggttgctgaaccaatccccatctgtagtttctgtcttggtacaaaagaacaaaaccgagaaaagaagccagaggaactcatctcctgtgccgactgtggcaacagtggccatccatcctgtttaaagttttcccctgaactaacggttcgagtgaaggccttacggtggcagtgcatcgagtgtaaaacatgcagctcctgtcgagatcaaggcaaaaatgcggataacatgctcttttgtgattcatgtgaccgaggttttcacatggagtgttgtgatccgccactcacccgtatgccaaaaggcatgtggatatgtcaaatatgtcgacctaggaaaaaaggacgaaaacttctacaaaagaaggcagcacagataaaacggcgctatactaatccaataggacgtccaaaaaacaggttaaakaaacaaaacacggtatcaaaaggtcccttcagcaaagttcgaactggccctggaaggggtaggaaacgaaaaatcactctttccagccaatcagcatcatcatcatcagaagaaggatatttagagcggatagatggcttggacttctgcagagatagcaatgtctccttgaagttcaacaagaaaaccaaagggctcattgatggccttaccaaattttttaccccttcccctgatgggcggaaagctcggggggaagtggtggactactctgagcaatatcgaatcagaaagaggggcaacaggaaatcaagcacttcagattggcccacagacaatcaggatggctgggatggcaaacaagaaaatgaggagcgactttttgggagccaggaaatcatgactgagaaagatatggaattatttcgtgatatccaagaacaagcactgcagaaagttggagtgactggtccccctgatccacaagtccgctgtccctctgtcattgagtttgggaagtatgaaattcacacctggtactcctccccatatcctcaagaatactcaaggctgcccaaattgtatctttgtgaattttgtctaaaatatatgaaaagtagaactattctgcagcagcacatgaagaaatgtggttggttccatcctcctgccaatgagatttacagaaagaataatatttctgtctttgaggttgatgggaatgtgagtaccatttattgtcaaaacctgtgtcttttggcaaagttgtttcttgaccacaaaaccctctattacgatgtggagccatttcttttttatgtactaacacagaatgatgtcaagggctgccaccttgttggctacttttctaaggaaaagcactgccaacagaagtacaatgtttcctgtataatgattcttcctcaataccagcgtaagggctatggcaggtttctcatcgatttcagttatttgttatcaaagcgtgaaggccaagcagggtctccagagaaaccgttatctgatctgggtcgtctttcctacatggcatattggaaaagtgtaatattggagtgcctttatcaccaaaatgacaagcagatcagcattaagaagttaagcaagttgactggaatctgccctcaagacatcacttccacactccaccacctacgaatgctggacttccgtagtgaccaatttgtgattatccgccgggaaaaacttatccaggatcacatggcaaagcttcagctgaatttgcgacctgtagatgtagatccagaatgtttgcgctggactccagtcatagtgtccaactctgtggtctcagaggaggaagaagaggaggctgaggaaggagaaaacgaagagccacagtgccaggaaagagaattagagatcagtgtgggaaagtctgtgtctcatgagaacaaagaacaagattcttattcagtagaaagtgaaaagaaaccagaagttatggctccagtcagttctacacgtttgagcaaacaagtccttcctcatgatagtcttcctgcaaatagccagccatctcggaggggccgctgggggaggaagaacagaaaaacccaggaacgttttggtgataaagattctaaactgctcttggaagagacgtcttcagctcctcaggaacartatggagaatgtggggagaaatcagaagccacccaggaacaatacactgaaagtgaagaacagctggtggcttctgaggagcagccaagccaggacgggaaacctgaccttcccaagagaagactcagtgagggggttgagccctggcgaggacagctcaagaaaagccctgaggctctgaagtgcagattaacagaaggaagtgagaggctgccmcgtcgctacagtgagggtgacagggctgtcctcaggggcttcagtgagagcagcgaggaggaggaggagccrgaaagccctcggtcaagctcgccaccaattctcacaaagcccacgctgaagcgaaagaaaccatttctccaccgaaggaggagagtccgaaagcgcaaacaccacaatagcagtgtagtcacagaaactatttctgagaccactgaagtgttagatgaaccttttgaagattctgactccgagaggccaatgccaagattagaacccacrtttgagatcgatgaagaagaggaggaagaggatgaaaatgaacttttccctagagaatacttccgtcgtttgtcttcgcaggatgtactcaggtgtcagtcctcttctaagaggaagtctaaagatgaagaagaagatgaagagtcagatgatgctgatgacactcctatcttaaagccagtatctcttttgcgaaaacgtgatgtgaagaattctcctcttgagccagatacatccacacctttgaaaaagaaaaagggatggcccaaaggcaagagccgcaaaccaatccactggaagaaaagacctggtcgaaaaccaggatttaagttgagtcgggaaatcatgccagtttctactcaagcatgcgtcattgagcccatcrtttccattcctaaagctggacgtaaacccaagatccaggagagtgaagaaactgttgagccaaaagaagacatgcccctacccgaggagaggaaggaggaggaggagatgcaagcagaggcagaagaggctgaagagggtgaggaagaggatgcagccagcagtgaagtcccagcagcctctccagcagacagcagcaatagtcctgagaccgaaaccaaggagcctgaggtggaggaggaagaagagaagccccgtgtctcagaggagcagaggcagtcagaggaggagcagcaggaattagaggagccagagccagaggaggaggaagatgcagctgcagagactgcccagaatgacgaccacgacgctgatgatgaggatgatggccacctggagtccacaaagaaaaaggagctagaggaacagcccacgagggaagatgtcaaggaggagcctggtgttcaagagtcttttttagatgctaatatgcagaagagtagggaaaagataaaggataaagaggaaaccgagctggattccgaagaggagcagccttcccatgacacgtcygtggtgtcagagcagatggctgggtctgaggacgaccacgaagaagactcccacactaaggaagagttaatcgaattaaaagaggaggaagagattcctcatagtgagctggatctggaaactgtacaggcagtgcagtctttgactcaagaagaaagcagygagcatgagggcgcctaccaggactgtgaggaaactcttgcggcgtgtcagaccctgcagagttacacccaggctgacgaggaccctcagatgtccatggttgaagactgtcatgcgtcagaacataatagccctatctcctcygttcagtctcaccccagccagtcagtccgttcggtcagcagtcccaacgtgcctgcccttgagagtggctacacccagatcagcccagaacaaggatccctgtccgcaccctctatgcagaacatggagaccagccccatgatggatgtgccttccgtatcagaccactctcagcaggtggtggacagcggcttcagtgacctgggcagcattgagagcaccactgaaaactatgagaacccaagcagttacgactccacgatgggcggcagcatctgtgggaacagctcttcccagagcagctgctcctacggtgggctgtcgtcctccagcagcctcacccagagcagctgtgtggtcactcagcagatggccagcatgggcagcagctgcagcatgatgcagcagagcagcgtscagcctgctgccaactgcagcatcaagtcacctcagagctgygtggtggagaggcctcccagtaaccagcagcagcagccgccaccaccgcctccacagcagccacagccgccgccgccacaaccacaaccagcaccacagcctccaccaccccagcagcagccgcaacagcagccgcagcctcagccccagcagcctccacccccaccccctccccagcagcagcccccgctgtcacagtgtagtatgaataacagtttcaccccagctcctatgatcatggagataccagaatctggaagcactgggaacataagtatctatgagaggattccaggggattttggtgccggcagctactctcaaccatcagccaccttcagcctagccaagctgcagcagctgaccaacaccattatggaccctcatgccatgccttatagccattctcctgctgtgacttcctatgcaaccagtgtttctctgtccaatacaggactggctcarctggctccatctcatcccttagctgggactcctcaagcacaagccaccatgacgccacccccaaacttggcatccactaccatgaacctcacatctcctctgcttcagtgcaacatgtctgccaccaacattggcattcctcacacgcagagattgcaagggcaaatgccagtgaaggggcacatttccatccgctccaagtctgcgccactgccctctgcggctgctcaccagcagcagctgtatggccgtagcccatcggcagttgccatgcaggctggccctcgcgcactggctgttcagcgtggcatgaacatgggggttaatctgatgcctactcccgcctataatgtcaattccatgaatatgaacaccttgaatgccatgaacagctatcgaatgacacagcccatgatgaacagcagttaccatagtaaccctgcctacatgaaccagacagcacagtatcctatgcagatgcagatgggaatgatggggagccaggcctatacccagcagcctatgcagcctaaccctcatgggaacatgatgtacacaggcccctcccatcacagctacatgaacgctgctggcgtgcccaagcagtcactcaacggaccttacatgagaagatgagcaagatgaacttgcaatcaaaaacttaaatatatataaataaaggaaccttttatactgacaaaccagagaaaaatggacctttttccagttaaaatattgctgtagatttagaggaatttttctttggtttattttattttttagaaaacctgatcttctctttttttgggttcattttgttstgggttttggttttcttcacaatcttgaacattttacagtagaactcatctaaaaatggatttggggatggggaaacatgcacaaaatcttttcataattaaaaagagccttactttctttacataccacatggacagaatttgtgtaaaagtgaattatctttattttaaaatgtatgtttcccctcactgtttgcagctcccaatgttgtcatttttaaatgttatatacatctcaagggttaaccagaccctttcctccaaacccaacctttcatttcctacttcattccagcaggaggcacttaggggagactcggatggggacatggagaacaacccaagctccttaaacttattattattgttaatattattattattattattaataaagtgaggcaggaaaatgcttctccttttaaaatcccctccactcctcacacacacacacctcttgaaacccttccccaagaatgtttctttatagacggacttcattgaaatctttgttgttcttgaatcaagtgtaatataatttttttcttcttttttaaaatattcccactcagcactcagagacacaaaaatactgtaagtctcaattaacagcagaatctcagagaaaagctgtttgcaatccaaatccagcctttggaggaatagagatggtcaattaacaatcaaaaagaggagattaacctcttgtttttttaccacctggtgaatcagccataacgcacacacacgccacccagcctcttgtttctagtatgtactttgaaatgctaactgagggtcttgatgcttgagcctttgactgataaaactcaaatagcagtccccagtgatttgcctcttaggttctttcttaaattgttggtggatgactgtacattttagtgatttgaaaaataactgacaaaccattgaaacagtttattttatgttggaagagatggcgcagatgtgtgtcagaagggagatcacggtgtgagtttcgtagctatttaagtgatacatacctctagtttttgtatgtcttttgagatcctgagttcatcccctgwgaatcagagtgcacaagcacctctcctgtgagtggctaatgagaagagggacagaccgaccaccagcacagtagggcagatctggacagcagaatgttataacgcaagttcatgtgttgctcccaactccattctctttttttttgtgcaaccagattgcccattctcttcctattacttgctccagggataggtaaaaaaaaaaaaaaaaaaaaaaaaatatatatatatatatatatatacacacacacacacacacacacacacatatatatatatatatattccatcattagaagatggaaactattataccacttggtatgtgcagtcaaatatccaaaagggggaagtactgcttagagaaatatctgtaagcattaaattctctcctttatttgtacattttatatagataaatttttaaagtactaattaggcattaacttttttcaaatgcacaggtttgttggtttttttaatacactttaattgactttctcaagcgtgctaggtagaaacgcagaattccacatcttcccgctctcagctctgagcatgtgcaaggctgtgtaggacccagtttctctgtatatactattccagttcccagtcatctatgtagaaagtgcactgtgctgccatcgccctacatcttcagctgtgtcattgcttcctggttggggtggggacggggtgggtcgggagggaggtatattgggaggagggtgggtcaaggcagaaggagaagctgttgaaatgagggccgtgaaatcagtttctgttggtttgcggttgtgtttggttttgtttgtttctttataaaaaattcaatcgggcagctcccttttccacaagcctctttgtgactgtagaactattgtagaaaaaaaaagttcttttctatattataaaagaaattatccaacacagtaatattggtacctgtcattttttcacttctgtttaaaaaaaatgtatttttagcaagataacttgggtaatcttctaaaaaagaaatttaaaaactcactgttagtgactttgatgccttttaaaataagagctttttcatttcattccatctttaaaattttttatctttgttgtagaatattaaaaactattttaagaaagataaattctctttaaagagatctctagcgtgtgtgaayagagctccagatgcctctaaaagccgcatgtacaaaggaagccacgtctatcctgtctgtttatatttgcttttcctgttttgtaacctctttgtactttgttcatggtgacttgtaagctaaggggaaggggtgcctagatgcctttgtatctctccatgtcacgcgctcctgggccagccggcctcccttcctctccttgtatgtaatacctttttttcccctttctagcaagtactttcaaaagaactctgtacattttaacataaaaaataaattatgttgagccattt

SEQ ID NO: 5558 - DNA, 5558 bp, Homo sapiens
tttctccaccaggaaaagcactgccaacagaagtacaatgtttcctgtataatgattcttcctcaataccagcgtaagggctatggcaggtttctcatcgatttcagttatttgttatcaaagcgtgaaggccaagcagggtctccagagaaaccgttatctgatctgggtcgtctttcctacatggcatattggaaaagtgtaatattggagtgcctttatcaccaaaatgacaagcagatcagcattaagaagttaagcaagttgactggaatctgccctcaagacatcacttccacactccaccacctacgaatgctggacttccgtagtgaccaatttgtgattatccgccgggaaaaacttatccaggatcacatggcaaagcttcagctgaatttgcgacctgtagatgtagatccagaatgtttgcgctggactccagtcatagtgtccaactctgtggtctcagaggaggaagaagaggaggctgaggaaggagaaaacgaagagccacagtgccaggaaagagaattagagatcagtgtgggaaagtctgtgtctcatgagaacaaagaacaagattcttattcagtagaaagtgaaaagaaaccagaagttatggctccagtcagttctacacgtttgagcaaacaagtccttcctcatgatagtcttcctgcaaatagccagccatctcggaggggccgctgggggaggaagaacagaaaaacccaggaacgttttggtgataaagattctaaactgctcttggaagagacgtcttcagctcctcaggaacartatggagaatgtggggagaaatcagaagccacccaggaacaatacactgaaagtgaagaacagctggtggcttctgaggagcagccaagccaggacgggaaacctgaccttcccaagagaagactcagtgagggggttgagccctggcgaggacagctcaagaaaagccctgaggctctgaagtgcagattaacagaaggaagtgagaggctgccmcgtcgctacagtgagggtgacagggctgtcctcaggggcttcagtgagagcagcgaggaggaggaggagccrgaaagccctcggtcaagctcgccaccaattctcacaaagcccacgctgaagcgaaagaaaccatttctccaccgaaggaggagagtccgaaagcgcaaacaccacaatagcagtgtagtcacagaaactatttctgagaccactgaagtgttagatgaaccttttgaagattctgactccgagaggccaatgccaagattagaacccacrtttgagatcgatgaagaagaggaggaagaggatgaaaatgaacttttccctagagaatacttccgtcgtttgtcttcgcaggatgtactcaggtgtcagtcctcttctaagaggaagtctaaagatgaagaagaagatgaagagtcagatgatgctgatgacactcctatcttaaagccagtatctcttttgcgaaaacgtgatgtgaagaattctcctcttgagccagatacatccacacctttgaaaaagaaaaagggatggcccaaaggcaagagccgcaaaccaatccactggaagaaaagacctggtcgaaaaccaggatttaagttgagtcgggaaatcatgccagtttctactcaagcatgcgtcattgagcccatcrtttccattcctaaagctggacgtaaacccaagatccaggagagtgaagaaactgttgagccaaaagaagacatgcccctacccgaggagaggaaggaggaggaggagatgcaagcagaggcagaagaggctgaagagggtgaggaagaggatgcagccagcagtgaagtcccagcagcctctccagcagacagcagcaatagtcctgagaccgaaaccaaggagcctgaggtggaggaggaagaagagaagccccgtgtctcagaggagcagaggcagtcagaggaggagcagcaggaattagaggagccagagccagaggaggaggaagatgcagctgcagagactgcccagaatgacgaccacgacgctgatgatgaggatgatggccacctggagtccacaaagaaaaaggagctagaggaacagcccacgagggaagatgtcaaggaggagcctggtgttcaagagtcttttttagatgctaatatgcagaagagtagggaaaagataaaggataaagaggaaaccgagctggattccgaagaggagcagccttcccatgacacgtcygtggtgtcagagcagatggctgggtctgaggacgaccacgaagaagactcccacactaaggaagagttaatcgaattaaaagaggaggaagagattcctcatagtgagctggatctggaaactgtacaggcagtgcagtctttgactcaagaagaaagcagygagcatgagggcgcctaccaggactgtgaggaaactcttgcggcgtgtcagaccctgcagagttacacccaggctgacgaggaccctcagatgtccatggttgaagactgtcatgcgtcagaacataatagccctatctcctcygttcagtctcaccccagccagtcagtccgttcggtcagcagtcccaacgtgcctgcccttgagagtggctacacccagatcagcccagaacaaggatccctgtccgcaccctctatgcagaacatggagaccagccccatgatggatgtgccttccgtatcagaccactctcagcaggtggtggacagcggcttcagtgacctgggcagcattgagagcaccactgaaaactatgagaacccaagcagttacgactccacgatgggcggcagcatctgtgggaacagctcttcccagagcagctgctcctacggtgggctgtcgtcctccagcagcctcacccagagcagctgtgtggtcactcagcagatggccagcatgggcagcagctgcagcatgatgcagcagagcagcgtscagcctgctgccaactgcagcatcaagtcacctcagagctgygtggtggagaggcctcccagtaaccagcagcagcagccgccaccaccgcctccacagcagccacagccgccgccgccacaaccacaaccagcaccacagcctccaccaccccagcagcagccgcaacagcagccgcagcctcagccccagcagcctccacccccaccccctccccagcagcagcccccgctgtcacagtgtagtatgaataacagtttcaccccagctcctatgatcatggagataccagaatctggaagcactgggaacataagtatctatgagaggattccaggggattttggtgccggcagctactctcaaccatcagccaccttcagcctagccaagctgcagcagctgaccaacaccattatggaccctcatgccatgccttatagccattctcctgctgtgacttcctatgcaaccagtgtttctctgtccaatacaggactggctcarctggctccatctcatcccttagctgggactcctcaagcacaagccaccatgacgccacccccaaacttggcatccactaccatgaacctcacatctcctctgcttcagtgcaacatgtctgccaccaacattggcattcctcacacgcagagattgcaagggcaaatgccagtgaaggggcacatttccatccgctccaagtctgcgccactgccctctgcggctgctcaccagcagcagctgtatggccgtagcccatcggcagttgccatgcaggctggccctcgcgcactggctgttcagcgtggcatgaacatgggggttaatctgatgcctactcccgcctataatgtcaattccatgaatatgaacaccttgaatgccatgaacagctatcgaatgacacagcccatgatgaacagcagttaccatagtaaccctgcctacatgaaccagacagcacagtatcctatgcagatgcagatgggaatgatggggagccaggcctatacccagcagcctatgcagcctaaccctcatgggaacatgatgtacacaggcccctcccatcacagctacatgaacgctgctggcgtgcccaagcagtcactcaacggaccttacatgagaagatgagcaagatgaacttgcaatcaaaaacttaaatatatataaataaaggaaccttttatactgacaaaccagagaaaaatggacctttttccagttaaaatattgctgtagatttagaggaatttttctttggtttattttattttttagaaaacctgatcttctctttttttgggttcattttgttstgggttttggttttcttcacaatcttgaacattttacagtagaactcatctaaaaatggatttggggatggggaaacatgcacaaaatcttttcataattaaaaagagccttactttctttacataccacatggacagaatttgtgtaaaagtgaattatctttattttaaaatgtatgtttcccctcactgtttgcagctcccaatgttgtcatttttaaatgttatatacatctcaagggttaaccagaccctttcctccaaacccaacctttcatttcctacttcattccagcaggaggcacttaggggagactcggatggggacatggagaacaacccaagctccttaaacttattattattgttaatattattattattattattaataaagtgaggcaggaaaatgcttctccttttaaaatcccctccactcctcacacacacacacctcttgaaacccttccccaagaatgtttctttatagacggacttcattgaaatctttgttgttcttgaatcaagtgtaatataatttttttcttcttttttaaaatattcccactcagcactcagagacacaaaaatactgtaagtctcaattaacagcagaatctcagagaaaagctgtttgcaatccaaatccagcctttggaggaatagagatggtcaattaacaatcaaaaagaggagattaacctcttgtttttttaccacctggtgaatcagccataacgcacacacacgccacccagcctcttgtttctagtatgtactttgaaatgctaactgagggtcttgatgcttgagcctttgactgataaaactcaaatagcagtccccagtgatttgcctcttaggttctttcttaaattgttggtggatgactgtacattttagtgatttgaaaaataactgacaaaccattgaaacagtttattttatgttggaagagatggcgcagatgtgtgtcagaagggagatcacggtgtgagtttcgtagctatttaagtgatacatacctctagtttttgtatgtcttttgagatcctgagttcatcccctgwgaatcagagtgcacaagcacctctcctgtgagtggctaatgagaagagggacagacgggcagatctggacagcagaatgttataacgcaagttcatgtgttgctcccaactccattctctttttttttgtgcaaccagattgcccattctcttcctattacttgctccagggataggt

SEQ ID NO: 5559 - DNA, 4932 bp, Homo sapiens
cgcgccggagcgggacacgcatgcgccggtctggacccggcacccagtaacggactcgagctcctcccaccggaagtgggcagccgcgcagcgggaagwgccggccgaagcgtggcggccacagactgtgggtaccgggtccgagggactcgcgcttttctctccgtgccatggcgccagcgaaagccacgaacgtggtgcggctgctactaggctccacagcgctgtggctttcgcagctcggctccgggacggtcgccgcgtccaagtcgktgactgcccacttggccgcgaagtggcccgagaccccgctgctgctggaggcaagtgaatttatggcagaagaaagtaatgaaaaattttggcagtttttggaaactgtgcaagaattagcaatttataagcaaacagaatcagattattcttattacaacttaatcctgaagaaagctggacagtttctagacaatttacacatcaaccttttaaagtttgctttctctataagggcatactccccagctattcagatgtttcagcagattgcagctgatgagccaccaccagatggttgtaatgcatttgtggttattcataagaagcacacctgtaaaattaatgagattaaaaagctgctgaagaaagctgcttcaaggactagaccttatctatttaaaggagatcacaaatttcctacaaacaaagagaacttaccagtggtgattctctatgccgaaatgggtactagaacatttagtgcatttcacaaagtattgtctgaaaaagctcaaaatgaggaaattctgtatgttcttcgccattatattcagaaaccaagctcacggaaaatgtacttatctgggtatggtgtggagctagcaattaagagtacagaatacaaagcactggatgatacccaagttaaaactgtgactaatactactgtagaggatgagactgaaacaaatgaagttcaaggatttctctttgggaaactaaaagaaatatattcagatcttagagataatctgacagcattccaaaaatacctgattgagagtaacaaacaaatgatgcctttgaaagtctgggaactacaagatcttagttttcaagcagcttctcaaataatgtccgctccagtttatgatkccattaaattaatgaaagacatttcacagaacttccccataaaagccagatctctaaccagaattgctgtaaatcaacatatgagagaagaaataaaggaaaatcaaaaggatcttcaagttagatttaaaattcagccaggcgatgctcgtctatttataaatggccttcgtgttgatatggatgtttatgacgctttyagtattttggatatgctgaaattagaaggaaaaatgatgaatggccttcgcaatcttgggatcaatggggaagatatgagcaaatttttaaaattaaattcacacatttgggaatatacttatgtattagatattcgacattcttctataatgtggattaatgacttagaaaatgatgatttrtatattacatggcctacaagttgccagaaacttctgaagccagtatttcctggaagtgtaccttccataaggcgcaattttcataatttggttctgtttattgatccggcccaagaatataccttggattttataaaacttgctgatgttttctattctcacgaagttcctcttagaattggttttgtgttcattcttaatacagatgatgaagttgatggagcaaatgatgctggagttgctctctggcgagctttcaactatattgcagaagaatttgatatatcagaagcatttatttctatagtacacatgtaccaaaaagtgaagaaggatcaaaatatactcactgtggacaatgtgaagagtgttctccaaaatacatttcctcatgctaatatttgggatattttgggaattcattctaaatatgatgaagaaagaaaggctggagcaagcttttataagatgactggcctgggtcctttgcctcaagctctttataatggtgaaccctttaaacatgaagagatgaatattaaagaactaaaaatggctgttcttcaaagaatgatggatgcatctgtatatttacaaagagaagtttttttgggcacattaaatgatcgcacgaatgcaattgattttctaatggataggaataatgttgtaccccgtataaatactttgattttgcgtactaaccagcagtacctcaatttaatatctacatcagkaactgctgatgttgaagatttctctactttctttttcttggattcacaagataagagtgctgtaattgcaaagaacatgtattatttaacccaagacgatgagagtataatttctgcagtcactctctggattattgcagattttgataagccttctgggagaaaacttctttttaatgcattaaagcacatgaaaacaagtgttcatagtcggttggggattatttataatcctacatcaaaaataaatgaagagaacacagctatttctagaggaattttggcagcttttcttacacagaagaacatgtttttgagaagctttcttgggcaactggcaaaggaagaaattgctacarctatttactctggagataaaattaaaacattccttattgaggggatggrtaagaatgcttttgagaaaaaatataatactgttggagtgaatatttttcgaactcaccagttgttctgtcaagatgtacttarattacgtcctggagaaatgggtattgtcagcaatgggagattcttaggacctttagatgaagatttttatgcagaagatttttacttgttggaaaagataacatttagtaatttaggagagaaaattaaaggcattgttgaaaatatgggaatcaacgcaaataacatgagtgacwttattatgaaagttgatgcccttatgtcctctgtgcctaagcgtgcatctcgatatgatgtcacatttcttagggagaatcacagtgttataaagacgaatcctcaagagaatgatatgttcttcaatgtcattgctattgttgatccattaacaagagaagcacagaaaatggcacagttgttggttgtacttggcaagattatcaacmtgaagataaagttgttcatgaactgtaggggcaggctttcagaagcccctttagaaagcttttaccgttttgttctggaaccagaactgatgtcaggggctaatgacgtttcttctcttggaccagtggcaaaatttttggatattcctgaatcacccctcctaatcctcaacatgattactccagaaggctggttggttgaaacagtgcacagcaactgtgaccttgataatattcacttaaaggatactgagaaaactgttacagcagaatatgaactagaatacttactactggaaggacaatgctttgataaagtgacagaacagcctcctcggggtctgcagttcacactaggcacaaaaaataaacctgctgtggttgatacaatagtgatggcacatcargggtattttcaattaaaagcaaacccaggtgcttggatactgaggttacaccaaggaaaatctgaagatatttatcaaatagttgggcatgaaggaactgactctcaagcagacctagaagatatcattgttgtattaaacagcttcaaaagcaagatactcaaagtaaaagtgaaaaaagaaacagacaaaattaaggaagatatccttaccgatgaagatgaaaaaacaaaaggactgtgggattccattaaaagtttcacagtaagcttgcataaagaaaacaaaaaggaaaaagatgtcctaaacattttttcagttgcttctggtcatttatatgaacgttttttaagaattatgatgctttctgttttgcgtaacaccaaaacaccagtgaaattctggttgctaaaaaattatctctcaccgacatttaaagaagtaattcctcacatggctaaagagtwtggattccgatatgaactagttcaatataggtggccccgttggcttcgtcaacagactgaaagacagaggattatytggggttacaaaattcttttccttgatgttcttttcccactagcagtggacaaaatcatttttgttgatgctgaccagattgtgagacatgatctaaaagaacttcgagatttcgatctggatggagctccttatgggtatacyccattttgtgatagccgcaggraaatggatggrtatcgtttctggaaaacaggatactgggcatcacatcttttaagacggaaataccatatcagtgctttatatgtagtggatctcaagaagttcaggagarttggagcaggtgacaggctcaggagccagtatcaagctctcagtcaagatccaaacagtctttcaaacctagatcaggatctccccaataatatgatttaccaagtcgccattaagtctcttcctcaagactggctgtggtgtgaaacctggtgtgatgatgaatccaaacaaagagccaaaacaattgatctgtgcaataatcccaaaacaaaagaatccaaactaaaagctgctgccagaattgtcccagaatgggtggagtatgatgctgagataagacaactattagatcatcttgaaaacaagaagcaagatacaattttgacacatgatgaactctagcactggtgtatatgagaaggaaggcgaaagcatgacaggaaayctgccgcctgctggggaaktctggagcccctgctgagacgatttggaagtctcgttaagatcagtgacatattcyttaattttaaaaaattgtaattatttaaaacagttatttaatgtattgaatgagtttaagttatataataaatgaccattgagtatttaaaac

SEQ ID NO: 5560 - DNA, 924 bp, Homo sapiens
atgaattctaaaagaatgctgttattggttttatttgctttttcactgatgttggttgagcgttatttcaggaatcaccaagtagaagaacttcggctctcagactggtttcatcctagaaaacgccctgatgttataacgaaaacagactggctcgctccygtcctatgggaagggactttcgacaggcgggtcctggaaaaacattacagaaggcggaatatcactgtgggcctggccgtctttgctactggcaggtttgcagaggagtacctgaggccgttcctacactccgcaaataagcacttcatgacaggctaccgagtgatcttctacatcatggtggacgccttcttcaagctgcctgacatagagcccagtcctcttcgaacgttcaaagcatttaaagtgggcaccgagaggtggtggctcgatggccccctggtgcatgtgaagagcctgggtgaacacatcgccagtcacatccaggacgaggtggacttcctcttcagcatggctgccaaccaggtcttccagaatgagttcggggtggagaccctgggcccgttggtggcccagctccrcgcctggtggtatttcagaaacaccaagaacttcccttatgagaggaggccgacctcagcarcttgcatcycgtttggacagggagatttctattatggcaacttgatggttggtggcacaccccataatattttagacttcatcaaagaatatctgaacggagttattcatgacatcaaaaatggactcaatagcacytatgaaaagcaccttaacaaatatttttacctcaataaacccacctagctgttatcaccagmatacagctgggatcttgcattttctcctcctccacagatccaatacgtcaaggtcgcacatgattcccagaggaaatta

SEQ ID NO: 5561 - DNA, 1736 bp, Homo sapiens
acatacgcgcgcgcacatgcacataggcacacagagatacgcgcacacacacacacaaacgcactcagatttcccggaccctggttttcctcctgtgaccctttcggggccgggctstcaccctaaagaagcagccccgccctggggtggccccaccctctcttgggacctgtcataagtcggaccccgggcgcccggctgcgcagtcccagccgccttccccaggcagtggaaccttcgggctcctgagcttcaggatggttcgtactaagacatggaccctgaagaagcactttgttggctatcctactaatagtgactttgagttgaagacakctgagctcccacccttaaaaaatggagaggtcctgcttgaagctttgttcctcaccgtggatccctacatgagagttgtggaaagtaaaaatgtagccctaccaaaaggaactattgtactggcttctccaggctggacaacgcactccatttctgatgggaaagatctggaaaagctgctgacagagtggccagacacaataccactgtctttggctctggggacagttggcatgccaggcctgactgcctactttggcctacttgaaatctgtggtgtgaagggtggagaaacagtgatggttaatgcagcagctggagctgtgggctcagtcgtggggcagattgcaaagctcaagggctgcaaagttgttggagcagtagggtctgatgaaaaggttgcctaccttcaaaagcttggatttgatgtcgtctttaactacaagacggtagagtctttggaagaaaccttgaagaaagcgtctcctgatggttatgattgttattttgataatrtaggtggagagttttcaaacactgttatcggccagatgaagaaatttggaaggattgccatatgtggagccatctctacatataacagaaccggcccacttcccccaggcccacccccagagattgttatctatcaggagcttcgcatggaagcttttgtcgtctaccgctggcaaggagatgcccgccaaaaagctctgaaggacttgctgaaatgggtcttagagggtaaaatccagtacaaggaatatatcattgaaggatttgaaaacatgccagctgcatttatgggaatgctgaaaggagataatttggggaagacaatagtgaaagcatgaaaaagaggacacatggaatctggaggccatttagatgattagttaatttgtttttcaccatttagcaaaaatgtatactaccttaaatgtcttaagaaatagtactcataatgagtttgagctacttaataaaatacatttaagtggtatgtaattagtgatggaggatggaagtttcaaagtcaacaacaaccagtcacctcactgttcactacagcttcttctgagttgtggtagaaaataatggctttgaagtgtgaaaattttccaaacactgtatgttttcattcataagtgggagctgaacaatgagaacacatggacatagggaggggaacaacacacgctggggcctgtggaagccggggtgagggagggagagcatcaggataaatagctaatgccttcgggggctaatacctaggtgatgggttgacaggtgaagcaaaccaycatggcacacgtttacctatgtaacaaacctgcacattccacacaattatcccggaactgaaaataaaataaaattaaattaaaaaaaaaagt

SEQ ID NO: 5562 - DNA, 1842 bp, Homo sapiens
acatacgcgcgcgcacatgcacataggcacacagagatacgcgcacacacacacacaaacgcactcagatttcccggaccctggttttcctcctgtgaccctttcggggccgggctstcaccctaaagaagcagccccgccctggggtggccccaccctctcttgggacctgtcataagtcggaccccgggcgcccggctgcgcagtcccagccgccttccccaggcagtggaaccttcgggctcctgagcttcaggatggttcgtactaagacatggaccctgaagaagcactttgttggctatcctactaatagtgactttgagttgaagacakctgagctcccacccttaaaaaatggagaggtcctgcttgaagctttgttcctcaccgtggatccctacatgagagttgtggaaagtaaaaatgtagccctaccaaaaggaactattgtactggcttctccaggctggacaacgcactccatttctgatgggaaagatctggaaaagctgctgacagagtggccagacacaataccactgtctttggctctggggacagttggcatgccaggcctgactgcctactttggcctacttgaaatctgtggtgtgaagggtggagaaacagtgatggttaatgcagcagctggagctgtgggctcagtcgtggggcagattgcaaagctcaagggctgcaaagttgttggagcagtagggtctgatgaaaaggttgcctaccttcaaaagcttggatttgatgtcgtctttaactacaagacggtagagtctttggaagaaaccttgaagaaagcgtctcctgatggttatgattgttattttgataatrtaggtggagagttttcaaacactgttatcggccagatgaagaaatttggaaggattgccatatgtggagccatctctacatataacagaaccggcccacttcccccaggcccacccccagagattgttatctatcaggagcttcgcatggaagcttttgtcgtctaccgctggcaaggagatgcccgccaaaaagctctgaaggacttgctgaaatgggtcttagagcttccctactttgtaattgactgacttcaagcaaatamtcttgtctataaatccatgaagagtgctaagccatcactggaatacattagcgaaaaacttgtatcagggtaaaatccagtacaaggaatatatcattgaaggatttgaaaacatgccagctgcatttatgggaatgctgaaaggagataatttggggaagacaatagtgaaagcatgaaaaagaggacacatggaatctggaggccatttagatgattagttaatttgtttttcaccatttagcaaaaatgtatactaccttaaatgtcttaagaaatagtactcataatgagtttgagctacttaataaaatacatttaagtggtatgtaattagtgatggaggatggaagtttcaaagtcaacaacaaccagtcacctcactgttcactacagcttcttctgagttgtggtagaaaataatggctttgaagtgtgaaaattttccaaacactgtatgttttcattcataagtgggagctgaacaatgagaacacatggacatagggaggggaacaacacacgctggggcctgtggaagccggggtgagggagggagagcatcaggataaatagctaatgccttcgggggctaatacctaggtgatgggttgacaggtgaagcaaaccaycatggcacacgtttacctatgtaacaaacctgcacattccacacaattatcccggaactgaaaataaaataaaattaaattaaaaaaaaaagt

SEQ ID NO: 5563 - DNA, 1793 bp, Homo sapiens
acatacgcgcgcgcacatgcacataggcacacagagatacgcgcacacacacacacaaacgcactcagatttcccggaccctggttttcctcctgtgaccctttcggggccgggctstcaccctaaagaagcagccccgccctggggtggccccaccctctcttgggacctgtcataagtcggaccccgggcgcccggctgcgcagtcccagccgccttccccaggcagtggaaccttcgggctcctgagcttcaggatggttcgtactaagacatggaccctgaagaagcactttgttggctatcctactaatagtgactttgagttgaagacakctgagctcccacccttaaaaaatggagaggtcctgcttgaagctttgttcctcaccgtggatccctacatgagagtggcagccaaaagattgaaggaaggtgatacaatgatggggcagcaagtggccaaagttgtggaaagtaaaaatgtagccctaccaaaaggaactattgtactggcttctccaggctggacaacgcactccatttctgatgggaaagatctggaaaagctgctgacagagtggccagacacaataccactgtctttggctctggggacagttggcatgccaggcctgactgcctactttggcctacttgaaatctgtggtgtgaagggtggagaaacagtgatggttaatgcagcagctggagctgtgggctcagtcgtggggcagattgcaaagctcaagggctgcaaagttgttggagcagtagggtctgatgaaaaggttgcctaccttcaaaagcttggatttgatgtcgtctttaactacaagacggtagagtctttggaagaaaccttgaagaaagcgtctcctgatggttatgattgttattttgataatrtaggtggagagttttcaaacactgttatcggccagatgaagaaatttggaaggattgccatatgtggagccatctctacatataacagaaccggcccacttcccccaggcccacccccagagattgttatctatcaggagcttcgcatggaagcttttgtcgtctaccgctggcaaggagatgcccgccaaaaagctctgaaggacttgctgaaatgggtcttagagggtaaaatccagtacaaggaatatatcattgaaggatttgaaaacatgccagctgcatttatgggaatgctgaaaggagataatttggggaagacaatagtgaaagcatgaaaaagaggacacatggaatctggaggccatttagatgattagttaatttgtttttcaccatttagcaaaaatgtatactaccttaaatgtcttaagaaatagtactcataatgagtttgagctacttaataaaatacatttaagtggtatgtaattagtgatggaggatggaagtttcaaagtcaacaacaaccagtcacctcactgttcactacagcttcttctgagttgtggtagaaaataatggctttgaagtgtgaaaattttccaaacactgtatgttttcattcataagtgggagctgaacaatgagaacacatggacatagggaggggaacaacacacgctggggcctgtggaagccggggtgagggagggagagcatcaggataaatagctaatgccttcgggggctaatacctaggtgatgggttgacaggtgaagcaaaccaycatggcacacgtttacctatgtaacaaacctgcacattccacacaattatcccggaactgaaaataaaataaaattaaattaaaaaaaaaagt

SEQ ID NO: 5564 - DNA, 875 bp, Homo sapiens
cccggctcgcaggctccaggggcggggcgwggccggggcgcagcgackggcgcggaggtccggccgggcgcgcgcgcccccgccacacgcacgccgggcgtgccagtttataaagggagagagcaagcagcgagtcttgaagctctgtttggtgctttggatccatttccrtcggtccttacagccgctcgtcagactccagcagccaagatggtgaagcagatcgagagcaagactgcttttcaggaagccttggacgctgcaggtgataaacttgtagtagttgacttctcagccacgtggtgtgggccttgcaaaatgatcaagcctttctttcattccctctctgaaaagtattccaacgtgatattccttgaagtagatgtggatgactgtcaggatgttgcttcagagtgtgaagtcaaatgcatgccaacattccagttttttaagaagggacaaaaggtgggtgaattttctggagccaataaggaaaagcttgaagccaccattaatgaattagtctaatcatgttttctgaaaayataaccagccattggctatttaaaacttgtaatttttttaatttacaaaaatataaaatatgaagacataaacccagttgccatctgcgtgacaataaaacattaatgctaacactttttaaaaccgtctcrtgtctgaatagctttcaaaataaatgtgaaatggtcatttaatgtattttcctatattctcaatcactttttagtaaccttgtaggccactgattattttaagattttaaaaattattattgctaccttaatgtattgctacaaaaatctcttgttgggggcaatgcaggtaataaagtagtatgttgttatttgtta

SEQ ID NO: 5565 - DNA, 815 bp, Homo sapiens
cccggctcgcaggctccaggggcggggcgwggccggggcgcagcgackggcgcggaggtccggccgggcgcgcgcgcccccgccacacgcacgccgggcgtgccagtttataaagggagagagcaagcagcgagtcttgaagctctgtttggtgctttggatccatttccrtcggtccttacagccgctcgtcagactccagcagccaagatggtgaagcagatcgagagcaagactgcttttcaggaagccttggacgctgcaggtgataaacttgtagtagttgacttctcagccacgtggtgtgggccttgcaaaatgatcaagcctttctttcatgatgttgcttcagagtgtgaagtcaaatgcatgccaacattccagttttttaagaagggacaaaaggtgggtgaattttctggagccaataaggaaaagcttgaagccaccattaatgaattagtctaatcatgttttctgaaaayataaccagccattggctatttaaaacttgtaatttttttaatttacaaaaatataaaatatgaagacataaacccagttgccatctgcgtgacaataaaacattaatgctaacactttttaaaaccgtctcrtgtctgaatagctttcaaaataaatgtgaaatggtcatttaatgtattttcctatattctcaatcactttttagtaaccttgtaggccactgattattttaagattttaaaaattattattgctaccttaatgtattgctacaaaaatctcttgttgggggcaatgcaggtaataaagtagtatgttgttatttgtta

SEQ ID NO: 5566 - DNA, 4398 bp, Homo sapiens
aggcgcactcggcgatcccggcttttccgcgcgcagttcccgcacaggcatcggggggggcaggggcggggcaggggcggggataaatgcggagggacggtccagctttagctctctgctcgccgccgccgctgtcgccgccacctcctctgatctacgaaagtcatgttacccaacaccgggaggctggcaggatgtacagtttttatcacaggtgcaagccgtggcattggcaaagctattgcattgaaagcagcaaaggatggagcaaatattgttattgctgcaaagaccgcccagccacatccaaaacttctaggcacaatctatactgctgctgaagaaattgaagcagttggaggaaaggccttgccatgtattgttgatgtgagagatgaacagcagatcagtgctgcagtggagaaagccatcaagaaatttggagcttataccattgctaagtatggtatgtctatgtatgtgcttggaatggcagaagaatttaaaggtgaaattgcagtcaatgcattatggcctaaaacagccatacacactgctgctatggatatgctgggaggacctggtatcgaaagccagtgtagaaaagttgatatcattgcagatgcagcatattccattttccaaaagccaaaaagttttactggcaactttgtcattgatgaaaatatcttaaaagaagaaggaatagaaaattttgacgtttatgcaattaaaccaggtcatcctttgcaaccagatttcttcttagatgaatacccagaagcagttagcaagaaagtggaatcaactggtgctgttccagaattcaaagaagagaarctgcagctgcaaccaaaaccacrttctggagctgtggaagaaacatttagaattgttaaggactctctcagtgatgatgttgttaaagccactcaagcaatctatctgtttgaactctccggtgaagatggtggcacgtggtttcttgatctgaaaagcaagggtgggaatgtcggatatggagagccttctgatcaggcagatgtggtgatgagtatgactactgatgactttgtaaaaatgttttcagggaaactaaaaccaacaatggcattcatgtcagggaaattgaagattaaaggtaacatggccctagcaatcaaattggagaagctaatgaatcagatgaatgccagactgtgaaggaaaatataaaaaaaaagtcgactgctatgctcaaaaagtaaaaaaagctcaacagttaaaatctaatgtttgttttctttcctgttatattataaggatatgcacgtttgttctggaaaagatagaatttgtctctaaaagacttgaaattgtaattaaaatggcaagctaatcaaacataagcttcattaagtgggattctaagacagtctgtgtttttatatttcaagggtttaaccctttgagccttacatctcattcactgtctttctccaagaaaagtattttgggcggacagtcagatcaagcagtaaaattagctctttcaaatcttcttgtcatgtaaaatgaagctagtctgttttaaaatttttagttttggattgtatactaatgaaaatcttaatgatgtttttgatttttatatacttattttaaagaaaatcttatatagtacattttacaaaaattataaaaaatgaattagtactggcgaggactaaatgaaacaataatttttcattttgataactagctttccaggtggacttagccataggaaaatattactaatgtaatttaacaaattgctgcatgtattccatttaaaaatatgtttaaattgtcctaaaacaaaataattttctccctaggagtatgcatttggctacagtgttttgaaacagaaaccttagaataggtcattggtatgggctgaactgtgtatcccccaattcatttgttgaggtcctaactcccatttcttttgaatgtgactgttcggagatgaggcctttaaagaggtgacttaagttcaaaggaggctgttagtctaatccaacatggtgtcctttggacataagagataccagcaatgtgtgcacagaacaaagaccaggagaggacacagtgagaaggcagttatctgcaagcaaagagagaggcttcagaagaaacaaaatcaccagcaccttgatctttgacttctaatctccagaatagtgagaaataaatttctgttgttaagccgtccactgtgggaggccgacgcaggaggattgcttgaggccaggagttcaaggccagcctggacaacatagtaagaccctatctctacccccctaataaattaatttaaaaagccccccaatctgtggtattttattatggcagccctagcaagctaatacagtggtttgagaggctgggagggttgaggggaagataaacttttaaaaagctcttatctttcatttcaatcagttaaaaatacttgctcagtgtaacaattttgcttctcagcttccactctaatattgttgtgccattaagcaatttagctaatcctgacatttcttagattcataatgttaggagcatttaatctgtattttacaagttaggaagcagaggatcagagatgggaaaggactagcccaaggccaacattaacaagccctctaacaaaaactttacaatacatttatgttgaatggaactccaagatctcacctctccatccaggaatggagtccatgtaatcaaagtgaacttaaaaataggacastttcaacaagtcaggagattcacagcaactgatcaaagggagtccagtcaacgtgagcaagcgtgattatgatgaggaagccccctctgctttaatccacacaaggaacgtaacctgaagtaacctgatgttaaccaatctgctgtgtctactatgctgtttccttgttcctgctagtgctgctttacaaatgcagaccattctatcatacctggcrgggcttctgttttattttgtaggctggatgctacccagttcatgaatcgctaataaaagccaattagatctttacataatttgttgagattttattctttgacattcttaaaggtttgggaaaattagaggtagaacataccgtgaggcagcaatctctgggttctggtcattaaaatatgaatttgctaattatacctatcccaacagggggattgagtcaagggaccttgcccttttctggactgacctgcttgattattgccctaagtgattgttagttaggttgcccattggaatctctgccttctggctttaaaaatttttccagattggagtaaattgagctgactggttttgagctttgtaatgttaggggaccagcaatgagttcctctgatccatccaatcattagtagattaaatctttgttttaaacccatcacagtccactattcatccctttttaaaataaccatttaaaaattttytaccctgaattgcattttgaaagggatggttcctaggtaacacaaggtagaaaatttacatctcaaaggcagagaacttacatttcaggcctaaatattgttatttgccaagacagaaagttgatgctaagaagcccagttcagacaaaatggttgaaggtgagtttatttggactaatgctctcacctattgtaagaatttctactgattttcctttatagatacacgtttttacaaagagtttcaaaataactggctaaataccagaaacgcaaattttggagactgatttaattcaataggcggtcttttcaacttagcttctgtttcttaactagattactgagttcagggcagagcccattagcaaatagagcagacaaagggtttcctatttctggatgcagatggatagttctgaaaatgcaaatctgcttcacccaagggcctaatttttataaatattacctagctttctttttgcctttggagtaaaacagtaactaagtgaaaagattggcagattcaattttcttataaactagttgcttaaacttttcatttgccttctacgtgagctcttttaaagagacaaacatttttgaaatctttttagaagcttttgcacatcaataggtatccctaggagggcctgattcagaagccctcatttttaaactcaattcttagatgaacagtcttattcatctggaatgttccacataatggtcatcataattctaatttatctttagtaagatttcaccatttttgtaagtatttgcagcttctaggccctaacacatgtaaaaggtaaacatagccagaaggtgaaatacacagttctttaaaaatttaaggatgctggccaggcgaggtggctcacacctgtaatcccagcactttgggaggctgag

SEQ ID NO: 5567 - DNA, 4553 bp, Homo sapiens
aggcgcactcggcgatcccggcttttccgcgcgcagttcccgcacaggcatcggggggggcaggggcggggcaggggcggggataaatgcggagggacggtccagctttagctctctgctcgccgccgccgctgtcgccgccacctcctctgatctacgaaagtcatgttacccaacaccgggaggctggcaggatgtacagtttttatcacaggtgcaagccgtggcattggcaaagctattgcattgaaagcagcaaaggatggagcaaatattgttattgctgcaaagaccgcccagccacatccaaaacttctaggcacaatctatactgctgctgaagaaattgaagcagttggaggaaaggccttgccatgtattgttgatgtgagagatgaacagcagatcagtgctgcagtggagaaagccatcaagaaatttggagcttataccattgctaagtatggtatgtctatgtatgtgcttggaatggcagaagaatttaaaggtgaaattgcagtcaatgcattatggcctaaaacagccatacacactgctgctatggatatgctgggaggacctggtatcgaaagccagtgtagaaaagttgatatcattgcagatgcagcatattccattttccaaaagccaaaaagttttactggcaactttgtcattgatgaaaatatcttaaaagaagaaggaatagaaaattttgacgtttatgcaattaaaccaggtcatcctttgcaaccagatttcttcttagatgaatacccagaagcagttagcaagaaagtggaatcaactggtgctgttccagaattcaaagaagagaarctgcagctgcaaccaaaaccacrttctggagctgtggaagaaacatttagaattgttaaggactctctcagtgatgatgttgttaaagccactcaagcaatctatctgtttgaactctccggtgaagatggtggcacgtggtttcttgatctgaaaagcaagggtgggaatgtcggatatggagagccttctgatcaggcagatgtggtgatgagtatgactactgatgactttgtaaaaatgttttcagggaaactaaaaccaacaatggcattcatgtcagggaaattgaagattaaaggtaacatggccctagcaatcaaattggagaagctaatgaatcagatgaatgccagactgtgaaggaaaatataaaaaaaaagtcgactgctatgctcaaaaagtaaaaaaagctcaacagttaaaatctaatgtttgttttctttcctgttatattataaggatatgcacgtttgttctggaaaagatagaatttgtctctaaaagacttgaaattgtaattaaaatggcaagctaatcaaacataagcttcattaagtgggattctaagacagtctgtgtttttatatttcaagggtttaaccctttgagccttacatctcattcactgtctttctccaagaaaagtattttgggcggacagtcagatcaagcagtaaaattagctctttcaaatcttcttgtcatgtaaaatgaagctagtctgttttaaaatttttagttttggattgtatactaatgaaaatcttaatgatgtttttgatttttatatacttattttaaagaaaatcttatatagtacattttacaaaaattataaaaaatgaattagtactggcgaggactaaatgaaacaataatttttcattttgataactagctttccaggtggacttagccataggaaaatattactaatgtaatttaacaaattgctgcatgtattccatttaaaaatatgtttaaattgtcctaaaacaaaataattttctccctaggagtatgcatttggctacagtgttttgaaacagaaaccttagaataggtcattggtatgggctgaactgtgtatcccccaattcatttgttgaggtcctaactcccatttcttttgaatgtgactgttcggagatgaggcctttaaagaggtgacttaagttcaaaggaggctgttagtctaatccaacatggtgtcctttggacataagagataccagcaatgtgtgcacagaacaaagaccaggagaggacacagtgagaaggcagttatctgcaagcaaagagagaggcttcagaagaaacaaaatcaccagcaccttgatctttgacttctaatctccagaatagtgagaaataaatttctgttgttaagccgtccactgtgggaggccgacgcaggaggattgcttgaggccaggagttcaaggccagcctggacaacatagtaagaccctatctctacccccctaataaattaatttaaaaagccccccaatctgtggtattttattatggcagccctagcaagctaatacagtggtttgagaggctgggagggttgaggggaagataaacttttaaaaagctcttatctttcatttcaatcagttaaaaatacttgctcagtgtaacaattttgcttctcagcttccactctaatattgttgtgccattaagcaatttagctaatcctgacatttcttagattcataatgttaggagcatttaatctgtattttacaagttaggaagcagaggatcagagatgggaaaggactagcccaaggccaacattaacaagccctctaacaaaaactttacaatacatttatgttgaatggaactccaagatctcacctctccatccaggaatggagtccatgtaatcaaagtgaacttaaaaataggacastttcaacaagtcaggagattcacagcaactgatcaaagggagtccagtcaacgtgagcaagcgtgattatgatgaggaagccccctctgctttaatccacacaaggaacgtaacctgaagtaacctgatgttaaccaatctgctgtgtctactatgctgtttccttgttcctgctagtgctgctttacaaatgcagaccattctatcatacctggcrgggcttctgttttattttgtaggctggatgctacccagttcatgaatcgctaataaaagccaattagatctttacataatttgttgagattttattctttgacattcttaaaggtttgggaaaattagaggtagaacataccgtgaggcagcaatctctgggttctggtcattaaaatatgaatttgctaattatacctatcccaacagggggattgagtcaagggaccttgcccttttctggactgacctgcttgattattgccctaagtgattgttagttaggttgcccattggaatctctgccttctggctttaaaaatttttccagattggagtaaattgagctgactggttttgagctttgtaatgttaggggaccagcaatgagttcctctgatccatccaatcattagtagattaaatctttgttttaaacccatcacagtccactattcatccctttttaaaataaccatttaaaaattttytaccctgaattgcattttgaaagggatggttcctaggtaacacaaggtagaaaatttacatctcaaaggcagagaacttacatttcaggcctaaatattgttatttgccaagacagaaagttgatgctaagaagcccagttcagacaaaatggttgaaggtgagtttatttggactaatgctctcacctattgtaagaatttctactgattttcctttatagatacacgtttttacaaagagtttcaaaataactggctaaataccagaaacgcaaattttggagactgatttaattcaataggcggtcttttcaacttagcttctgtttcttaactagattactgagttcagggcagagcccattagcaaatagagcagacaaagggtttcctatttctggatgcagatggatagttctgaaaatgcaaatctgcttcacccaagggcctaatttttataaatattacctagctttctttttgcctttggagtaaaacagtaactaagtgaaaagattggcagattcaattttcttataaactagttgcttaaacttttcatttgccttctacgtgagctcttttaaagagacaaacatttttgaaatctttttagaagcttttgcacatcaataggtatccctaggagggcctgattcagaagccctcatttttaaactcaattcttagatgaacagtcttattcatctggaatgttccacataatggtcatcataattctaatttatctttagtaagatttcaccatttttgtaagtatttgcagcttctaggccctaacacatgtaaaaggtaaacatagccagaaggtgaaatacacagttctttaaaaatttaaggattgctgggattataggtgtgagccaccatgcccagcctaaataattttttaaattccagtttttaattattctttgttaggatacagaaatgctttgtgtcctgcaatactgttaaatctccttattagttttagcagctttttttgtaaatcccttaggattttctatgtatgtgattgttatctgcaaataaaggcagttttatttct

SEQ ID NO: 5568 - DNA, 1122 bp, Homo sapiens
aggcgcactcggcgatcccggcttttccgcgcgcagttcccgcacaggcatcggggggggcaggggcggggcaggggcggggataaatgcggagggacggtccagctttagctctctgctcgccgccgccgctgtcgccgccacctcctctgatctacgaaagtcatgttacccaacaccgggaggctggcaggatgtacagtttttatcacaggtgcaagccgtggcattggcaaagctattgcattgaaagcagcaaaggatggagcaaatattgttattgctgcaaagaccgcccagccacatccaaaacttctaggcacaatctatactgctgctgaagaaattgaagcagttggaggaaaggccttgccatgtattgttgatgtgagagatgaacagcagatcagtgctgcagtggagaaagccatcaagaaatttggagcttataccattgctaagtatggtatgtctatgtatgtgcttggaatggcagaagaatttaaaggtgaaattgcagtcaatgcattatggcctaaaacagccatacacactgctgctatggatatgctgggaggacctggtatcgaaagccagtgtagaaaagttgatatcattgcagatgcagcatattccattttccaaaagccaaaaagttttactggcaactttgtcattgatgaaaatatcttaaaagaagaaggaatagaaaattttgacgtttatgcaattaaaccaggtcatcctttgcaaccagatttcttcttagatgaatacccagaagcagttagcaagaaagtggaatcaactggtgctgttccagaattcaaagaagagaarctgcagctgcaaccaaaaccacrttctggagctgtggaagaaacatttagaattgttaaggactctctcagtgatgatgttgttaaagccactcaagcaatctatctgtttgaactctccgtgtcagcagataattccacttgctctttgacagaggaaatcaagcgctttctgctcagatccaggcaagtggatgccgtatctgtcaagatcaagaaaaataaagttcacagcagcaggattatactttggttgtcacaaagagaaggcagagaaacaagc

SEQ ID NO: 5569 - DNA, 3618 bp, Homo sapiens
cgtggcgtggcgacggagtcgcgcgagggacacgccgcgttgtgggttctcggcctgaggtgcgagagaagcggtgaccgcggccctggctgctcggacccgggaacatgatggtcgctggagcagaaggcgctgagaagggaccacggcggcgctgggtcgtgcgagccagtagcgggctgaaacgtagaggccagaaccaggtctcagggggcactaaaggcggtcggaggtaatccccacaccgcttcctcctggaagtcaggctggccgggagctccygtatccaggacggttggtcgcctctggcctggcagggatcctagtgtctcgggacctcccggtgacgcgcctgcctcccctgctgcaccataggcccgggagtacggcgtccccacagcttggaccggcaggggctcgtgaaatgtttgtcaagtggataaatgaccatggccgtggtctccgcgggaggtgaggaaactgaaagccaccgaggaaaaggggggcgctccttaagaagtgccgcggtcacgtgtacgtttcaaaagaatggcgtgactgagtagggaggggaccgcggagaccctcagaccctggactgtaaggagatgaggggccgtgaaggggaacccaggaaactgagtcctgaaagcaaggaggaacttccagaatgaagggcgccgacactccttcctgcctttgctcaagcggttccttcaccccgatcaagttccttcccatttctccatctgggggatcctgaacgtgcacatcctcagagaagccctcctggggtctccaattctagtttattgccccctcctatcgatsccccagcgcgctcatcgggcctgtggacaasgacaggtttgaagagaggattccctggatcgcggaagggctgcaggaatggcacagccccttccgaggatgccaaaggagcccgggcaaaggaaagtggccgtgcccgggcctgcctaccactagatccccacccacctatgactgctcagtcccgctctcctaccacacccacctttcccggcccaagccagcgcaccccgctgactccctgcccagtccaaactccaaggctgggcaaggcactgatccactgctggacaracccggggcagcctctgggtgaacagcagcgtgtccgccggcagcgaaccgagaccagcgagccgaccatgcggctgcacagacttcgtgcgcggctgagcgcggtggcctgtgggcttctrctgcttcttgtccggggccagggccaggactcagccagtcccatccggaccacacacacggggcaggtgctggggagtcttgtccatgtgaagggcgccaatgccggggtccaaaccttcctgggaattccatttgccaagccacctctaggtccgctgcgatttgcaccccctgagccccctgaatcttggagtggtgtgagggatggaaccacccatccggccatgtgtctacaggacctcaccgcagtggagtcagagtttcttagccagttcaacatgaccttcccttccgactccatgtctgaggactgcctgtacctcagcatctacacgccggcccatagccatgaaggctctaacctgccggtgatggtgtggatccacggtggtgcgcttgtttttggcatggcttccttgtatgatggttccatgctggctgccttggagaacgtggtggtggtcatcatccagtaccgcctgggtgtcctgggcttcttcagcactggagacaagcacgcaaccggcaactggggctacctggaccaagtggctgcactacgctgggtccagcagaatatcgcccactttggaggcaaccctgaccgtgtcaccatttttggcgagtctgcgggtggcacgagtgtgtcttcgcttgttgtgtcccccatatcccaaggactcttccacggagccatcatggagagtggcgtggccctcctgcccggcctcattgccagctcagctgatgtcatctccacggtggtggccaacctgtctgcctgtgaccaagttgactctgaggccctggtgggctgcctgcggggcaagagtaaagaggagattcttgcaattaacaagcctttcaagatgatccccggagtggtggatggggtcttcctgcccaggcacccccaggagctgctggcctctgcygactttcagcctgtccctagcattgttggtgtcaacaacaatgaattcggctggctcatccccaaggtcatgaggatctatgatacccagaaggaaatggacagagaggcctcccaggctgctctgcagaaaatgttaacgctgctgatgttgcctcctacatttggtgacctgctgagggaggagtacattggggacaatggggatccccagaccctccaagcgcagttccaggagatgatggcggactccatgtttgtgatccctgcactccaagtagcacattttcagtgttcccgggcccctgtgtacttctacgagttccagcatcagcccagctggctcaagaacatcaggccaccgcacatgaaggcagaccatggtgatgagcttccttttgttttcagaagtttctttgggggcaactacattaaattcactgaggaagaggagcagctaagcaggaagatgatgaagtactgggccaactttgcgagaaatgggaaccccaatggcgagggtctgccacactggccgctgttcgaccaggaggagcaatacctgcagctgaacctacagcctgcggtgggccgggctctgaaggcccacaggctccagttctggaagaaggcgctgccccaaaagatccaggagctcgaggagcctgaagagagacacacagagctgtagctccctgtgccggggaggagggggtgggttcgctgacaggcgagggtcagcctgctgtgcccacacacrcccactaaggagaaagaagttgattccttcattcacttcgccattcattcatacttccgtccatccattcagaaagcatttattaagaatttactcaggcatgatggcccatacttgtaatcccagctattgggaaggatgagatgggaggatggcttgaggccagaggtttgagaccgaccagccagggcaacacagtgagaccccttctcaaaaaaaaaaaaaaaaaagagagagtgtgtgattagaagctaaataggaaagttttgagcttcaagtcagtgaggagtaaaaaagatttttaaaaagcaaaraaaamaaaatataagggaaaaatatgagaaaaataaaaataaaaagagaataataggccaggcactgtggctcatgcccctaatcccagcacttttgggaggtcaaggtgagcagaacacctgaggacaggagtttgagaccagcctgcccaacgtggtgaaaccccatctctatgaaaaatacaaaaatcagacgggcacagtggtggtgcccacctgtgatcccagctcactgcaacctctgcctcttgggttcaacgtcgaattccttctgccttagcctcctgagtagctgagaagcggaggttgcataagctgagattgtgccactatactccagcctgggtgacagagcaagactc

SEQ ID NO: 5570 - DNA, 3570 bp, Homo sapiens
cgtggcgtggcgacggagtcgcgcgagggacacgccgcgttgtgggttctcggcctgaggtgcgagagaagcggtgaccgcggccctggctgctcggacccgggaacatgatggtcgctggagcagaaggcgctgagaagggaccacggcggcgctgggtcgtgcgagccagtagcgggctgaaacgtagaggccagaaccaggtctcagggggcactaaaggcggtcggaggtaatccccacaccgcttcctcctggaagtcaggctggccgggagctccygtatccaggacggttggtcgcctctggcctggcagggatcctagtgtctcgggacctcccggtgacgcgcctgcctcccctgctgcaccataggcccgggagtacggcgtccccacagcttggaccggcaggggctcgtgaaatgtttgtcaagtggataaatgaccatggccgtggtctccgcgggaggtgaggaaactgaaagccaccgaggaaaaggggggcgctccttaagaagtgccgcggtcacgtgtacgtttcaaaagaatggcgtgactgagtagggaggggaccgcggagaccctcagaccctggactgtaaggagatgaggggccgtgaaggggaacccaggaaactgagtcctgaaagcaaggaggaacttccagaatgaagggcgccgacactccttcctgcctttgctcaagcggttccttcaccccgatcaagttccttcccatttctccatctgggggatcctgaacgtgcacatcctcagagaagccctcctggggtctccaattctagtttattgccccctcctatcgatsccccagcgcgctcatcgggcctgtggacaasgacaggtttgaagagaggattccctggatcgcggaagggctgcaggaatggcacagccccttccgaggatgccaaaggagcccgggcaaaggaaagtggccgtgcccgggcctgcctaccactagatccccacccacctatgactgctcagtcccgctctcctaccacacccacctttcccggcccaagccagcgcaccccgctgactccctgcccagtccaaactccaaggctgggcaaggcactgatccactgctggacaracccggggcagcctctgggtgaacagcagcgtgtccgccggcagcgaaccgagaccagcgagccgaccatgcggctgcacagacttcgtgcgcggctgagcgcggtggcctgtgggcttctrctgcttcttgtccggggccagggccaggactcagccagtcccatccggaccacacacacggggcaggtgctggggagtcttgtccatgtgaagggcgccaatgccggggtccaaaccttcctgggaattccatttgccaagccacctctaggtccgctgcgatttgcaccccctgagccccctgaatcttggagtggtgtgagggatggaaccacccatccggccatgtgtctacaggacctcaccgcagtggagtcagagtttcttagccagttcaacatgaccttcccttccgactccatgtctgaggactgcctgtacctcagcatctacacgccggcccatagccatgaaggctctaacctgccggtgatggtgtggatccacggtggtgcgcttgtttttggcatggcttccttgtatgatggttccatgctggctgccttggagaacgtggtggtggtcatcatccagtaccgcctgggtgtcctgggcttcttcagcactggagacaagcacgcaaccggcaactggggctacctggaccaagtggctgcactacgctgggtccagcagaatatcgcccactttggaggcaaccctgaccgtgtcaccatttttggcgagtctgcgggtggcacgagtgtgtcttcgcttgttgtgtcccccatatcccaaggactcttccacggagccatcatggagagtggcgtggccctcctgcccggcctcattgccagctcagctgatgtcatctccacggtggtggccaacctgtctgcctgtgaccaagttgactctgaggccctggtgggctgcctgcggggcaagagtaaagaggagattcttgcaattaacaagcctttcaagatgatccccggagtggtggatggggtcttcctgcccaggcacccccaggagctgctggcctctgcygactttcagcctgtccctagcattgttggtgtcaacaacaatgaattcggctggctcatccccaaggtcatgaggatctatgatacccagaaggaaatggacagagaggcctcccaggctgctctgcagaaaatgttaacgctgctgatgttgcctcctacatttggtgacctgctgagggaggagtacattggggacaatggggatccccagaccctccaagcgcagttccaggagatgatggcggactccatgtttgtgatccctgcactccaagtagcacattttcagtgttcccgggcccctgtgtacttctacgagttccagcatcagcccagctggctcaagaacatcaggccaccgcacatgaaggcagaccatgttaaattcactgaggaagaggagcagctaagcaggaagatgatgaagtactgggccaactttgcgagaaatgggaaccccaatggcgagggtctgccacactggccgctgttcgaccaggaggagcaatacctgcagctgaacctacagcctgcggtgggccgggctctgaaggcccacaggctccagttctggaagaaggcgctgccccaaaagatccaggagctcgaggagcctgaagagagacacacagagctgtagctccctgtgccggggaggagggggtgggttcgctgacaggcgagggtcagcctgctgtgcccacacacrcccactaaggagaaagaagttgattccttcattcacttcgccattcattcatacttccgtccatccattcagaaagcatttattaagaatttactcaggcatgatggcccatacttgtaatcccagctattgggaaggatgagatgggaggatggcttgaggccagaggtttgagaccgaccagccagggcaacacagtgagaccccttctcaaaaaaaaaaaaaaaaaagagagagtgtgtgattagaagctaaataggaaagttttgagcttcaagtcagtgaggagtaaaaaagatttttaaaaagcaaaraaaamaaaatataagggaaaaatatgagaaaaataaaaataaaaagagaataataggccaggcactgtggctcatgcccctaatcccagcacttttgggaggtcaaggtgagcagaacacctgaggacaggagtttgagaccagcctgcccaacgtggtgaaaccccatctctatgaaaaatacaaaaatcagacgggcacagtggtggtgcccacctgtgatcccagctcactgcaacctctgcctcttgggttcaacgtcgaattccttctgccttagcctcctgagtagctgagaagcggaggttgcataagctgagattgtgccactatactccagcctgggtgacagagcaagactc

SEQ ID NO: 5571 - DNA, 3765 bp, Homo sapiens
cgtggcgtggcgacggagtcgcgcgagggacacgccgcgttgtgggttctcggcctgaggtgcgagagaagcggtgaccgcggccctggctgctcggacccgggaacatgatggtcgctggagcagaaggcgctgagaagggaccacggcggcgctgggtcgtgcgagccagtagcgggctgaaacgtagaggccagaaccaggtctcagggggcactaaaggcggtcggaggcccgggagtacggcgtccccacagcttggaccggcaggggctcgtgaaatgtttgtcaagtggataaatgaccatggccgtggtctccgcgggaggtgaggaaactgaaagccaccgaggaaaaggggggcgctccttaagaagtgccgcggtcacgtgtacgtttcaaaagaatggcgtgactgagtagggaggggaccgcggagaccctcagaccctggactgtaaggagatgaggggccgtgaaggggaacccaggaaactgagtcctgaaagcaaggaggaacttccagaatgaagggcgccgacactccttcctgcctttgctcaagcggttccttcaccccgatcaagttccttcccatttctccatctgggggatcctgaacgtgcacatcctcagagaagccctcctggggtctccaattctagtttattgccccctcctatcgatsccccagcgcgctcatcgggcctgtggacaasgacaggtttgaagagaggattccctggatcgcggaagggctgcaggaatggcacagccccttccgaggatgccaaaggagcccgggcaaaggaaagtggccgtgcccgggcctgcctaccactagatccccacccacctatgactgctcagtcccgctctcctaccacacccacctttcccggcccaagccagcgcaccccgctgactccctgcccagtccaaactccaaggctgggcaaggcactgatccactgctggacaracccggggcagcctctgggtgaacagcagcgtgtccgccggcagcgaaccgagaccagcgagccgaccatgcggctgcacagacttcgtgcgcggctgagcgcggtggcctgtgggcttctrctgcttcttgtccggggccagggccaggactcagccagtcccatccggaccacacacacggggcaggtgctggggagtcttgtccatgtgaagggcgccaatgccggggtccaaaccttcctgggaattccatttgccaagccacctctaggtccgctgcgatttgcaccccctgagccccctgaatcttggagtggtgtgagggatggaaccacccatccggccatgtgtctacaggacctcaccgcagtggagtcagagtttcttagccagttcaacatgaccttcccttccgactccatgtctgaggactgcctgtacctcagcatctacacgccggcccatagccatgaaggctctaacctgccggtgatggtgtggatccacggtggtgcgcttgtttttggcatggcttccttgtatgatggttccatgctggctgccttggagaacgtggtggtggtcatcatccagtaccgcctgggtgtcctgggcttcttcagcactggagacaagcacgcaaccggcaactggggctacctggaccaagtggctgcactacgctgggtccagcagaatatcgcccactttggaggcaaccctgaccgtgtcaccatttttggcgagtctgcgggtggcacgagtgtgtcttcgcttgttgtgtcccccatatcccaaggactcttccacggagccatcatggagagtggcgtggccctcctgcccggcctcattgccagctcagctgatgtcatctccacggtggtggccaacctgtctgcctgtgaccaagttgactctgaggccctggtgggctgcctgcggggcaagagtaaagaggagattcttgcaattaacaagcctttcaagatgatccccggagtggtggatggggtcttcctgcccaggcacccccaggagctgctggcctctgcygactttcagcctgtccctagcattgttggtgtcaacaacaatgaattcggctggctcatccccaaggtcatgaggatctatgatacccagaaggaaatggacagagaggcctcccaggctgctctgcagaaaatgttaacgctgctgatgttgcctcctacatttggtgacctgctgagggaggagtacattggggacaatggggatccccagaccctccaagcgcagttccaggagatgatggcggactccatgtttgtgatccctgcactccaagtagcacattttcagtgttcccgggcccctgtgtacttctacgagttccagcatcagcccagctggctcaagaacatcaggccaccgcacatgaaggcagaccatggtgatgagcttccttttgttttcagaagtttctttgggggcaactacattaaattcactgaggaagaggagcagctaagcaggaagatgatgaagtactgggccaactttgcgagaaatgggaaccccaatggcgagggtctgccacactggccgctgttcgaccaggaggagcaatacctgcagctgaacctacagcctgcggtgggccgggctctgaaggcccacaggctccagttctggaagaaggcgctgccccaaaagatccaggagctcgaggagcctgaagagagacacacagagctgtagctccctgtgccggggaggagggggtgggttcgctgacaggcgagggtcagcctgctgtgcccacacacrcccactaaggagaaagaagttgattccttcattcacttcgccattcattcatacttccgtccatccattcagaaagcatttattaagaatttactcaggcatgatggcccatacttgtaatcccagctattgggaaggatgagatgggaggatggcttgaggccagaggtttgagaccgaccagccagggcaacacagtgagaccccttctcaaaaaaaaaaaaaaaaaagagagagtgtgtgattagaagctaaataggaaagttttgagcttcaagtcagtgaggagtaaaaaagatttttaaaaagcaaaraaaamaaaatataagggaaaaatatgagaaaaataaaaataaaaagagaataataggccaggcactgtggctcatgcccctaatcccagcacttttgggaggtcaaggtgagcagaacacctgaggacaggagtttgagaccagcctgcccaacgtggtgaaaccccatctctatgaaaaatacaaaaatcagacgggcacagtggtggtgcccacctgtgatcccagctactcaggaggctgaggcaggagaattacttgaacctgggaggcagaggttgcagtgagctgagattgtgccactgtactccagcctgggcaacaagagcgagactccgtttccaaaaaaataagagagaatagaagaagctactgcatgatgttagttaccaagcctgccatgggtcctctcttgctagacacactccatagatccccccactgagctgtggatgggcaaaccccggtggaatcccaccctccccaacaccccactgagccctgggccccctcctcccttcctcacctccaccttctccctgccttctctcttctctcgtctgagcccccaggccttttccactttgagggaggtgcttcgaagaatgttgcccacacctaagtgttagaagcctatgtccgttcatccctg

SEQ ID NO: 5572 - DNA, 1175 bp, Homo sapiens
gaccacggccatggtcatttatccacttgacaaacatttcacgagcccctgccggtccaagctgtggggacgccgtactcccgggcctatggtgcagcaggggaggcaggcgcgtcaccgggaggtcccgagacactaggatccctgccaggccagaggcgaccaaccgtcctggatacrggagctcccggccagcctgacttccaggaggaagcggtgtggggattacctccgaccgcctttagtgccccctgagacctggttctggcctctacgtttcagcccgctactggctcgcacgacccagcgccgccgtggtcccttctcagcgccttctgctccagcgaccatcatgttcccgggtccgagcagccagggccgcggtcaccgcttctctcgcacctcaggccgagaacccacaacgcggcgtgtccctcgcgcgactccgtcgccacgccacgcccccttcccgttctccggaagtgcgcgggttggagcggaagcgcacgcctgctaggatcagcggtggtggttccgcgatggtaggcggcggcggggtcggcggcggcctcctggagaatgccaaccccctcatctaccagcgctctggggagcggcctgtgacggcaggcgaggaggacgagcaggttcccgacagcatcgacgcacgcgagatcttcgatctgattcgctccatcaatgacccggagcatccactgacgctagaggagttgaacgtagtagagcaggtgcgggttcaggttagcgaccccgagagtacagtggctgtggctttcacaccaaccattccgcactgcagcatggccacccttattggtctgtccatcaaggtcaarcttctgcgctcccttcctcagcgtttcaagatggacgtgcacattactccggggacccatgcctcagagcatgcagtgaacaagcaacttgcagataaggagcgggtggcagctgccctggagaacacccacctcttggaggttgtgaatcagtgcctgtcagcccgctcctgagcctggcctttgacccctcagcctgcatactggtatcctggtcccagctcctgccagggctgttaccgttgttttcttgaatcactcacaatgagaaactaacattttgctttttgtaataaagttaatttatattcagttccc

SEQ ID NO: 5573 - DNA, 3004 bp, Homo sapiens
ggccctccccgcgctttacggcccggcacgccacttttactgcagtcgcgcccgccgccgtcgttgcccccgctgccgcggctgctgcaggtgaggtgaagtgagctcgggtcccttctgcgctgccgcagggaggccgcccgggccaggcgagccgaaccaatgctggacctggaggtagtgcccgaacgctctctggggaacgagcaatgggaattcacgctgggaatgcctctggctcaggcagtagccattcttcagaagcactgtcgcatcatcaaaaacgtccaggttctctacagtgaacagtctcctctaagccatgacctcattcttaacctgactcaggacgggatcaaactaatgtttgatgctttcaatcagagacttaaggtgatcgaagtatgtgatttgactaaagtaaagttaaaatattgtggcgtgcattttaattctcaggccatagctcctaccattgaacagattgaccagtcttttggcgcaacccatcctggaggtaagccaagtccatctgattcctctggtcatcagtggcagttcatagcaataaacctgcccggtagtgccatcccaccccacttcctggagtcaggctcccataggattrtggggttggtacttgggtgtgaaggaaacatcctcccccttgttttcaacctagtaggccagtttagaaacaagccacagggaaggtgttgtcagtcattactccctgccaggctggtttatgttagccatttcagatgccagtcaaccatgttattttcttctcccccacccccaacagtgtacaactccrctgagcagctcttccatctcaacttcagaggactgtctttctcttttcagttagactcatggactgaggctccaaagtatgagcccaattttgcccatggcctggcttctctccagataccccatggagcaactgtaaaacgaatgtacatctacagtggcaacagcctgcaggataccaaggctcccatgatgcctctgagctgtttcctgggcaatgtctatgctgagagtgtagatgttcttcgagatggaactggacctgcaggtttacgacttcgcctacttgctgcaggttgtggacctggcctattagcagatgccaagatgcgggtatttgaacgttcagtgtattttggtgattcctgccaagatgttcttagcatgcttggctctccacacaaagtcttctataaatcagaagacaagatgaaaattcattctccttcccctcataaacaagttccatcgaagtgtaatgactacttttttaactacttcactcttggagtggacatcctctttgatgcgaatacacacaaagtgaagaagtttgttctacacaccaattaccctgggcattataatttcaacatttatcatcgctgtgagttcaagatcccactagccataaagaaagaaaacgcagatggtcagacagaaacatgcacgacctacagcaagtgggacaacatccaggagctcctgggccaccctgtggagaagcctgttgtcctgcacaggtcttcctccccaaacamcaccaacccatttggttccacattctgctttggtcttcagcgaatgatctttgaggtcatgcagaacaaccacattgcctcggtgaccctgtatggcccccccagatattcttctgtccatctttggcctgctggtgccagcaggggacacagactgcaaagagaagcacaaagtttgagccttgattcctggacccaggagctctcaactaacaaggaggcaggagaggtcaacccttgtcccatgcacattgggaagacttggggctctttctgtgactgaggacacaggcacccaggataaggacaaggtcctgcctttggctccacattgccacatgacccttaaggcaagcaggtagcgtgtccatagtacttggttgcgacatttgcactacatccactttagttacttgatgagctggctgtggccagggtggcccacctgcccttccctgttcctttcttgcacgcgctccctgcctgggcacaccaaactggttgaaacacagctttctaccatccaggtacatgcccaggcctggttctcacccctgttggagtcagctttcaagattgcctgtgcccctgctctgccccatcctggctggcagggctgcatgtttccatcctgtttgcctcttttatttaatgccaaagttttagccaaagacatcttcctacttttgttgtgtttcagcattctgttctgcactgtgggctggctctctgccccaaccctgggcactggcccctggctgggccatttcatggctcaaagcctctgggggctcaaggaaggctgggctgctcagtcccttcatgggtcttgctaatggaaagtagcatatatgtgctttaaaaatattaatccttttgaaaagaactgagaagaraaatgtataattttatcccatttttaatattttggtctagcaacttgtgatacatagatgacaattttgtgagtttttcaaatgtgtgtacagatttttgtaaatatgactcttttgtaattaactcatgtacagcctcatcctgtatagtttaatgatgaatgtgcaggggacctgtctcaggctcctatatggttcctgggccttatagccaggtttgtgtggcgctcccgacttttgtgactgactggtgtcttcccatttggactgtggcctggccagagccccttgcatatccccactgtcaggggcagccaggactgttcccatcctcctggaatgggggaaccttccttatcccctgcccacatcccctctccaataaagcacctgtgccctcagcaatggcctgccatgtgctgttgctgggatgtttgtattaaggtaagtgtgggtatgggaagacattccttggctcctctgaggggatacagcctccagtgggagactggcattgttgtgtgagtt

SEQ ID NO: 5574 - DNA, 3069 bp, Homo sapiens
ggccctccccgcgctttacggcccggcacgccacttttactgcagtcgcgcccgccgccgtcgttgcccccgctgccgcggctgctgcaggtgaggtgaagtgagctcgggtcccttctgcgctgccgcagggaggccgcccgggccaggcgagccgaaccaatgctggacctggaggtagtgcccgaacgctctctggggaacgagcaatgggaattcacgctgggaatgcctctggctcaggcagtagccattcttcagaagcactgtcgcatcatcaaaaacgtccaggttctctacagtgaacagtctcctctaagccatgacctcattcttaacctgactcaggacgggatcaaactaatgtttgatgctttcaatcagagacttaaggtgatcgaagtatgtgatttgactaaagtaaagttaaaatattgtggcgtgcattttaattctcaggccatagctcctaccattgaacagattgaccagtcttttggcgcaacccatcctggagtgtacaactccrctgagcagctcttccatctcaacttcagaggactgtctttctcttttcagttagactcatggactgaggctccaaagtatgagcccaattttgcccatggcctggcttctctccagataccccatggagcaactgtaaaacgaatgtacatctacagtggcaacagcctgcaggataccaaggctcccatgatgcctctgagctgtttcctgggcaatgtctatgctgagagtgtagatgttcttcgagatggaactggacctgcaggtttacgacttcgcctacttgctgcaggttgtggacctggcctattagcagatgccaagatgcgggtatttgaacgttcagtgtattttggtgattcctgccaagatgttcttagcatgcttggctctccacacaaagtcttctataaatcagaagacaagatgaaaattcattctccttcccctcataaacaagttccatcgaagtgtaatgactacttttttaactacttcactcttggagtggacatcctctttgatgcgaatacacacaaagtgaagaagtttgttctacacaccaattaccctgggcattataatttcaacatttatcatcgctgtgagttcaagatcccactagccataaagaaagaaaacgcagatggtcagacagaaacatgcacgacctacagcaagtgggacaacatccaggagctcctgggccaccctgtggagaagcctgttgtcctgcacaggtcttcctccccaaacamcaccaacccatttggttccacattctgctttggtcttcagcgaatgatctttgaggtcatgcagaacaaccacattgcctcggtgaccctgtatggcccccccaggcctggtagccacctgagaacagcggaactcccctagggacaccaccacccatgcccctctgtcccgtggaactgtgcatcacatcctgctcagtgggcctctgtaccaccctgtgggttttcttggacacctggccagtgctgaagggctgttgtgatgttctgaggttgggctcaggctgggtgctctgccatgggctgagtggcccagatattcttctgtccatctttggcctgctggtgccagcaggggacacagactgcaaagagaagcacaaagtttgagccttgattcctggacccaggagctctcaactaacaaggaggcaggagaggtcaacccttgtcccatgcacattgggaagacttggggctctttctgtgactgaggacacaggcacccaggataaggacaaggtcctgcctttggctccacattgccacatgacccttaaggcaagcaggtagcgtgtccatagtacttggttgcgacatttgcactacatccactttagttacttgatgagctggctgtggccagggtggcccacctgcccttccctgttcctttcttgcacgcgctccctgcctgggcacaccaaactggttgaaacacagctttctaccatccaggtacatgcccaggcctggttctcacccctgttggagtcagctttcaagattgcctgtgcccctgctctgccccatcctggctggcagggctgcatgtttccatcctgtttgcctcttttatttaatgccaaagttttagccaaagacatcttcctacttttgttgtgtttcagcattctgttctgcactgtgggctggctctctgccccaaccctgggcactggcccctggctgggccatttcatggctcaaagcctctgggggctcaaggaaggctgggctgctcagtcccttcatgggtcttgctaatggaaagtagcatatatgtgctttaaaaatattaatccttttgaaaagaactgagaagaraaatgtataattttatcccatttttaatattttggtctagcaacttgtgatacatagatgacaattttgtgagtttttcaaatgtgtgtacagatttttgtaaatatgactcttttgtaattaactcatgtacagcctcatcctgtatagtttaatgatgaatgtgcaggggacctgtctcaggctcctatatggttcctgggccttatagccaggtttgtgtggcgctcccgacttttgtgactgactggtgtcttcccatttggactgtggcctggccagagccccttgcatatccccactgtcaggggcagccaggactgttcccatcctcctggaatgggggaaccttccttatcccctgcccacatcccctctccaataaagcacctgtgccctcagcaatggcctgccatgtgctgttgctgggatgtttgtattaaggtaagtgtgggtattggttttttgagcaagggggtggttgaagcatatggggaaattaatagtggtggcatctcaggggaagacattccttggctcctctgaggggatacagcctccagtgggagactggcattgttgtgtgagttcaggaggtgaggaaagactaggtaggaccgtgcactcatttgtcccttatgtgtggctccatccctggtgctcagccacacct

SEQ ID NO: 5575 - DNA, 2835 bp, Homo sapiens
ccgcgctttacggcccggcacgccacttttactgcagtcgcgcccgccgccgtcgttgcccccgctgccgcggctgctgcagctcgggtcccttctgcgctgccgcagggaggccgcccgggccaggcgagccgaaccaatgctggacctggaggtagtgcccgaacgctctctggggaacgagcaatgggaattcacgctgggaatgcctctggctcaggcagtagccattcttcagaagcactgtcgcatcatcaaaaacgtccaggttctctacagtgaacagtctcctctaagccatgacctcattcttaacctgactcaggacgggatcaaactaatgtttgatgctttcaatcagagacttaaggtgatcgaagtatgtgatttgactaaagtaaagttaaaatattgtggcgtgcattttaattctcaggccatagctcctaccattgaacagattgaccagtcttttggcgcaacccatcctggagtgtacaactccrctgagcagctcttccatctcaacttcagaggactgtctttctcttttcagttagactcatggactgaggctccaaagtatgagcccaattttgcccatggcctggcttctctccagataccccatggagcaactgtaaaacgaatgtacatctacagtggcaacagcctgcaggataccaaggctcccatgatgcctctgagctgtttcctgggcaatgtctatgctgagagtgtagatgttcttcgagatggaactggacctgcaggtttacgacttcgcctacttgctgcaggttgtggacctggcctattagcagatgccaagatgcgggtatttgaacgttcagtgtattttggtgattcctgccaagatgttcttagcatgcttggctctccacacaaagtcttctataaatcagaagacaagatgaaaattcattctccttcccctcataaacaagttccatcgaagtgtaatgactacttttttaactacttcactcttggagtggacatcctctttgatgcgaatacacacaaagtgaagaagtttgttctacacaccaattaccctgggcattataatttcaacatttatcatcgctgtgagttcaagatcccactagccataaagaaagaaaacgcagatggtcagacagaaacatgcacgacctacagcaagtgggacaacatccaggagctcctgggccaccctgtggagaagcctgttgtcctgcacaggtcttcctccccaaacamcaccaacccatttggttccacattctgctttggtcttcagcgaatgatctttgaggtcatgcagaacaaccacattgcctcggtgaccctgtatggcccccccagatattcttctgtccatctttggcctgctggtgccagcaggggacacagactgcaaagagaagcacaaagtttgagccttgattcctggacccaggagctctcaactaacaaggaggcaggagaggtcaacccttgtcccatgcacattgggaagacttggggctctttctgtgactgaggacacaggcacccaggataaggacaaggtcctgcctttggctccacattgccacatgacccttaaggcaagcaggtagcgtgtccatagtacttggttgcgacatttgcactacatccactttagttacttgatgagctggctgtggccagggtggcccacctgcccttccctgttcctttcttgcacgcgctccctgcctgggcacaccaaactggttgaaacacagctttctaccatccaggtacatgcccaggcctggttctcacccctgttggagtcagctttcaagattgcctgtgcccctgctctgccccatcctggctggcagggctgcatgtttccatcctgtttgcctcttttatttaatgccaaagttttagccaaagacatcttcctacttttgttgtgtttcagcattctgttctgcactgtgggctggctctctgccccaaccctgggcactggcccctggctgggccatttcatggctcaaagcctctgggggctcaaggaaggctgggctgctcagtcccttcatgggtcttgctaatggaaagtagcatatatgtgctttaaaaatattaatccttttgaaaagaactgagaagaraaatgtataattttatcccatttttaatattttggtctagcaacttgtgatacatagatgacaattttgtgagtttttcaaatgtgtgtacagatttttgtaaatatgactcttttgtaattaactcatgtacagcctcatcctgtatagtttaatgatgaatgtgcaggggacctgtctcaggctcctatatggttcctgggccttatagccaggtttgtgtggcgctcccgacttttgtgactgactggtgtcttcccatttggactgtggcctggccagagccccttgcatatccccactgtcaggggcagccaggactgttcccatcctcctggaatgggggaaccttccttatcccctgcccacatcccctctccaataaagcacctgtgccctcagcaatggcctgccatgtgctgttgctgggatgtttgtattaaggtaagtgtgggtattggttttttgagcaagggggtggttgaagcatatggggaaattaatagtggtggcatctcaggggaagacattccttggctcctctgaggggatacagcctccagtgggagactggcattgttgtgtgagttcaggaggtgaggaaagactaggtaggaccgtgcactcatttgtcccttatgtgtggctccatccctggtgctcagccacacct

SEQ ID NO: 5576 - DNA, 2924 bp, Homo sapiens
ggccctccccgcgctttacggcccggcacgccacttttactgcagtcgcgcccgccgccgtcgttgcccccgctgccgcggctgctgcaggtgaggtgaagtgagctcgggtcccttctgcgctgccgcagggaggccgcccgggccaggcgagccgaaccaatgctggacctggaggtagtgcccgaacgctctctggggaacgagcaatgggaattcacgctgggaatgcctctggctcaggcagtagccattcttcagaagcactgtcgcatcatcaaaaacgtccaggttctctacagtgaacagtctcctctaagccatgacctcattcttaacctgactcaggacgggatcaaactaatgtttgatgctttcaatcagagacttaaggtgatcgaagtatgtgatttgactaaagtaaagttaaaatattgtggcgtgcattttaattctcaggccatagctcctaccattgaacagattgaccagtcttttggcgcaacccatcctggagtgtacaactccrctgagcagctcttccatctcaacttcagaggactgtctttctcttttcagttagactcatggactgaggctccaaagtatgagcccaattttgcccatggcctggcttctctccagataccccatggagcaactgtaaaacgaatgtacatctacagtggcaacagcctgcaggataccaaggctcccatgatgcctctgagctgtttcctgggcaatgtctatgctgagagtgtagatgttcttcgagatggaactggacctgcaggtttacgacttcgcctacttgctgcaggttgtggacctggcctattagcagatgccaagatgcgggtatttgaacgttcagtgtattttggtgattcctgccaagatgttcttagcatgcttggctctccacacaaagtcttctataaatcagaagacaagatgaaaattcattctccttcccctcataaacaagttccatcgaagtgtaatgactacttttttaactacttcactcttggagtggacatcctctttgatgcgaatacacacaaagtgaagaagtttgttctacacaccaattaccctgggcattataatttcaacatttatcatcgctgtgagttcaagatcccactagccataaagaaagaaaacgcagatggtcagacagaaacatgcacgacctacagcaagtgggacaacatccaggagctcctgggccaccctgtggagaagcctgttgtcctgcacaggtcttcctccccaaacamcaccaacccatttggttccacattctgctttggtcttcagcgaatgatctttgaggtcatgcagaacaaccacattgcctcggtgaccctgtatggcccccccaggcctggtagccacctgagaacagcggaactcccctagggacaccaccacccatgcccctctgtcccgtggaactgtgcatcacatcctgctcagtgggcctctgtaccaccctgtgggttttcttggacacctggccagtgctgaagggctgttgtgatgttctgaggttgggctcaggctgggtgctctgccatgggctgagtggcccagatattcttctgtccatctttggcctgctggtgccagcaggggacacagactgcaaagagaagcacaaagtttgagccttgattcctggacccaggagctctcaactaacaaggaggcaggagaggtcaacccttgtcccatgcacattgggaagacttggggctctttctgtgactgaggacacaggcacccaggataaggacaaggtcctgcctttggctccacattgccacatgacccttaaggcaagcaggtagcgtgtccatagtacttggttgcgacatttgcactacatccactttagttacttgatgagctggctgtggccagggtggcccacctgcccttccctgttcctttcttgcacgcgctccctgcctgggcacaccaaactggttgaaacacagctttctaccatccaggtacatgcccaggcctggttctcacccctgttggagtcagctttcaagattgcctgtgcccctgctctgccccatcctggctggcagggctgcatgtttccatcctgtttgcctcttttatttaatgccaaagttttagccaaagacatcttcctacttttgttgtgtttcagcattctgttctgcactgtgggctggctctctgccccaaccctgggcactggcccctggctgggccatttcatggctcaaagcctctgggggctcaaggaaggctgggctgctcagtcccttcatgggtcttgctaatggaaagtagcatatatgtgctttaaaaatattaatccttttgaaaagaactgagaagaraaatgtataattttatcccatttttaatattttggtctagcaacttgtgatacatagatgacaattttgtgagtttttcaaatgtgtgtacagatttttgtaaatatgactcttttgtaattaactcatgtacagcctcatcctgtatagtttaatgatgaatgtgcaggggacctgtctcaggctcctatatggttcctgggccttatagccaggtttgtgtggcgctcccgacttttgtgactgactggtgtcttcccatttggactgtggcctggccagagccccttgcatatccccactgtcaggggcagccaggactgttcccatcctcctggaatgggggaaccttccttatcccctgcccacatcccctctccaataaagcacctgtgccctcagcaatggcctgccatgtgctgttgctgggatgtttgtattaaggtaagtgtgggtatgggaagacattccttggctcctctgaggggatacagcctccagtgggagactggcattgttgtgtgagtt

SEQ ID NO: 5577 - DNA, 2198 bp, Homo sapiens
ggccctccccgcgctttacggcccggcacgccacttttactgcagtcgcgcccgccgccgtcgttgcccccgctgccgcggctgctgcaggtgaggtgaagtgagctcgggtcccttctgcgctgccgcagggaggccgcccgggccaggcgagccgaaccaatgctggacctggaggtagtgcccgaacgctctctggggaacgagcaatgggaattcacgctgggaatgcctctggctcaggcagtagccattcttcagaagcactgtcgcatcatcaaaaacgtccaggttctctacagtgaacagtctcctctaagccatgacctcattcttaacctgactcaggacgggatcaaactaatgtttgatgctttcaatcagagacttaaggtgatcgaagtatgtgatttgactaaagtaaagttaaaatattgtggcgtgcattttaattctcaggccatagctcctaccattgaacagattgaccagtcttttggcgcaacccatcctggagtgtacaactccrctgagcagctcttccatctcaacttcagaggactgtctttctcttttcagttagactcatggactgaggctccaaagtatgagcccaattttgcccatggcctggcttctctccagataccccatggagcaactgtaaaacgaatgtacatctacagtggcaacagcctgcaggataccaaggctcccatgatgcctctgagctgtttcctgggcaatgtctatgctgagagtgtagatgttcttcgagatggaactggacctgcaggtttacgacttcgcctacttgctgcaggttgtggacctggcctattagcagatgccaagatgcgggtatttgaacgttcagtgtattttggtgattcctgccaagatgttcttagcatgcttggctctccacacaaagtcttctataaatcagaagacaagatgaaaattcattctccttcccctcataaacaagttccatcgaagtgtaatgactacttttttaactacttcactcttggagtggacatcctctttgatgcgaatacacacaaagtgaagaagtttgttctacacaccaattaccctgggcattataatttcaacatttatcatcgctgtgagttcaagatcccactagccataaagaaagaaaacgcagatggtcagacagaaacatgcacgacctacagcaagtgggacaacatccaggagctcctgggccaccctgtggagaagcctgttgtcctgcacaggtcttcctccccaaacamcaccaacccatttggttccacattctgctttggtcttcagcgaatgatctttgaggtcatgcagaacaaccacattgcctcggtgaccctgtatggcccccccaggcctggtagccacctgagaacagcggaactcccctagggacaccaccacccatgcccctctgtcccgtggaactgtgcatcacatcctgctcagtgggcctctgtaccaccctgtgggttttcttggacacctggccagtgctgaagggctgttgtgatgttctgaggttgggctcaggctgggtgcttgctcagtcccttcatgggtcttgctaatggaaagtagcatatatgtgctttaaaaatattaatccttttgaaaagaactgagaagaraaatgtataattttatcccatttttaatattttggtctagcaacttgtgatacatagatgacaattttgtgagtttttcaaatgtgtgtacagatttttgtaaatatgactcttttgtaattaactcatgtacagcctcatcctgtatagtttaatgatgaatgtgcaggggacctgtctcaggctcctatatggttcctgggccttatagccaggtttgtgtggcgctcccgacttttgtgactgactggtgtcttcccatttggactgtggcctggccagagccccttgcatatccccactgtcaggggcagccaggactgttcccatcctcctggaatgggggaaccttccttatcccctgcccacatcccctctccaataaagcacctgtgccctcagcaatggcctgccatgtgctgttgctgggatgtttgtattaaggtaagtgtgggtatgggaagacattccttggctcctctgaggggatacagcctccagtgggagactggcattgttgtgtgagtt

SEQ ID NO: 5578 - DNA, 1054 bp, Homo sapiens
cagctacatcttgtgtagtgccagccacatccctgagatgctatggagaaagtgaagggtggagtaaatgagtttggctgtattagacaccaggtctctagggctgcttttaactctggcaaagtagattttgtcatgatcaatgactacttcattgacctcaaccacatggtatttacatgttctaatatgattccacccatgacgagttccacagcaccatcaaggctgagaatgcgaagcttgtcatcaatggaaatcccattaccatcttccagtagtgagatcccaccaaaatcaaactgggtgatgccaatagtgattatgttgtagagtctacccattatcttcactaccatggagaaggctggagctcacttagaggggagaatcaaaacagtcatcatctctggcccttctgctgatgcccccatatttgtgatgggcatgaaccataagaaatacaaaaacagcctcaagattgtcagcaatgcctcctacrctaccaactgcttagcctccctggccaaggtcatccatgacaactttggcattatggagggactcatgaccacagtccatggccttcactgccacactgccacacccagaagactatggatggaccctctgggaaactggcgtgatggccttgggggtctccagaacatcatccctgcatctagtggccctgccaaggctgtgcaaagtcatccctgagcagaatgggaatctcactggcatggccttccatgtccctatcaccaatgtgtcagtcatggatctgacttgctgtctggagaaagctttcaaatatgattacatcaagaaggtgaagcaggcatcagagggccccctcaagagcatcctgggctacacttagcaccaggttgtcttcttcaactttaacaatgacacccactcttccatcttccatgctggggccagcatcgcctttgaaaaccactataccaagctcatttcctggtatgaccatgattttggctatagcaacagggtggtgaaactcatggcctacatgacctccaaggaa

SEQ ID NO: 5579 - DNA, 2091 bp, Homo sapiens
gagagccgctgctggggtgatggagggagtgtgctctgaggggcaagggctgctccgaagccctgctaatgtctctgtgtggccatgctgtattttcagcttgtcatcatggctgggacagtgctgcttgcctactacttcgaatgcactgacacttttcaggtgcatatccaaggattcttctgtcaggacggagacttaatgaagccttacccagggacagaggaagaaagcttcatcacccctctggtgctctattgtgtgctggctgccaccccaactgctattatttttattggtgagatatccatgtatttcataaaatcaacaagagaatccctgattgctcaggagaaaacaattctgaccggagaatgctgttacctgaaccccttacttcgaaggatcataagattcacaggggtgtttgcatttggactttttgctactgacatttttgtaaacgccggacaagtggtcactgggcacttaacgccatacttcctgactgtgtgcaagccaaactacaccagtgcagactgcyaagcgcaccaccagtttataaacaatgggaacatttgtactggggacctggaagtgatagaaaaggctcggagatcctttccctccaaacacgctgctctgagcatttactccgccttatatgccacgatgtatattacaagcacaatcaagacgaagagcagtcgactggccaagccggtgctgtgcctcggaactctctgcacagccttcctgacaggcctcaaccgggtctctgagtatcggaaccactgctcggacgtgattgctggtttcatcctgggcactgcagtggccctgtttctgggaatgtgtgtggttcataactttaaaggaacgcaaggatctccttccaaacccaagccygaggatccccgtggagtacccytaatggctttcccaaggatagaaagccctctggaaaccttaagtgcacagaatcactctgcgtccatgaccgaagttacctgagacgactgatgtgtcacaagctgttttttaaaatcatcttccaattctatacttcaaaacacacagttgctcaatgtcaaactgtgatgacaaatattacgtttatctagttagaagctaatgttttgtacattttttgtatgaggaagtgatgtagcttgccctgattttttttttttttttttggtcagctttaatatatttatgccagaattttaaaaccaacaaaattttcttgttcaagcgtgcattgaagaaccacatttattcaatggttgacgttgttttgtgatatttgtacacaaattttcttttctcagttttataaacacagdatataacaattcactttaaacttttattaccacagttgctgcctcctccagaatttttgaattttaataaaaggcaaacttttgagctgcaggaaggacaatgttggttaataataaatctcaaagtcaattgtagaaaaaaaattgtcttcaaaaagaatgttgcactctgatctcttaacaaattgttacgttcaaagtttaaagtgatatattaacaaagtcacctagttatacaaacaattgtcagagaattctggatttggagggtattggggttatatgattctttcttagataatggcctctactaaataactcaagatctttctggaatgtcttctggcaggcaggtgccactgtcagcttttctccaaaaagcagccaacatcagcctcccctgtcaactcaacagttttgtatctcatattatatggactttatatgaaaatgaatattttacagtttgcacagtattattttacagaaaaggaatcagagaatctacaacatagggccccagaacaacagtttcactttgtggcttttaattattctrgaattttaactgcatctcatttttctagcatggtgagaactaatatgtaactcctttgattgaaggagctcttttgtccgtacctatcagaatgttttcttgacacttccatgttggctcttctcagctttttttgtacatattttttttttctaaagagaagaaaaagttatcacaaaatgt

SEQ ID NO: 5580 - DNA, 2322 bp, Homo sapiens
caattctctaggttgcaaattgggaggattaggaacaagtaagagagwtccatgcaggatggacaagaaaaaaaagttttataccaaaaattgtatttcatggcattagggcagtctactggggtaaggcactatgcagtactaggcaattagaattctattcactagctatgtgcacaagcggctcctgacctggtcattttggctgtaaaactattcatgcctggacagtttttgacggtgcagtcttgctatatggtgtgagaaatggctgtaggaaacaacactcaacgaagttattccatcatcccgtgttttatatttgttgagcttgtcatcatggctgggacagtgctgcttgcctactacttcgaatgcactgacacttttcaggtgcatatccaaggattcttctgtcaggacggagacttaatgaagccttacccagggacagaggaagaaagcttcatcacccctctggtgctctattgtgtgctggctgccaccccaactgctattatttttattggtgagatatccatgtatttcataaaatcaacaagagaatccctgattgctcaggagaaaacaattctgaccggagaatgctgttacctgaaccccttacttcgaaggatcataagattcacaggggtgtttgcatttggactttttgctactgacatttttgtaaacgccggacaagtggtcactgggcacttaacgccatacttcctgactgtgtgcaagccaaactacaccagtgcagactgcyaagcgcaccaccagtttataaacaatgggaacatttgtactggggacctggaagtgatagaaaaggctcggagatcctttccctccaaacacgctgctctgagcatttactccgccttatatgccacgatgtatattacaagcacaatcaagacgaagagcagtcgactggccaagccggtgctgtgcctcggaactctctgcacagccttcctgacaggcctcaaccgggtctctgagtatcggaaccactgctcggacgtgattgctggtttcatcctgggcactgcagtggccctgtttctgggaatgtgtgtggttcataactttaaaggaacgcaaggatctccttccaaacccaagccygaggatccccgtggagtacccytaatggctttcccaaggatagaaagccctctggaaaccttaagtgcacagaatcactctgcgtccatgaccgaagttacctgagacgactgatgtgtcacaagctgttttttaaaatcatcttccaattctatacttcaaaacacacagttgctcaatgtcaaactgtgatgacaaatattacgtttatctagttagaagctaatgttttgtacattttttgtatgaggaagtgatgtagcttgccctgattttttttttttttttttggtcagctttaatatatttatgccagaattttaaaaccaacaaaattttcttgttcaagcgtgcattgaagaaccacatttattcaatggttgacgttgttttgtgatatttgtacacaaattttcttttctcagttttataaacacagdatataacaattcactttaaacttttattaccacagttgctgcctcctccagaatttttgaattttaataaaaggcaaacttttgagctgcaggaaggacaatgttggttaataataaatctcaaagtcaattgtagaaaaaaaattgtcttcaaaaagaatgttgcactctgatctcttaacaaattgttacgttcaaagtttaaagtgatatattaacaaagtcacctagttatacaaacaattgtcagagaattctggatttggagggtattggggttatatgattctttcttagataatggcctctactaaataactcaagatctttctggaatgtcttctggcaggcaggtgccactgtcagcttttctccaaaaagcagccaacatcagcctcccctgtcaactcaacagttttgtatctcatattatatggactttatatgaaaatgaatattttacagtttgcacagtattattttacagaaaaggaatcagagaatctacaacatagggccccagaacaacagtttcactttgtggcttttaattattctrgaattttaactgcatctcatttttctagcatggtgagaactaatatgtaactcctttgattgaaggagctcttttgtccgtacctatcagaatgttttcttgacacttccatgttggctcttctcagctttttttgtacatattttttttttctaaagagaagaaaaagttatcacaaaatgt

SEQ ID NO: 5581 - DNA, 2494 bp, Homo sapiens
ctccgccccctccgcgccagccttttgctctttcctttcattaaacaaacaggagatcctgaaacctggaccctgtgcaagctgcagcgccaggaggaggcagcggaggaagcagagcgcgggatgggcgcccagcggcatctgtgatcccgcgcacctccgccccacgggcgcgcgcacaaacacggacacacacatacacacactcgcgcacacactcgcacaaacacacactcgtacacgcccgcgccgctcgctcgccggcttgctctcccacgcaagcggaatgcagcagcgcctggagagcgtgtctcggaccgccgcctgaatgtacctcgctcccgggagccggacggcccagtagggcgcactggaggacgctccgctgcgggagcctggacagtttttgacggtgcagtcttgctatatggtgtgagaaatggctgtaggaaacaacactcaacgaagttattccatcatcccgtgttttatatttgttgagcttgtcatcatggctgggacagtgctgcttgcctactacttcgaatgcactgacacttttcaggtgcatatccaaggattcttctgtcaggacggagacttaatgaagccttacccagggacagaggaagaaagcttcatcacccctctggtgctctattgtgtgctggctgccaccccaactgctattatttttattggtgagatatccatgtatttcataaaatcaacaagagaatccctgattgctcaggagaaaacaattctgaccggagaatgctgttacctgaaccccttacttcgaaggatcataagattcacaggggtgtttgcatttggactttttgctactgacatttttgtaaacgccggacaagtggtcactgggcacttaacgccatacttcctgactgtgtgcaagccaaactacaccagtgcagactgcyaagcgcaccaccagtttataaacaatgggaacatttgtactggggacctggaagtgatagaaaaggctcggagatcctttccctccaaacacgctgctctgagcatttactccgccttatatgccacgatgtatattacaagcacaatcaagacgaagagcagtcgactggccaagccggtgctgtgcctcggaactctctgcacagccttcctgacaggcctcaaccgggtctctgagtatcggaaccactgctcggacgtgattgctggtttcatcctgggcactgcagtggccctgtttctgggaatgtgtgtggttcataactttaaaggaacgcaaggatctccttccaaacccaagccygaggatccccgtggagtacccytaatggctttcccaaggatagaaagccctctggaaaccttaagtgcacagaatcactctgcgtccatgaccgaagttacctgagacgactgatgtgtcacaagctgttttttaaaatcatcttccaattctatacttcaaaacacacagttgctcaatgtcaaactgtgatgacaaatattacgtttatctagttagaagctaatgttttgtacattttttgtatgaggaagtgatgtagcttgccctgattttttttttttttttttggtcagctttaatatatttatgccagaattttaaaaccaacaaaattttcttgttcaagcgtgcattgaagaaccacatttattcaatggttgacgttgttttgtgatatttgtacacaaattttcttttctcagttttataaacacagdatataacaattcactttaaacttttattaccacagttgctgcctcctccagaatttttgaattttaataaaaggcaaacttttgagctgcaggaaggacaatgttggttaataataaatctcaaagtcaattgtagaaaaaaaattgtcttcaaaaagaatgttgcactctgatctcttaacaaattgttacgttcaaagtttaaagtgatatattaacaaagtcacctagttatacaaacaattgtcagagaattctggatttggagggtattggggttatatgattctttcttagataatggcctctactaaataactcaagatctttctggaatgtcttctggcaggcaggtgccactgtcagcttttctccaaaaagcagccaacatcagcctcccctgtcaactcaacagttttgtatctcatattatatggactttatatgaaaatgaatattttacagtttgcacagtattattttacagaaaaggaatcagagaatctacaacatagggccccagaacaacagtttcactttgtggcttttaattattctrgaattttaactgcatctcatttttctagcatggtgagaactaatatgtaactcctttgattgaaggagctcttttgtccgtacctatcagaatgttttcttgacacttccatgttggctcttctcagctttttttgtacatattttttttttctaaagagaagaaaaagttatcacaaaatgt

SEQ ID NO: 5582 - DNA, 2325 bp, Homo sapiens
aattctctaggttgcaaattgggaggattaggaacaagtaagagagwtccatgcaggatggacaagaaaaaaaagttttataccaaaaattgtatttcatggcattagggcagtctactggggtaaggcactatgcagtactaggcaattagaattctattcactagctatgtgcacaagcggctcctgacctggtcattttggctgtaaaactattcatggcaacctggacagtttttgacggtgcagtcttgctatatggtgtgagaaatggctgtaggaaacaacactcaacgaagttattccatcatcccgtgttttatatttgttgagcttgtcatcatggctgggacagtgctgcttgcctactacttcgaatgcactgacacttttcaggtgcatatccaaggattcttctgtcaggacggagacttaatgaagccttacccagggacagaggaagaaagcttcatcacccctctggtgctctattgtgtgctggctgccaccccaactgctattatttttattggtgagatatccatgtatttcataaaatcaacaagagaatccctgattgctcaggagaaaacaattctgaccggagaatgctgttacctgaaccccttacttcgaaggatcataagattcacaggggtgtttgcatttggactttttgctactgacatttttgtaaacgccggacaagtggtcactgggcacttaacgccatacttcctgactgtgtgcaagccaaactacaccagtgcagactgcyaagcgcaccaccagtttataaacaatgggaacatttgtactggggacctggaagtgatagaaaaggctcggagatcctttccctccaaacacgctgctctgagcatttactccgccttatatgccacgatgtatattacaagcacaatcaagacgaagagcagtcgactggccaagccggtgctgtgcctcggaactctctgcacagccttcctgacaggcctcaaccgggtctctgagtatcggaaccactgctcggacgtgattgctggtttcatcctgggcactgcagtggccctgtttctgggaatgtgtgtggttcataactttaaaggaacgcaaggatctccttccaaacccaagccygaggatccccgtggagtacccytaatggctttcccaaggatagaaagccctctggaaaccttaagtgcacagaatcactctgcgtccatgaccgaagttacctgagacgactgatgtgtcacaagctgttttttaaaatcatcttccaattctatacttcaaaacacacagttgctcaatgtcaaactgtgatgacaaatattacgtttatctagttagaagctaatgttttgtacattttttgtatgaggaagtgatgtagcttgccctgattttttttttttttttttggtcagctttaatatatttatgccagaattttaaaaccaacaaaattttcttgttcaagcgtgcattgaagaaccacatttattcaatggttgacgttgttttgtgatatttgtacacaaattttcttttctcagttttataaacacagdatataacaattcactttaaacttttattaccacagttgctgcctcctccagaatttttgaattttaataaaaggcaaacttttgagctgcaggaaggacaatgttggttaataataaatctcaaagtcaattgtagaaaaaaaattgtcttcaaaaagaatgttgcactctgatctcttaacaaattgttacgttcaaagtttaaagtgatatattaacaaagtcacctagttatacaaacaattgtcagagaattctggatttggagggtattggggttatatgattctttcttagataatggcctctactaaataactcaagatctttctggaatgtcttctggcaggcaggtgccactgtcagcttttctccaaaaagcagccaacatcagcctcccctgtcaactcaacagttttgtatctcatattatatggactttatatgaaaatgaatattttacagtttgcacagtattattttacagaaaaggaatcagagaatctacaacatagggccccagaacaacagtttcactttgtggcttttaattattctrgaattttaactgcatctcatttttctagcatggtgagaactaatatgtaactcctttgattgaaggagctcttttgtccgtacctatcagaatgttttcttgacacttccatgttggctcttctcagctttttttgtacatattttttttttctaaagagaagaaaaagttatcacaaaatgt

SEQ ID NO: 5583 - DNA, 644 bp, Homo sapiens
gccatggagtacacagggagcaaatatatcggggaatatgtagatgggaggatggagggcaaagccaagtacatcctccctaccgaaacaatatatgttggggaaatgaaggatggcatgtttcacggcgagggaaccctgtacttccccagcggaagccaatacgacgccatttgggaaaacggattggccataaagggcacatatacgttctcagatgggctgcactatgatgagaaaaactggcattactgcgacggctatgatcggaggttttacacagagatcctcaatggcttgaagcctgcaggtatggctcaactcaccaatatggacccacctagaaaaatccccaagggctattacgattgtggagacggcttctataacccagtcacgagggtagtcaaggactataggaaccgctttctaagaaacgcagatgatgacgagcatgagtggatcacccgtacctgtcgaaagggctaggatgagatcgtgggtcacaggcccgagccgtgaactctgtggctgcctccaccagaggtttccatctrccctactagcattggctgccctgggggacgggctgtagttctagaacctgattttaactcaggaataaagactttctgcggtcagtg

SEQ ID NO: 5584 - DNA, 628 bp, Homo sapiens
tgtgagaggtctgaacagtgatgtccagttcaaggatggagggcaaagccaagtacatcctccctaccgaaacaatatatgttggggaaatgaaggatggcatgtttcacggcgagggaaccctgtacttccccagcggaagccaatacgacgccatttgggaaaacggattggccataaagggcacatatacgttctcagatgggctgcactatgatgagaaaaactggcattactgcgacggctatgatcggaggttttacacagagatcctcaatggcttgaagcctgcaggtatggctcaactcaccaatatggacccacctagaaaaatccccaagggctattacgattgtggagacggcttctataacccagtcacgagggtagtcaaggactataggaaccgctttctaagaaacgcagatgatgacgagcatgagtggatcacccgtacctgtcgaaagggctaggatgagatcgtgggtcacaggcccgagccgtgaactctgtggctgcctccaccagaggtttccatctrccctactagcattggctgccctgggggacgggctgtagttctagaacctgattttaactcaggaataaagactttctgcggtcagtg

SEQ ID NO: 5585 - DNA, 2389 bp, Homo sapiens
gtgggaactgtagttccatgtgcgtgcgatgcactctatgggcccagctgtgctgctgtgttaacctggaggcatatcatttcaggaggccctgagtacctgcggtggggtgaggccagagtgagctccagctcagatgatcagggagaaggctgcaccagtctcattggattcttcacaccagctggtgctgaaggttcaggggttgaagttgaaagaagccygtggggtcctycataaaggactcaaggtgctggccttccaacagcctggctctgtggctgtggggctgagtggcatcatggcggctcagaaagatctctgggacgccattgtgattggggcgggkatccagggctgcttcactgcataccacctggccaaacacaggaagaggatcctcctgctggagcagttctttctaccacactcccgaggaagctcccatggacaaagccggataatccgaaaggcgtacctggaagacttttacacccggatgatgcatgagtgctatcagatatgggcccagctggagcacgaggctggaacccaattgcacaggcagactggattactgctgctgggaatgaaagagaatcaagaattaaagacaatccaggccaatctgtcgaggcagagggtagaacaccagtgtctttcatctgaggaactgaagcaacgtttcccaaatattcggttgcccaggggagaagtggggctcttggacaattccggaggagttatctatgcatataaggccctcagagccctgcaggatgcaattcgacagctaggaggcatagtgcgtgacggagagaaggtggtggagataaacccagggctactggtcacggtgaaaaccacctccaggagctaccaagctaagagcttggtcatcacagcaggtccttggaccaaccagctcctccgtcccctgggcattgagatgcctctccagaccctgcggatcaacgtgtgttactggcgagagatggttcctgggagctatggtgtgtcccaggcctttccgtgcttcctgtggctgggcttgtgtccccaccacatctacggactgcccacaggagagtacccagggctgatgaaggtcagctatcaccacggcaaccacgcagaccctgaggagcgggactgccccacagcacgcacagacatcggagacgtccagatcctgagcagctttgtcagagatcacttacctgatctgaagcccgagcctgctgtcattgagagctgcatgtacacgaatacccctgatgagcagttcattctcgatcgccacccaaagtatgacaacattgtcattggtgctggattctctgggcacgggttcaagctggcccctgtggtggggaagatcctgtatgaattaagcatgaaattaacaccatcttatgacttggcaccttttcgaatcagccgtttcccaagcctgggcaaagcccacctttgacctctggccagaagcctcccttctgtgcacaggagccagtttcacagatggagaagatgtctcagatgaagggagtgtccctgagatatcatccttttcttctgcctcgcctgaatcccccataaacaccagatgattgagtctaccttctttccttggcccgctccctttttcttctgcctcacttgaatcccccgtaaacaccagacgattgagtctaccttcttttcttggccacctccccattcacaactactttctcgctcccagaaggttgatcagatattctacaatcacagagtagcaaggacgtttgagatgggtatatcagtaagaagagggcacaagaactggctctggagaccaaagcagttgttaaaaattctctttgctgggggccgggtgtggtggctcacacctgtaatctcggcactttggggggctgagacaggcggatcacctgaggccaggaattcaagaccagcctggccaacatggtgaaaccctatctccactaaaaatacaaaattagctgggtgtggtggcgcatgcctgtaatcccagctacttgggagactgaggcaagagaatcacttgaacccgggaggtggaggtggcagtgagccgagattgcgccattgcactccagcctgggcaaaaagagtgagactctgtctcaaaaaaaaaacaaaacaaaaaaaacctctttgctggtatatttgaagagcttgggatggatttgactaaatctgccccgaggagggtgaacaaggtgatctcagagatcactactgctcttggagttccttctcctaaagctaaggccagcctccatcacaaatgcccataaaatctggctcgtctttgatgaacaataaatatttgttgaacaaataaataactgccctgcattaa

SEQ ID NO: 5586 - DNA, 2415 bp, Homo sapiens
tgagacaggaaggtggcaaaggaaggagcccatttgcatgacaataattgagccaagaatagaaagccacagggatgcaagggtgaggctggcggctgagctgggctaaacctcacaaatcagactacccagctctgctccgcaggggaagggagactgagccctgggccaggcttggcagagagggaagcgggaggacacgaccccagggcattgtgggaacactggccaggctggactttgccttcctcctcgtcctttagccgggagcctgtctttgcttgcctttgcctttgaggctctgtggctgtggggctgagtggcatcatggcggctcagaaagatctctgggacgccattgtgattggggcgggkatccagggctgcttcactgcataccacctggccaaacacaggaagaggatcctcctgctggagcagttctttctaccacactcccgaggaagctcccatggacaaagccggataatccgaaaggcgtacctggaagacttttacacccggatgatgcatgagtgctatcagatatgggcccagctggagcacgaggctggaacccaattgcacaggcagactggattactgctgctgggaatgaaagagaatcaagaattaaagacaatccaggccaatctgtcgaggcagagggtagaacaccagtgtctttcatctgaggaactgaagcaacgtttcccaaatattcggttgcccaggggagaagtggggctcttggacaattccggaggagttatctatgcatataaggccctcagagccctgcaggatgcaattcgacagctaggaggcatagtgcgtgacggagagaaggtggtggagataaacccagggctactggtcacggtgaaaaccacctccaggagctaccaagctaagagcttggtcatcacagcaggtccttggaccaaccagctcctccgtcccctgggcattgagatgcctctccagaccctgcggatcaacgtgtgttactggcgagagatggttcctgggagctatggtgtgtcccaggcctttccgtgcttcctgtggctgggcttgtgtccccaccacatctacggactgcccacaggagagtacccagggctgatgaaggtcagctatcaccacggcaaccacgcagaccctgaggagcgggactgccccacagcacgcacagacatcggagacgtccagatcctgagcagctttgtcagagatcacttacctgatctgaagcccgagcctgctgtcattgagagctgcatgtacacgaatacccctgatgagcagttcattctcgatcgccacccaaagtatgacaacattgtcattggtgctggattctctgggcacgggttcaagctggcccctgtggtggggaagatcctgtatgaattaagcatgaaattaacaccatcttatgacttggcaccttttcgaatcagccgtttcccaagcctgggcaaagcccacctttgacctctggccagaagcctcccttctgtgcacaggagccagtttcacagatggagaagatgtctcagatgaagggagtgtccctgagatatcatccttttcttctgcctcgcctgaatcccccataaacaccagatgattgagtctaccttctttccttggcccgctccctttttcttctgcctcacttgaatcccccgtaaacaccagacgattgagtctaccttcttttcttggccacctccccattcacaactactttctcgctcccagaaggttgatcagatattctacaatcacagagtagcaaggacgtttgagatgggtatatcagtaagaagagggcacaagaactggctctggagaccaaagcagttgttaaaaattctctttgctgggggccgggtgtggtggctcacacctgtaatctcggcactttggggggctgagacaggcggatcacctgaggccaggaattcaagaccagcctggccaacatggtgaaaccctatctccactaaaaatacaaaattagctgggtgtggtggcgcatgcctgtaatcccagctacttgggagactgaggcaagagaatcacttgaacccgggaggtggaggtggcagtgagccgagattgcgccattgcactccagcctgggcaaaaagagtgagactctgtctcaaaaaaaaaacaaaacaaaaaaaacctctttgctggtatatttgaagagcttgggatggatttgactaaatctgccccgaggagggtgaacaaggtgatctcagagatcactactgctcttggagttccttctcctaaagctaaggccagcctccatcacaaatgcccataaaatctggctcgtctttgatgaacaataaatatttgttgaacaaataaataactgccctgcattaa

SEQ ID NO: 5587 - DNA, 2116 bp, Homo sapiens
cgccgccgccttttcacgcacgtcgcgagctaacggactcggcggcggcggcggcggcggcctgcgccccacccgcaccccatctggaccgcatcgctgaatgtgcccggacctgcgccttctgggtctctgaaagaagatgaatttggctgagatttgtgataatgcaaagaaaggaagagaatatgcccttcttggaaattacgactcatcaatggtatattaccagggggtgatgcagcagattcagagacattgccagtcagtcagagatccagctatcaaaggcaaatggcaacaggttcggcaggaattattggaggaatatgaacaagttaaaagtattgtcagcactttagaaagttttaaaattgacaagcctccagatttccctgtgtcctgtcaagatgaaccatttagagatcctgctgtttggccaccccctgttcctgcagaacacagagctccacctcagatcaggcgtcccaatcgagaagtaagacctctgaggaaagaaatggcaggagtaggagcccggggacctgtaggccgagcacatcctatatcaaagagtgaaaagccttctacaagtagggacaaggactatagagcaagagggagagatgacaagggaaggaagaatatgcaagatggtgcaagtgatggtgaaatgccaaaatttgatggtgctggttatgataaggatctggtggaagcccttgaaagagacattgtatccaggaatcctagcattcattgggatgacatagcagatctggaagaagctaagaagttgctaagggaagctgttgttcttccaatgtggatgcctgactttttcaaagggattagaaggccatggaagggtgtactgatggttggacccccaggcactggtaaaactatgctagctaaagctgttgccactgaatgtggtacaacattcttcaacgtttcgtcttctacactgacatctaaatacagaggtgaatctgagaagttagttcgtctgttgtttgagatggctagattttatkcccctaccacgatcttcattgatgagatagattctatctgcagtcgaagaggaacctctgatgaacatgaggcaagtcgcagggtcaagtctgaactgctcattcagatggatggagttggaggagctttagaaaatgatgatccttccaaaatggttatggtattggctgctactaatttcccgtgggacattgatgaagctttgcgaagaaggttagaaaaaaggatatatatacctctcccaacagcaaaaggaagagcygagcttctgaagatcaaccttcgtgaggtcgaattagatcctgatattcaactggaagatatagccgagaagattgagggctattctggtgctgacatcactaatgtttgcagggatgcctctttaatggcaatgagacggcgtatcaatggcttaagtccagaagaaatccgtgcactttctaaagaggaacttcagatgcctgttaccaaaggagactttgaattggccctaaagaaaattgctaagtctgtctctgctgcagacttggagaagtatgaaaaatggatggttgaatttggatctgcttgaatttctgtcagctctttaatttctggtatttttgttgataaaatacgaagaaattcctgcaatttttaaaaaacaagtttggaatttttttcagtggagtggttttcgcttaaaggaaaaaaaaatctaaaactgcgaagaatactaaatgtagttgagaaataattgatggcgagagtttgctagtctccctccccggctttgtgctggtattccacgtattcctgcattaatattgcacacccaaaccagtctatcagggaggctgaagcaagggcgcagtgtgatattttaggaatacagaagatttagaaatacccctatttctcatttgcagtttttttttccaattctgtgctctgtcaacatgagggacctatctatgtatgttgacttttaacatcaaaattggatttgtgtcaaacattcattgttaagagaagaatgacagtatattttggaggaaataatgaatttactaattaaacctttagaatttatgac

SEQ ID NO: 5588 - DNA, 1240 bp, Homo sapiens
acgcggtctgtgggagaccggagcgggagacagcggtgacaggagcagcggccgggagcccttagggaggcagacagagcctgcagccaatgccccaggagccctcggttccaaccaactgatgcccctgtgcccactggcccacgccatgcagccccagtccgttctgcacagcggctacttscacccactacttcgggcctggcagacagccaccacyaccctcaatgcctccaacctcatctaccccatctttgtcacggatgttcctgatgacatacagcctatcaccagcctcccaggagtggccaggtayggtgtgaascggctggaagagatgctgaggcccttggtggaagagggcctacgctgtgtcttgatctttggcgtccccagcagagttcccaaggacgagcggggttccgcagctgactccgaggagtccccagctattgaggcaatccatctgttgaggaagaccttccccaacctcctggtggcctgtgaygtctgcctgtgtccctacacctcccatggtcactgcrggctcctgagtgaaaayggagcattccgggctgaggagagccgccagcggctggctgaggtggcaytggcgtatgccaaggcaggatgtcaggtggtagccccgtcggacatgatggatggacgcgtggaagccatcaaagaggccctgatggcacatggacttggcaacagggtatcggtgatgagctacagtgccaaatttgcttcctgtttctatggccctttccgggatgcagctaagtcaagcccagcttttggggaccgccgctgctaccagctgccccctggagcacgaggcctggctctccgagctgtggacygggatgtacgggaaggagctgacatgctcatggtgaagccgggaatgccctacctggacatcgtgcgggaggtaaaggacaagcaccctgacctccctctcrccgtgtaccacgtctctggagagtttgccatgytgtggcatggagcccaggccggggcatttgatctcaaggctgccgtactggaggccaygactgccttccgcagagcaggtgctgacatcatcatcacctactacacaccgcagctgctgcagtggctgaaggaggaatgatggagacagtgccaggcccaagaactagaactttmaaacgttcccggggcctcagacaactcacatgctagcggggcccagcagccctgggtggttttg

SEQ ID NO: 5589 - DNA, 3129 bp, Homo sapiens
acgcggtctgtgggagaccggagcgggagacagcggtgacaggagcagcggccgggagcccttagggaggcagacagagcctgcagccaatgccccaggagccctcggttccaaccaactgatgcccctgtgcccactggcccacgccatgcagccccagtccgttctgcacagcggctacttscacccactacttcgggcctggcagacagccaccacyaccctcaatgcctccaacctcatctaccccatctttgtcacggatgttcctgatgacatacagcctatcaccagcctcccaggagtggccaggtayggtgtgaascggctggaagagatgctgaggcccttggtggaagagggcctacgctgtgtcttgatctttggcgtccccagcagagttcccaaggacgagcggggttccgcagctgactccgaggagtccccagctattgaggcaatccatctgttgaggaagaccttccccaacctcctggtggcctgtgaygtctgcctgtgtccctacacctcccatggtcactgcrggctcctgagtgaaaayggagcattccgggctgaggagagccgccagcggctggctgaggtggcaytggcgtatgccaaggcaggatgtcaggtggtagccccgtcggacatgatggatggacgcgtggaagccatcaaagaggccctgatggcacatggacttggcaacagggtatcggtgatgagctacagtgccaaatttgcttcctgtttctatggccctttccgggatgcagctaagtcaagcccagcttttggggaccgccgctgctaccagctgccccctggagcacgaggcctggctctccgagctgtggacygggatgtacgggaaggagctgacatgctcatggtgaagccgggaatgccctacctggacatcgtgcgggaggtaaaggacaagcaccctgacctccctctcrccgtgtaccacgtctctggagagtttgccatgytgtggcatggagcccaggccggggcatttgatctcaaggctgccgtactggaggccaygactgccttccgcagagcaggtgctgacatcatcatcacctactacacaccgcagctgctgcagtggctgaaggaggaatgatggagacagtgccaggcccaagaactagaactttmaaacgttcccggggcctcagacaagtgamaaccaaagtaaatgctgcttttagaactgtgccctcatgccctcttcctgctcacatgctagcggggcccagcagccctgggtggttttgccagcatgctaactcttgtaactcrcagctgcatcctatgagctctcccaagcttccccgcccctcccctgggtcagccgtgaggcccacctttgccaccctcagctctttcctctggtgtggcttcagcttgaaagcaacctggagtcgggggcacagcctttggggcctggctgggagagggtcttggagcattaggggaagaagagagcagtgggatcttggggcctgagaagccttggaacgcttctggcagcagagctgggtgtgggaatgaggcctagatcgatatccctgggttagagttgaaatttgcygcaattccactggaaggcatttcccacgaggccagaggttgccaggctgcctgaggtctcctattctactctgaaccataaacccagagaagaattactcattaaccagcataaatactgcctgaggatcaaaactcagagrcaaagagggagttcctgactgctagaggtgccaccaccacaaacactttttattcaggagatactttttgagaatctctgctctgttcctaggttcagtgctgggtcctgggaatacagcaggacagacctcagcttatctcttcatagaaattatacaaagagaattggggagacagctaagaagaaaacaaagaaataaagcagttacaaattgtgataagtgctttgaaggaaagaaggggtctgagacaacaacagggaaggggcctctcttgaaacagtagttgggaaggaggcagacatgcaccagtgatgtggtgacaggtgctctgaaggaggtcaccaggacctgacctctttgaaggatcagaaaatacttccctgaaggactgacatttgagcctagacctgaagggtgagccatcaagctaagacaattggggaagagcattccagggagagggaggagttgtgcaaaggccctggggctccttctagctggaggaatgcaaggctagcttgtctggagcactgagaggatggcctgaactgagtggagagagacagaccaggaccaaaccatgcagaggtcaagggccacattcaccttttcagagtgactcaatcaaatttgtagtttgtaaaagtattttaacagctctgcggcaaagtgcaaatgaaaagtcttgatggcatggactggagcrgggacagtggggatggagaaaggggaatggattgtggatgtgtttagaaggtagattcgatgtgaaggatgaatctggcttgaccttctgggtggctgatgggccatttactgagatggggcagcctggaagaggaacagaagcagggtckgggtggagggagaatactaaacttagcttgagacattttgcaataaggaagctatatctagagtgcttatgtgactcacctaaggccactcaacaagtttgtggcagaactggattagaactgcacagaaaacagccaagctgggatttgaacccatgtagtccaactccaaggcctctgcccctaaccactgtgccataccacctcccaataatcaacagcaaaattataggtctaacaatgttttatagacacccctccatttatgtgatgggtttgcatcctgataaacccatcataagttgaaaatatgatcataagttgaaaatatgatcataagtcaaaaatgtatttaatatacctaacctaccaaacatcatagcttagcctagcctgccttaaacatgctcagaacacttacattagcctacagtgggcaaaactatccaacacaaaatctatattgtaataaagttrtaaagaattttgaataaaaattcaatatttgaagtaca

SEQ ID NO: 5590 - DNA, 3056 bp, Homo sapiens
acagagcctgcagccaatgccccaggagccctcggttccaaccaactgatgcccctgtgcccactggcccacgccatgcagccccagtccgttctgcacagcggctacttscacccactacttcgggcctggcagacagccaccacyaccctcaatgcctccaacctcatctaccccatctttgtcacggatgttcctgatgacatacagcctatcaccagcctcccaggagtggccaggtayggtgtgaascggctggaagagatgctgaggcccttggtggaagagggcctacgctgtgtcttgatctttggcgtccccagcagagttcccaaggacgagcggggttccgcagctgactccgaggagtccccagctattgaggcaatccatctgttgaggaagaccttccccaacctcctggtggcctgtgaygtctgcctgtgtccctacacctcccatggtcactgcrggctcctgagtgaaaayggagcattccgggctgaggagagccgccagcggctggctgaggtggcaytggcgtatgccaaggcaggatgtcaggtggtagccccgtcggacatgatggatggacgcgtggaagccatcaaagaggccctgatggcacatggacttggcaacagggtatcggtgatgagctacagtgccaaatttgcttcctgtttctatggccctttccgggatgcagctaagtcaagcccagcttttggggaccgccgctgctaccagctgccccctggagcacgaggcctggctctccgagctgtggacygggatgtacgggaaggagctgacatgctcatggtgaagccgggaatgccctacctggacatcgtgcgggaggtaaaggacaagcaccctgacctccctctcrccgtgtaccacgtctctggagagtttgccatgytgtggcatggagcccaggccggggcatttgatctcaaggctgccgtactggaggccaygactgccttccgcagagcaggtgctgacatcatcatcacctactacacaccgcagctgctgcagtggctgaaggaggaatgatggagacagtgccaggcccaagaactagaactttmaaacgttcccggggcctcagacaagtgamaaccaaagtaaatgctgcttttagaactgtgccctcatgccctcttcctgctcacatgctagcggggcccagcagccctgggtggttttgccagcatgctaactcttgtaactcrcagctgcatcctatgagctctcccaagcttccccgcccctcccctgggtcagccgtgaggcccacctttgccaccctcagctctttcctctggtgtggcttcagcttgaaagcaacctggagtcgggggcacagcctttggggcctggctgggagagggtcttggagcattaggggaagaagagagcagtgggatcttggggcctgagaagccttggaacgcttctggcagcagagctgggtgtgggaatgaggcctagatcgatatccctgggttagagttgaaatttgcygcaattccactggaaggcatttcccacgaggccagaggttgccaggctgcctgaggtctcctattctactctgaaccataaacccagagaagaattactcattaaccagcataaatactgcctgaggatcaaaactcagagrcaaagagggagttcctgactgctagaggtgccaccaccacaaacactttttattcaggagatactttttgagaatctctgctctgttcctaggttcagtgctgggtcctgggaatacagcaggacagacctcagcttatctcttcatagaaattatacaaagagaattggggagacagctaagaagaaaacaaagaaataaagcagttacaaattgtgataagtgctttgaaggaaagaaggggtctgagacaacaacagggaaggggcctctcttgaaacagtagttgggaaggaggcagacatgcaccagtgatgtggtgacaggtgctctgaaggaggtcaccaggacctgacctctttgaaggatcagaaaatacttccctgaaggactgacatttgagcctagacctgaagggtgagccatcaagctaagacaattggggaagagcattccagggagagggaggagttgtgcaaaggccctggggctccttctagctggaggaatgcaaggctagcttgtctggagcactgagaggatggcctgaactgagtggagagagacagaccaggaccaaaccatgcagaggtcaagggccacattcaccttttcagagtgactcaatcaaatttgtagtttgtaaaagtattttaacagctctgcggcaaagtgcaaatgaaaagtcttgatggcatggactggagcrgggacagtggggatggagaaaggggaatggattgtggatgtgtttagaaggtagattcgatgtgaaggatgaatctggcttgaccttctgggtggctgatgggccatttactgagatggggcagcctggaagaggaacagaagcagggtckgggtggagggagaatactaaacttagcttgagacattttgcaataaggaagctatatctagagtgcttatgtgactcacctaaggccactcaacaagtttgtggcagaactggattagaactgcacagaaaacagccaagctgggatttgaacccatgtagtccaactccaaggcctctgcccctaaccactgtgccataccacctcccaataatcaacagcaaaattataggtctaacaatgttttatagacacccctccatttatgtgatgggtttgcatcctgataaacccatcataagttgaaaatatgatcataagttgaaaatatgatcataagtcaaaaatgtatttaatatacctaacctaccaaacatcatagcttagcctagcctgccttaaacatgctcagaacacttacattagcctacagtgggcaaaactatccaacacaaaatctatattgtaataaagttrtaaagaattttgaataaaaattcaatatttgaagtaca

SEQ ID NO: 5591 - DNA, 3394 bp, Homo sapiens
cccgcaggctcggtgaatcgaacgttgagcagggcggtgggtggtgcggagtgccgagcggcctcacccccaaccgtcggcccagtcggacggttccgaggcgttgccgggagccgggcgcggctctgtgtggactcggagaaacgcggggcgtctgcctgagcccgcttttckacaagatgtggggatttttgaagcgccctgtagtggtgacggctgacatcaacttgagccttgtggccctgactgggatggggttactgagccggctgtggcgactcacctacccgcgggctgtggtttttgacgaagtatattatgggcagtacatctctttttacatgaaacaaatcttcttcttggatgacagtgggccgccatttggccacatggtgctggccttgrgaggttatttaggaggattcgatggcaattttttgtggaacagaattggagcagaatacagtagcaacgtgcctgtgtggtccctgcgcctgctgccagcactcgcgggggccttgtcggtccccatggcctaccagatagtgttggagctccacttttctcattgtgccgccatgggagctgctctgttgatgcttatcgagaatgctctcatcactcagtcaaggctaatgcttttggaatcagtgttaatatttttcaatctattggccgtgttgtcctacctgaagttcttcaactgccaaaagcacagccctttttctctgagctggtggttctggctaacactgacaggggtcgcttgttcctgtgcagtgggcatcaagtacatgggtgtgttcacgtacgtgctcgtgctgggtgttgcagctgtccatgcctggcacctgcttggagaccagactttgtccaatgtaggtgctgatgtccagkgctgcatgaggccggcctgtrtggggcagatgyrgatgtcacagggggtctgtgtgttctgtcacttgctcgcccgagcagtggctttgctggtcatcccggtcgtcctgtacttactgttcttctacgtccacttgattctagtcttccgctctgggccccacgaccaaatcatgtccagtgccttcyaggccagcttagagggaggactagctcggatcacycagggtcagccactggaggtggcctttgggtcccagrtcactctgaggaacgtctttgggaaacctgtgccctgctggcttcattcccaccaggacacctaccccatgatatatgagaacggccgaggcagctcccaccagcaacaggtgacctgttaccccttcaaagaygtcaataactggtggattgtaaaggatcccaggaggcacyagctggtggtgagcagccctccgagacctgtgaggcayggggacatggtgcagctggtccacggcatgaccacccgctccctgaacacgcatgatgttgcagcccccctgagcccccattcacaggaggtctcctgctacattgamtataacatctccatgcccgcccagaacctctggagactggarattgtgaacagaggatctgacacagacgtctggaagaccatcctctcagaggtccgctttgtgcacgtgaacacttccgctgtcttaaagctgagcggggctcacctccctgactgggggtatcggcaactggagatcgtcggggagaagctgtcccggggctaccacgggagcacggtgtggaacgtggaggagcaccgatayggcgcgagccaggagcagagggagcgggaacgggagctgcactcacctgcgcaggtggacgtcagcaggaacctcagcttcatggcgagattctcggagctgcagtggaggatgctggcgctgagaagtgatgactcggaacacaagtacagctccagcccactggagtgggtcaccctggacaccaatattgcctactggctgcaccccagraccagcgctcagatccacctacttggaaacatagtgatctgggtttcgggcagcctcgctctggccatctacgccctgctgtccttgtggtacctgctccgacggcgaagaaatgtccatgacctccctcaggatgcctggctgcgctgggtgctggctggggygctgtgtgccggtggctgggcagtgaactacctcccgttcttcctgatggagaagacactcttcctctaccactacctgcccgcactcaccttccaaatccttctgctccctgtggtcctgcagcacatcagcgaccacctgtgcaggtcccagctccagaggagcatcttcagcgccctggtggtggcctggtactcctccgcgtgccacgtgtccaacacgctgcgcccactcacctacggggacaagtcactctcgccacatgaactcaaggcccttcgctggaaagacagctgggacatcttgatccgaaaacactagaacaagagtgtggcaaagaacacccgtgctggggtcgggaygaggttgaagggtcttggtcaatgtacgtaatgagcagggtgggccccacgctgggaggacacgggctgggctgagcagggcctctagtggaacacatgggggtctcattgaaaagctctctgatgagcacctccttttgtgcaaagttaattttttctcgacaataaagatattccgtgtcttyacccctgaactaagacacagggagtatttcagaggccagcgtaggagtcatcgacaacraaaagccgagaacccagggccagcagtggagcctcagcagaccagggcctggtccttgctaattgctgcagggtggagtttgatctggcagacccgatcctccttcatgaacacccagcaacctgagcaagtcccrgccctgccctcagcgagcccggcaggcgtccygggacagctcagtgttggagggccacctgaaccacgagccagggctggggcttgcatgtcattgtctatgacagcgtcaagactggcccttggcaccgtgctgtgtggaaaccctcccctctgagactccactgagacgtggctgagtgaaatyttcctcgtcagtggtcaaggtgtgtcatccatacagctccatgcctttgtcttttttaaatgtaattaaaaaaggaaccaactggcgtttgtagttggkgtttgttatttattgattctccctccaaaggggcctaagctcgacaaaaccgttacagttgtcagaacccagccacagggctcagcccccttcccccacgtcacgtctgcatcactactgtgggtgagcctggacggacgggggctggggctgcccrtggcagcggcaagggatgctttccagagacagccaccackcaggagggaggatcaccccaggcaacccagacacgggtgttcacatgtgaggctgtgagctccacata

SEQ ID NO: 5592 - DNA, 3245 bp, Homo sapiens
ggcgtctgcctgagcccgcttttckacaagatgtggggatttttgaagcgccctgtagtggtgacggctgacatcaacttgagccttgtggccctgactgggatggggttactgagccggctgtggcgactcacctacccgcgggctgtggtttttgacgaagtatattatgggcagtacatctctttttacatgaaacaaatcttcttcttggatgacagtgggccgccatttggccacatggtgctggccttgrgaggttatttaggaggattcgatggcaattttttgtggaacagaattggagcagaatacagtagcaacgtgcctgtgtggtccctgcgcctgctgccagcactcgcgggggccttgtcggtccccatggcctaccagatagtgttggagctccacttttctcattgtgccgccatgggagctgctctgttgatgcttatcgagaatgctctcatcactcagtcaaggctaatgcttttggaatcagtgttaatatttttcaatctattggccgtgttgtcctacctgaagttcttcaactgccaaaagcacagccctttttctctgagctggtggttctggctaacactgacaggggtcgcttgttcctgtgcagtgggcatcaagtacatgggtgtgttcacgtacgtgctcgtgctgggtgttgcagctgtccatgcctggcacctgcttggagaccagactttgtccaatgtaggtgctgatgtccagkgctgcatgaggccggcctgtrtggggcagatgyrgatgtcacagggggtctgtgtgttctgtcacttgctcgcccgagcagtggctttgctggtcatcccggtcgtcctgtacttactgttcttctacgtccacttgattctagtcttccgctctgggccccacgaccaaatcatgtccagtgccttcyaggccagcttagagggaggactagctcggatcacycagggtcagccactggaggtggcctttgggtcccagrtcactctgaggaacgtctttgggaaacctgtgccctgctggcttcattcccaccaggacacctaccccatgatatatgagaacggccgaggcagctcccaccagcaacaggtgacctgttaccccttcaaagaygtcaataactggtggattgtaaaggatcccaggaggcacyagctggtggtgagcagccctccgagacctgtgaggcayggggacatggtgcagctggtccacggcatgaccacccgctccctgaacacgcatgatgttgcagcccccctgagcccccattcacaggaggtctcctgctacattgamtataacatctccatgcccgcccagaacctctggagactggarattgtgaacagaggatctgacacagacgtctggaagaccatcctctcagaggtccgctttgtgcacgtgaacacttccgctgtcttaaagctgagcggggctcacctccctgactgggggtatcggcaactggagatcgtcggggagaagctgtcccggggctaccacgggagcacggtgtggaacgtggaggagcaccgatayggcgcgagccaggagcagagggagcgggaacgggagctgcactcacctgcgcaggtggacgtcagcaggaacctcagcttcatggcgagattctcggagctgcagtggaggatgctggcgctgagaagtgatgactcggaacacaagtacagctccagcccactggagtgggtcaccctggacaccaatattgcctactggctgcaccccagraccagcgctcagatccacctacttggaaacatagtgatctgggtttcgggcagcctcgctctggccatctacgccctgctgtccttgtggtacctgctccgacggcgaagaaatgtccatgacctccctcaggatgcctggctgcgctgggtgctggctggggygctgtgtgccggtggctgggcagtgaactacctcccgttcttcctgatggagaagacactcttcctctaccactacctgcccgcactcaccttccaaatccttctgctccctgtggtcctgcagcacatcagcgaccacctgtgcaggtcccagctccagaggagcatcttcagcgccctggtggtggcctggtactcctccgcgtgccacgtgtccaacacgctgcgcccactcacctacggggacaagtcactctcgccacatgaactcaaggcccttcgctggaaagacagctgggacatcttgatccgaaaacactagaacaagagtgtggcaaagaacacccgtgctggggtcgggaygaggttgaagggtcttggtcaatgtacgtaatgagcagggtgggccccacgctgggaggacacgggctgggctgagcagggcctctagtggaacacatgggggtctcattgaaaagctctctgatgagcacctccttttgtgcaaagttaattttttctcgacaataaagatattccgtgtcttyacccctgaactaagacacagggagtatttcagaggccagcgtaggagtcatcgacaacraaaagccgagaacccagggccagcagtggagcctcagcagaccagggcctggtccttgctaattgctgcagggtggagtttgatctggcagacccgatcctccttcatgaacacccagcaacctgagcaagtcccrgccctgccctcagcgagcccggcaggcgtccygggacagctcagtgttggagggccacctgaaccacgagccagggctggggcttgcatgtcattgtctatgacagcgtcaagactggcccttggcaccgtgctgtgtggaaaccctcccctctgagactccactgagacgtggctgagtgaaatyttcctcgtcagtggtcaaggtgtgtcatccatacagctccatgcctttgtcttttttaaatgtaattaaaaaaggaaccaactggcgtttgtagttggkgtttgttatttattgattctccctccaaaggggcctaagctcgacaaaaccgttacagttgtcagaacccagccacagggctcagcccccttcccccacgtcacgtctgcatcactactgtgggtgagcctggacggacgggggctggggctgcccrtggcagcggcaagggatgctttccagagacagccaccackcaggagggaggatcaccccaggcaacccagacacgggtgttcacatgtgaggctgtgagctccacata

SEQ ID NO: 5593 - DNA, 3493 bp, Homo sapiens
cgagccccgaagtaagaactccgtggcgcgtgcagccctagggaggaagggcgtgctgcgggtgcagtctcaggggcgtctgcctgagcccgcttttckacaagatgtggggatttttgaagcgccctgtagtggtgacggctgacatcaacttgagccttgtggccctgactgggatggggttactgagccggctgtggcgactcacctacccgcgggctgtggtttttgacgaagtatattatgggcagtacatctctttttacatgaaacaaatcttcttcttggatgacagtgggccgccatttggccacatggtgctggccttgrgaggttatttaggaggattcgatggcaattttttgtggaacagaattggagcagaatacagtagcaacgtgcctgtgtggtccctgcgcctgctgccagcactcgcgggggccttgtcggtccccatggcctaccagatagtgttggagctccacttttctcattgtgccgccatgggagctgctctgttgatgcttatcgagaatgctctcatcactcagtcaaggctaatgcttttggaatcagtgttaatatttttcaatctattggccgtgttgtcctacctgaagttcttcaactgccaaaagcacagccctttttctctgagctggtggttctggctaacactgacaggggtcgcttgttcctgtgcagtgggcatcaagtacatgggtgtgttcacgtacgtgctcgtgctgggtgttgcagctgtccatgcctggcacctgcttggagaccagactttgtccaatgtaggtgctgatgtccagkgctgcatgaggccggcctgtrtggggcagatgyrgatgtcacagggggtctgtgtgttctgtcacttgctcgcccgagcagtggctttgctggtcatcccggtcgtcctgtacttactgttcttctacgtccacttgattctagtcttccgctctgggccccacgaccaaatcatgtccagtgccttcyaggccagcttagagggaggactagctcggatcacycagggtcagccactggaggtggcctttgggtcccagrtcactctgaggaacgtctttgggaaacctgtgccctgctggcttcattcccaccaggacacctaccccatgatatatgagaacggccgaggcagctcccaccagcaacaggtgacctgttaccccttcaaagaygtcaataactggtggattgtaaaggatcccaggaggcacyagctggtggtgagcagccctccgagacctgtgaggcayggggacatggtgcagctggtccacggcatgaccacccgctccctgaacacgcatgatgttgcagcccccctgagcccccattcacaggaggtctcctgctacattgamtataacatctccatgcccgcccagaacctctggagactggarattgtgaacagaggatctgacacagacgtctggaagaccatcctctcagaggtccgctttgtgcacgtgaacacttccgctgtcttaaagctgagcggggctcacctccctgactgggggtatcggcaactggagatcgtcggggagaagctgtcccggggctaccacgggagcacggtgtggaacgtggaggagcaccgatayggcgcgagccaggagcagagggagcgggaacgggagctgcactcacctgcgcaggtggacgtcagcaggaacctcagcttcatggcgagattctcggagctgcagtggaggatgctggcgctgagaagtgatgactcggaacacaagtacagctccagcccactggagtgggtcaccctggacaccaatattgcctactggctgcaccccagraccagcgctcagatccacctacttggaaacatagtgatctgggtttcgggcagcctcgctctggccatctacgccctgctgtccttgtggtacctgctccgacggcgaagaaatgtccatgacctccctcaggatgcctggctgcgctgggtgctggctggggygctgtgtgccggtggctgggcagtgaactacctcccgttcttcctgatggagaagacactcttcctctaccactacctgcccgcactcaccttccaaatccttctgctccctgtggtcctgcagcacatcagcgaccacctgtgcaggtcccagctccagaggagcatcttcagcgccctggtggtggcctggtactcctccgcgtgccacgtgtccaacacgctgcgcccactcacctacggggacaagtcactctcgccacatgaactcaaggcccttcgctggaaagacagctgggacatcttgatccgaaaacactagaacaagagtgtggcaaagaacacccgtgctggggtcgggaygaggttgaagggtcttggtcaatgtacgtaatgagcagggtgggccccacgctgggaggacacgggctgggctgagcagggcctctagtggaacacatgggggtctcattgaaaagctctctgatgagcacctccttttgtgcaaagttaattttttctcgacaataaagatattccgtgtcttyacccctgaactaagacacagggagtatttcagaggccagcgtaggagtcatcgacaacraaaagccgagaacccagggccagcagtggagcctcagcagaccagggcctggtccttgctaattgctgcagggtggagtttgatctggcagacccgatcctccttcatgaacacccagcaacctgagcaagtcccrgccctgccctcagcgagcccggcaggcgtccygggacagctcagtgttggagggccacctgaaccacgagccagggctggggcttgcatgtcattgtctatgacagcgtcaagactggcccttggcaccgtgctgtgtggaaaccctcccctctgagactccactgagacgtggctgagtgaaatyttcctcgtcagtggtcaaggtgtgtcatccatacagctccatgcctttgtcttttttaaatgtaattaaaaaaggaaccaactggcgtttgtagttggkgtttgttatttattgattctccctccaaaggggcctaagctcgacaaaaccgttacagttgtcagaacccagccacagggctcagcccccttcccccacgtcacgtctgcatcactactgtgggtgagcctggacggacgggggctggggctgcccrtggcagcggcaagggatgctttccagagacagccaccackcaggagggaggatcaccccaggcaacccagacacgggtgttcacatgtgaggctgtgagctccacatacagtgggtgtgggtgggcgtccccaggctcagtccctgaacacacatgccgggcgggagacctgccctgaggctcggcagcccctcagtggggtctgctgctggactccaaatgtgaccgtttgccagaggtcrgcatcccagggtggtcccctggctcagaaaaggtccgctt

SEQ ID NO: 5594 - DNA, 3427 bp, Homo sapiens
cgagccccgaagtaagaactccgtggcgcgtgcagccctagggaggaagggcgtgctgcgggtgcagtctcaggggcgtctgcctgagcccgcttttckacaagatgtggggatttttgaagcgccctgtagtggtgacggctgacatcaacttgagccttgtggccctgactgggatggggttactgagccggctgtggcgactcacctacccgcgggctgtggtttttgacgaagtatattatgggcagtacatctctttttacatgaaacaaatcttcttcttggatgacagtgggccgccatttggccacatggtgctggccttgrgaggttatttaggaggattcgatggcaattttttgtggaacagaattggagcagaatacagtagcaacgtgcctgtgtggtccctgcgcctgctgccagcactcgcgggggccttgtcggtccccatggcctaccagatagtgttggagctccacttttctcattgtgccgccatgggagctgctctgttgatgcttatcgagaatgctctcatcactcagtcaaggctaatgcttttggaatcagtgttaatatttttcaatctattggccgtgttgtcctacctgaagttcttcaactgccaaaagcacagccctttttctctgagctggtggttctggctaacactgacaggggtcgcttgttcctgtgcagtgggcatcaagtacatgggtgtgttcacgtacgtgctcgtgctgggtgttgcagctgtccatgcctggcacctgcttggagaccagactttgtccaatgtctgtgtgttctgtcacttgctcgcccgagcagtggctttgctggtcatcccggtcgtcctgtacttactgttcttctacgtccacttgattctagtcttccgctctgggccccacgaccaaatcatgtccagtgccttcyaggccagcttagagggaggactagctcggatcacycagggtcagccactggaggtggcctttgggtcccagrtcactctgaggaacgtctttgggaaacctgtgccctgctggcttcattcccaccaggacacctaccccatgatatatgagaacggccgaggcagctcccaccagcaacaggtgacctgttaccccttcaaagaygtcaataactggtggattgtaaaggatcccaggaggcacyagctggtggtgagcagccctccgagacctgtgaggcayggggacatggtgcagctggtccacggcatgaccacccgctccctgaacacgcatgatgttgcagcccccctgagcccccattcacaggaggtctcctgctacattgamtataacatctccatgcccgcccagaacctctggagactggarattgtgaacagaggatctgacacagacgtctggaagaccatcctctcagaggtccgctttgtgcacgtgaacacttccgctgtcttaaagctgagcggggctcacctccctgactgggggtatcggcaactggagatcgtcggggagaagctgtcccggggctaccacgggagcacggtgtggaacgtggaggagcaccgatayggcgcgagccaggagcagagggagcgggaacgggagctgcactcacctgcgcaggtggacgtcagcaggaacctcagcttcatggcgagattctcggagctgcagtggaggatgctggcgctgagaagtgatgactcggaacacaagtacagctccagcccactggagtgggtcaccctggacaccaatattgcctactggctgcaccccagraccagcgctcagatccacctacttggaaacatagtgatctgggtttcgggcagcctcgctctggccatctacgccctgctgtccttgtggtacctgctccgacggcgaagaaatgtccatgacctccctcaggatgcctggctgcgctgggtgctggctggggygctgtgtgccggtggctgggcagtgaactacctcccgttcttcctgatggagaagacactcttcctctaccactacctgcccgcactcaccttccaaatccttctgctccctgtggtcctgcagcacatcagcgaccacctgtgcaggtcccagctccagaggagcatcttcagcgccctggtggtggcctggtactcctccgcgtgccacgtgtccaacacgctgcgcccactcacctacggggacaagtcactctcgccacatgaactcaaggcccttcgctggaaagacagctgggacatcttgatccgaaaacactagaacaagagtgtggcaaagaacacccgtgctggggtcgggaygaggttgaagggtcttggtcaatgtacgtaatgagcagggtgggccccacgctgggaggacacgggctgggctgagcagggcctctagtggaacacatgggggtctcattgaaaagctctctgatgagcacctccttttgtgcaaagttaattttttctcgacaataaagatattccgtgtcttyacccctgaactaagacacagggagtatttcagaggccagcgtaggagtcatcgacaacraaaagccgagaacccagggccagcagtggagcctcagcagaccagggcctggtccttgctaattgctgcagggtggagtttgatctggcagacccgatcctccttcatgaacacccagcaacctgagcaagtcccrgccctgccctcagcgagcccggcaggcgtccygggacagctcagtgttggagggccacctgaaccacgagccagggctggggcttgcatgtcattgtctatgacagcgtcaagactggcccttggcaccgtgctgtgtggaaaccctcccctctgagactccactgagacgtggctgagtgaaatyttcctcgtcagtggtcaaggtgtgtcatccatacagctccatgcctttgtcttttttaaatgtaattaaaaaaggaaccaactggcgtttgtagttggkgtttgttatttattgattctccctccaaaggggcctaagctcgacaaaaccgttacagttgtcagaacccagccacagggctcagcccccttcccccacgtcacgtctgcatcactactgtgggtgagcctggacggacgggggctggggctgcccrtggcagcggcaagggatgctttccagagacagccaccackcaggagggaggatcaccccaggcaacccagacacgggtgttcacatgtgaggctgtgagctccacatacagtgggtgtgggtgggcgtccccaggctcagtccctgaacacacatgccgggcgggagacctgccctgaggctcggcagcccctcagtggggtctgctgctggactccaaatgtgaccgtttgccagaggtcrgcatcccagggtggtcccctggctcagaaaaggtccgctt

SEQ ID NO: 5595 - DNA, 3591 bp, Homo sapiens
cccgcaggctcggtgaatcgaacgttgagcagggcggtgggtggtgcggagtgccgagcggcctcacccccaaccgtcggcccagtcggacggttccgaggcgttgccgggagccgggcgcggctctgtgtggactcggagaaacgcggggcgtctgcctgagcccgcttttckacaagatgtggggatttttgaagcgccctgtagtggtgacggctgacatcaacttgagccttgtggccctgactgggatggggttactgagccggctgtggcgactcacctacccgcgggctgtggtttttgacgaagtatattatgggcagtacatctctttttacatgaaacaaatcttcttcttggatgacagtgggccgccatttggccacatggtgctggccttgrgaggttatttaggaggattcgatggcaattttttgtggaacagaattggagcagaatacagtagcaacgtgcctgtgtggtccctgcgcctgctgccagcactcgcgggggccttgtcggtccccatggcctaccagatagtgttggagctccacttttctcattgtgccgccatgggagctgctctgttgatgcttatcgagaatgctctcatcactcagtcaaggctaatgcttttggaatcagtgttaatatttttcaatctattggccgtgttgtcctacctgaagttcttcaactgccaaaagcacagccctttttctctgagctggtggttctggctaacactgacaggggtcgcttgttcctgtgcagtgggcatcaagtacatgggtgtgttcacgtacgtgctcgtgctgggtgttgcagctgtccatgcctggcacctgcttggagaccagactttgtccaatgtaggtgctgatgtccagkgctgcatgaggccggcctgtrtggggcagatgyrgatgtcacagggggtacttggtgaaaagactccaatcctcaatgttttagaagcaggcaggcctgggcagcctcgcctcttggcctctgcaggtgcctctgtatgggaggccagagtttctgtcactaactttttctaagctcacaatgtctagaggtgggtrcgcttttccacgcagtggaacatgacttttctttgaatctctggcaggtctgtgtgttctgtcacttgctcgcccgagcagtggctttgctggtcatcccggtcgtcctgtacttactgttcttctacgtccacttgattctagtcttccgctctgggccccacgaccaaatcatgtccagtgccttcyaggccagcttagagggaggactagctcggatcacycagggtcagccactggaggtggcctttgggtcccagrtcactctgaggaacgtctttgggaaacctgtgccctgctggcttcattcccaccaggacacctaccccatgatatatgagaacggccgaggcagctcccaccagcaacaggtgacctgttaccccttcaaagaygtcaataactggtggattgtaaaggatcccaggaggcacyagctggtggtgagcagccctccgagacctgtgaggcayggggacatggtgcagctggtccacggcatgaccacccgctccctgaacacgcatgatgttgcagcccccctgagcccccattcacaggaggtctcctgctacattgamtataacatctccatgcccgcccagaacctctggagactggarattgtgaacagaggatctgacacagacgtctggaagaccatcctctcagaggtccgctttgtgcacgtgaacacttccgctgtcttaaagctgagcggggctcacctccctgactgggggtatcggcaactggagatcgtcggggagaagctgtcccggggctaccacgggagcacggtgtggaacgtggaggagcaccgatayggcgcgagccaggagcagagggagcgggaacgggagctgcactcacctgcgcaggtggacgtcagcaggaacctcagcttcatggcgagattctcggagctgcagtggaggatgctggcgctgagaagtgatgactcggaacacaagtacagctccagcccactggagtgggtcaccctggacaccaatattgcctactggctgcaccccagraccagcgctcagatccacctacttggaaacatagtgatctgggtttcgggcagcctcgctctggccatctacgccctgctgtccttgtggtacctgctccgacggcgaagaaatgtccatgacctccctcaggatgcctggctgcgctgggtgctggctggggygctgtgtgccggtggctgggcagtgaactacctcccgttcttcctgatggagaagacactcttcctctaccactacctgcccgcactcaccttccaaatccttctgctccctgtggtcctgcagcacatcagcgaccacctgtgcaggtcccagctccagaggagcatcttcagcgccctggtggtggcctggtactcctccgcgtgccacgtgtccaacacgctgcgcccactcacctacggggacaagtcactctcgccacatgaactcaaggcccttcgctggaaagacagctgggacatcttgatccgaaaacactagaacaagagtgtggcaaagaacacccgtgctggggtcgggaygaggttgaagggtcttggtcaatgtacgtaatgagcagggtgggccccacgctgggaggacacgggctgggctgagcagggcctctagtggaacacatgggggtctcattgaaaagctctctgatgagcacctccttttgtgcaaagttaattttttctcgacaataaagatattccgtgtcttyacccctgaactaagacacagggagtatttcagaggccagcgtaggagtcatcgacaacraaaagccgagaacccagggccagcagtggagcctcagcagaccagggcctggtccttgctaattgctgcagggtggagtttgatctggcagacccgatcctccttcatgaacacccagcaacctgagcaagtcccrgccctgccctcagcgagcccggcaggcgtccygggacagctcagtgttggagggccacctgaaccacgagccagggctggggcttgcatgtcattgtctatgacagcgtcaagactggcccttggcaccgtgctgtgtggaaaccctcccctctgagactccactgagacgtggctgagtgaaatyttcctcgtcagtggtcaaggtgtgtcatccatacagctccatgcctttgtcttttttaaatgtaattaaaaaaggaaccaactggcgtttgtagttggkgtttgttatttattgattctccctccaaaggggcctaagctcgacaaaaccgttacagttgtcagaacccagccacagggctcagcccccttcccccacgtcacgtctgcatcactactgtgggtgagcctggacggacgggggctggggctgcccrtggcagcggcaagggatgctttccagagacagccaccackcaggagggaggatcaccccaggcaacccagacacgggtgttcacatgtgaggctgtgagctccacata

SEQ ID NO: 5596 - DNA, 3319 bp, Homo sapiens
cgagccccgaagtaagaactccgtggcgcgtgcagccctagggaggaagggcgtgctgcgggtgcagtctcaggggcgtctgcctgagcccgcttttckacaagatgtggggatttttgaagcgccctgtagtggtgacggctgacatcaacttgagccttgtggccctgactgggatggggttactgagccggctgtggcgactcacctacccgcgggctgtggtttttgacgaagtatattatgggcagtacatctctttttacatgaaacaaatcttcttcttggatgacagtgggccgccatttggccacatggtgctggccttgrgaggttatttaggaggattcgatggcaattttttgtggaacagaattggagcagaatacagtagcaacgtgcctgtgtggtccctgcgcctgctgccagcactcgcgggggccttgtcggtccccatggcctaccagatagtgttggagctccacttttctcattgtgccgccatgggagctgctctgttgatgcttatcgagaatgctctcatcactcagtcaaggctaatgcttttggaatcagtgttaatatttttcaatctattggccgtgttgtcctacctgaagttcttcaactgccaaaagcacagccctttttctctgagctggtggttctggctaacactgacaggggtcgcttgttcctgtgcagtgggcatcaagtacatgggtgtgttcacgtacgtgctcgtgctgggtgttgcagctgtccatgcctggcacctgcttggagaccagactttgtccaatgtaggtgctgatgtccagkgctgcatgaggccggcctgtrtggggcagatgyrgatgtcacagggggtctgtgtgttctgtcacttgctcgcccgagcagtggctttgctggtcatcccggtcgtcctgtacttactgttcttctacgtccacttgattctagtcttccgctctgggccccacgaccaaatcatgtccagtgccttcyaggccagcttagagggaggactagctcggatcacycagggtcagccactggaggtggcctttgggtcccagrtcactctgaggaacgtctttgggaaacctgtgccctgctggcttcattcccaccaggacacctaccccatgatatatgagaacggccgaggcagctcccaccagcaacaggtgacctgttaccccttcaaagaygtcaataactggtggattgtaaaggatcccaggaggcacyagctggtggtgagcagccctccgagacctgtgaggcayggggacatggtgcagctggtccacggcatgaccacccgctccctgaacacgcatgatgttgcagcccccctgagcccccattcacaggaggtctcctgctacattgamtataacatctccatgcccgcccagaacctctggagactggarattgtgaacagaggatctgacacagacgtctggaagaccatcctctcagaggtccgctttgtgcacgtgaacacttccgctgtcttaaagctgagcggggctcacctccctgactgggggtatcggcaactggagatcgtcggggagaagctgtcccggggctaccacgggagcacggtgtggaacgtggaggagcaccgatayggcgcgagccaggagcagagggagcgggaacgggagctgcactcacctgcgcaggtggacgtcagcaggaacctcagcttcatggcgagattctcggagctgcagtggaggatgctggcgctgagaagtgatgactcggaacacaagtacagctccagcccactggagtgggtcaccctggacaccaatattgcctactggctgcaccccagraccagcgctcagatccacctacttggaaacatagtgatctgggtttcgggcagcctcgctctggccatctacgccctgctgtccttgtggtacctgctccgacggcgaagaaatgtccatgacctccctcaggatgcctggctgcgctgggtgctggctggggygctgtgtgccggtggctgggcagtgaactacctcccgttcttcctgatggagaagacactcttcctctaccactacctgcccgcactcaccttccaaatccttctgctccctgtggtcctgcagcacatcagcgaccacctgtgcaggtcccagctccagaggagcatcttcagcgccctggtggtggcctggtactcctccgcgtgccacgtgtccaacacgctgcgcccactcacctacggggacaagtcactctcgccacatgaactcaaggcccttcgctggaaagacagctgggacatcttgatccgaaaacactagaacaagagtgtggcaaagaacacccgtgctggggtcgggaygaggttgaagggtcttggtcaatgtacgtaatgagcagggtgggccccacgctgggaggacacgggctgggctgagcagggcctctagtggaacacatgggggtctcattgaaaagctctctgatgagcacctccttttgtgcaaagttaattttttctcgacaataaagatattccgtgtcttyacccctgaactaagacacagggagtatttcagaggccagcgtaggagtcatcgacaacraaaagccgagaacccagggccagcagtggagcctcagcagaccagggcctggtccttgctaattgctgcagggtggagtttgatctggcagacccgatcctccttcatgaacacccagcaacctgagcaagtcccrgccctgccctcagcgagcccggcaggcgtccygggacagctcagtgttggagggccacctgaaccacgagccagggctggggcttgcatgtcattgtctatgacagcgtcaagactggcccttggcaccgtgctgtgtggaaaccctcccctctgagactccactgagacgtggctgagtgaaatyttcctcgtcagtggtcaaggtgtgtcatccatacagctccatgcctttgtcttttttaaatgtaattaaaaaaggaaccaactggcgtttgtagttggkgtttgttatttattgattctccctccaaaggggcctaagctcgacaaaaccgttacagttgtcagaacccagccacagggctcagcccccttcccccacgtcacgtctgcatcactactgtgggtgagcctggacggacgggggctggggctgcccrtggcagcggcaagggatgctttccagagacagccaccackcaggagggaggatcaccccaggcaacccagacacgggtgttcacatgtgaggctgtgagctccacata

SEQ ID NO: 5597 - DNA, 3246 bp, Homo sapiens
tggccccgcaggctcggtgaatcgaacgttgagcagggcggtgggtggtgcggagtgccgagcggcctcacccccaaccgtcggcccagtcggacggttccgaggcgttgccgggagccgggcgcggctctgtgtggactcggagaaacgcggttttgacgaagtatattatgggcagtacatctctttttacatgaaacaaatcttcttcttggatgacagtgggccgccatttggccacatggtgctggccttgrgaggttatttaggaggattcgatggcaattttttgtggaacagaattggagcagaatacagtagcaacgtgcctgtgtggtccctgcgcctgctgccagcactcgcgggggccttgtcggtccccatggcctaccagatagtgttggagctccacttttctcattgtgccgccatgggagctgctctgttgatgcttatcgagaatgctctcatcactcagtcaaggctaatgcttttggaatcagtgttaatatttttcaatctattggccgtgttgtcctacctgaagttcttcaactgccaaaagcacagccctttttctctgagctggtggttctggctaacactgacaggggtcgcttgttcctgtgcagtgggcatcaagtacatgggtgtgttcacgtacgtgctcgtgctgggtgttgcagctgtccatgcctggcacctgcttggagaccagactttgtccaatgtaggtgctgatgtccagkgctgcatgaggccggcctgtrtggggcagatgyrgatgtcacagggggtctgtgtgttctgtcacttgctcgcccgagcagtggctttgctggtcatcccggtcgtcctgtacttactgttcttctacgtccacttgattctagtcttccgctctgggccccacgaccaaatcatgtccagtgccttcyaggccagcttagagggaggactagctcggatcacycagggtcagccactggaggtggcctttgggtcccagrtcactctgaggaacgtctttgggaaacctgtgccctgctggcttcattcccaccaggacacctaccccatgatatatgagaacggccgaggcagctcccaccagcaacaggtgacctgttaccccttcaaagaygtcaataactggtggattgtaaaggatcccaggaggcacyagctggtggtgagcagccctccgagacctgtgaggcayggggacatggtgcagctggtccacggcatgaccacccgctccctgaacacgcatgatgttgcagcccccctgagcccccattcacaggaggtctcctgctacattgamtataacatctccatgcccgcccagaacctctggagactggarattgtgaacagaggatctgacacagacgtctggaagaccatcctctcagaggtccgctttgtgcacgtgaacacttccgctgtcttaaagctgagcggggctcacctccctgactgggggtatcggcaactggagatcgtcggggagaagctgtcccggggctaccacgggagcacggtgtggaacgtggaggagcaccgatayggcgcgagccaggagcagagggagcgggaacgggagctgcactcacctgcgcaggtggacgtcagcaggaacctcagcttcatggcgagattctcggagctgcagtggaggatgctggcgctgagaagtgatgactcggaacacaagtacagctccagcccactggagtgggtcaccctggacaccaatattgcctactggctgcaccccagraccagcgctcagatccacctacttggaaacatagtgatctgggtttcgggcagcctcgctctggccatctacgccctgctgtccttgtggtacctgctccgacggcgaagaaatgtccatgacctccctcaggatgcctggctgcgctgggtgctggctggggygctgtgtgccggtggctgggcagtgaactacctcccgttcttcctgatggagaagacactcttcctctaccactacctgcccgcactcaccttccaaatccttctgctccctgtggtcctgcagcacatcagcgaccacctgtgcaggtcccagctccagaggagcatcttcagcgccctggtggtggcctggtactcctccgcgtgccacgtgtccaacacgctgcgcccactcacctacggggacaagtcactctcgccacatgaactcaaggcccttcgctggaaagacagctgggacatcttgatccgaaaacactagaacaagagtgtggcaaagaacacccgtgctggggtcgggaygaggttgaagggtcttggtcaatgtacgtaatgagcagggtgggccccacgctgggaggacacgggctgggctgagcagggcctctagtggaacacatgggggtctcattgaaaagctctctgatgagcacctccttttgtgcaaagttaattttttctcgacaataaagatattccgtgtcttyacccctgaactaagacacagggagtatttcagaggccagcgtaggagtcatcgacaacraaaagccgagaacccagggccagcagtggagcctcagcagaccagggcctggtccttgctaattgctgcagggtggagtttgatctggcagacccgatcctccttcatgaacacccagcaacctgagcaagtcccrgccctgccctcagcgagcccggcaggcgtccygggacagctcagtgttggagggccacctgaaccacgagccagggctggggcttgcatgtcattgtctatgacagcgtcaagactggcccttggcaccgtgctgtgtggaaaccctcccctctgagactccactgagacgtggctgagtgaaatyttcctcgtcagtggtcaaggtgtgtcatccatacagctccatgcctttgtcttttttaaatgtaattaaaaaaggaaccaactggcgtttgtagttggkgtttgttatttattgattctccctccaaaggggcctaagctcgacaaaaccgttacagttgtcagaacccagccacagggctcagcccccttcccccacgtcacgtctgcatcactactgtgggtgagcctggacggacgggggctggggctgcccrtggcagcggcaagggatgctttccagagacagccaccackcaggagggaggatcaccccaggcaacccagacacgggtgttcacatgtgaggctgtgagctccacata

SEQ ID NO: 5598 - DNA, 3521 bp, Homo sapiens
cgagccccgaagtaagaactccgtggcgcgtgcagccctagggaggaagggcgtgctgcgggtgcagtctcaggggcgtctgcctgagcccgcttttckacaagatgtggggatttttgaagcgccctgtagtggtgacggctgacatcaacttgagccttgtggccctgactgggatggggttactgagccggctgtggcgactcacctacccgcgggctgtggtttttgacgaagtatattatgggcagtacatctctttttacatgaaacaaatcttcttcttggatgacagtgggccgccatttggccacatggtgctggccttgrgaggttatttaggaggattcgatggcaattttttgtggaacagaattggagcagaatacagtagcaacgtgcctgtgtggtccctgcgcctgctgccagcactcgcgggggccttgtcggtccccatggcctaccagatagtgttggagctccacttttctcattgtgccgccatgggagctgctctgttgatgcttatcgagaatgctctcatcactcagtcaaggctaatgcttttggaatcagtgttaatatttttcaatctattggccgtgttgtcctacctgaagttcttcaactgccaaaagcacagccctttttctctgagctggtggttctggctaacactgacaggggtcgcttgttcctgtgcagtgggcatcaagtacatgggtgtgttcacgtacgtgctcgtgctgggtgttgcagctgtccatgcctggcacctgcttggagaccagactttgtccaatgtaggtgctgatgtccagkgctgcatgaggccggcctgtrtggggcagatgyrgatgtcacagggggtacttggtgaaaagactccaatcctcaatgttttagaagcaggcaggcctgggcagcctcgcctcttggcctctgcaggtgcctctgtatgggaggccagagtttctgtcactaactttttctaagctcacaatgtctagaggtgggtrcgcttttccacgcagtggaacatgacttttctttgaatctctggcaggtctgtgtgttctgtcacttgctcgcccgagcagtggctttgctggtcatcccggtcgtcctgtacttactgttcttctacgtccacttgattctagtcttccgctctgggccccacgaccaaatcatgtccagtgccttcyaggccagcttagagggaggactagctcggatcacycagggtcagccactggaggtggcctttgggtcccagrtcactctgaggaacgtctttgggaaacctgtgccctgctggcttcattcccaccaggacacctaccccatgatgtaagatatgagaacggccgaggcagctcccaccagcaacaggtgacctgttaccccttcaaagaygtcaataactggtggattgtaaaggatcccaggaggcacyagctggtggtgagcagccctccgagacctgtgaggcayggggacatggtgcagctggtccacggcatgaccacccgctccctgaacacgcatgatgttgcagcccccctgagcccccattcacaggaggtctcctgctacattgamtataacatctccatgcccgcccagaacctctggagactggarattgtgaacagaggatctgacacagacgtctggaagaccatcctctcagaggtccgctttgtgcacgtgaacacttccgctgtcttaaagctgagcggggctcacctccctgactgggggtatcggcaactggagatcgtcggggagaagctgtcccggggctaccacgggagcacggtgtggaacgtggaggagcaccgatayggcgcgagccaggagcagagggagcgggaacgggagctgcactcacctgcgcaggtggacgtcagcaggaacctcagcttcatggcgagattctcggagctgcagtggaggatgctggcgctgagaagtgatgactcggaacacaagtacagctccagcccactggagtgggtcaccctggacaccaatattgcctactggctgcaccccagraccagcgctcagatccacctacttggaaacatagtgatctgggtttcgggcagcctcgctctggccatctacgccctgctgtccttgtggtacctgctccgacggcgaagaaatgtccatgacctccctcaggatgcctggctgcgctgggtgctggctggggygctgtgtgccggtggctgggcagtgaactacctcccgttcttcctgatggagaagacactcttcctctaccactacctgcccgcactcaccttccaaatccttctgctccctgtggtcctgcagcacatcagcgaccacctgtgcaggtcccagctccagaggagcatcttcagcgccctggtggtggcctggtactcctccgcgtgccacgtgtccaacacgctgcgcccactcacctacggggacaagtcactctcgccacatgaactcaaggcccttcgctggaaagacagctgggacatcttgatccgaaaacactagaacaagagtgtggcaaagaacacccgtgctggggtcgggaygaggttgaagggtcttggtcaatgtacgtaatgagcagggtgggccccacgctgggaggacacgggctgggctgagcagggcctctagtggaacacatgggggtctcattgaaaagctctctgatgagcacctccttttgtgcaaagttaattttttctcgacaataaagatattccgtgtcttyacccctgaactaagacacagggagtatttcagaggccagcgtaggagtcatcgacaacraaaagccgagaacccagggccagcagtggagcctcagcagaccagggcctggtccttgctaattgctgcagggtggagtttgatctggcagacccgatcctccttcatgaacacccagcaacctgagcaagtcccrgccctgccctcagcgagcccggcaggcgtccygggacagctcagtgttggagggccacctgaaccacgagccagggctggggcttgcatgtcattgtctatgacagcgtcaagactggcccttggcaccgtgctgtgtggaaaccctcccctctgagactccactgagacgtggctgagtgaaatyttcctcgtcagtggtcaaggtgtgtcatccatacagctccatgcctttgtcttttttaaatgtaattaaaaaaggaaccaactggcgtttgtagttggkgtttgttatttattgattctccctccaaaggggcctaagctcgacaaaaccgttacagttgtcagaacccagccacagggctcagcccccttcccccacgtcacgtctgcatcactactgtgggtgagcctggacggacgggggctggggctgcccrtggcagcggcaagggatgctttccagagacagccaccackcaggagggaggatcaccccaggcaacccagacacgggtgttcacatgtgaggctgtgagctccacata

SEQ ID NO: 5599 - DNA, 2172 bp, Homo sapiens
gctccagtcgcctccgacctcggcgctgggcgggcgcgccgggcctggggaaggggcgggcgcggggacccgatgcgcgggagcggaggccgagatggcttcggcgggaggcgaagactgcgagagccccgcgccggaggccgaccgtccgcaccagcggcccttcctgataggggtgagcggcggcactgccagcgggaagtcgaccgtgtgtgagaagatcatggagttgctgggacagaacgaggtggaacagcggcagcggaaggtggtcatcctgagccaggacaggttctacaaggtcctgacggcagagcagaaggccaaggccttgaaaggacagtacaattttgaccatccagatgcctttgataatgatttgatgcacaggactctgaagaacatcgtggagggcaaaacggtggaggtgccgacctatgattttgtgacacactcaaggttaccagagaccacggtggtctaccctgcggacgtggttctgtttgagggcatcttggtgttctacagccaggagatccgggacatgttccacctgcgcctcttcgtggacaccgactccgacgtcaggctgtctcgaagagttctccgggacgtgcgccgagggagggacctggagcagattctgacgcagtacaccaccttcgtgaagccggccttcgaggagttctgyctgccgacaaagaagtatgccgatgtgatcatcccrcgaggagtggacaatatggttgccatcaacctgatcgtgcagcacatccaggacattctgaatggtgacatctgcaaatggcaccgaggagggtccaatgggcggagctacaagcggaccttttctgagccaggggaccaccctgggatgcygacctctggcaaacggtcacatttggagtccagcagcagaccccactgaggggctgccgagcctcagggcaggtctcccgcccggcatgtgtgttcagggactgagcctggggacgcccacccacacccactgcttcctctcggcgcaccccaggggagtgttagcagcgaggccttcctcactcaggagtggaaactcagatgtgtcactcagactcaacttgctgggacactgacaggcgttcctgaggttttcagccacttaggctcgttgcggtttaaagatccctctaggtcactgagaaatgccacagaatgtgcaggaagcctgggaggcttctgtgaggaatgtgaggcacattattggggaaattgaggagacagcctagacactggctggcctgatgttttgttgacagtgaacccacagtgggagagagttttttccagtctgatctggttcttacacactcacacacataactcaaaagttttgtgaacaagtactttccttttttacatgttacatgtcctcatgttttctgttttctgtttcataacacaaggctggttgtggcctacaaacctaatttcatgacccagtggtttgcagtccagcgtggcctacacggatatggggagccactgagggatgttttccccccttgcttgtgccttaaaggcagagaagcgaggcggatgccctggaagcacccagcatcacacccaggcttgtgcggggccaggctgggagcccatgcagtagggcagaaggcagcggaggccaggtctgtcccggctggagaacagcgtccacgcagtcctgcctggggtcaggccctcactgaccctcaggggagcccccaaggtgctgtctgtctagacaggctgtcccaccccagggtggctagtggccatatgcagggaatggtgcttctggctgtggcacgcactggatcacccaggtcccagcagacatggccgcccaaagtcagcaagcctcytttgtgctatgtggagctcacagcctcacatgtgaacacccgtgtctgggttgcctggggtgatcctccctcctgmgtggtggctgtctctggaaagcatcccttgccgctgccaygggcagccccagcccccgtccgtccaggctcacccacagtagtgatgcagacgtgacgtgggggaagggggctgagccctgtggctgggttctgacaactgtaacggttttgtcgagcttaggcccctttggagggagaatcaataaataacaaacmccaactacaaacgcca

SEQ ID NO: 5600 - DNA, 1231 bp, Homo sapiens
gctccagtcgcctccgacctcggcgctgggcgggcgcgccgggcctggggaaggggcgggcgcggggacccgatgcgcgggagcggaggccgagatggcttcggcgggaggcgaagactgcgagagccccgcgccggaggccgaccgtccgcaccagcggcccttcctgataggggtgagcggcggcactgccagcgggaagtcgaccgtgtgtgagaagatcatggagttgctgggacagaacgaggtggaacagcggcagcggaaggtggtcatcctgagccaggacaggttctacaaggtcctgacggcagagcagaaggccaaggccttgaaaggacagtacaattttgaccatccagatgcctttgataatgatttgatgcacaggactctgaagaacatcgtggagggcaaaacggtggaggtgccgacctatgattttgtgacacactcaaggttaccagagaccacggtggtctaccctgcggacgtggttctgtttgagggcatcttggtgttctacagccaggagatccgggacatgttccacctgcgcctcttcgtggacaccgactccgacgtcaggctgtctcgaagagttctccgggacgtgcgccgagggagggacctggagcagattctgacgcagtacaccaccttcgtgaagccggccttcgaggagttctgyctgccgctgcactttctgcctcacttcttggatcatggcctctcacacctggctgatgactgagtctgtgtcccccatttgccgatgacaccagcacctctgagcaccccagggccgcccctcctgctgttgcatctgtttctgagcatcttaaaatcacctttgaaggaaaagtcctcacaggaacacccccccttgtgccttacagacaaagaagtatgccgatgtgatcatcccrcgaggagtggacaatatgggtaagaagctggcctgctgggctgtccccccgcccctcccagagcttgaggcagggacagttccaccagtgtgcagttactgagcactcccctgcgcacgcggcctgccagtgttgatctgcggcacagggttaaaatatgcttaaaaatgtatgtagctgggcgcggtggctcacactggtaatcccagcactttgggaggctgaggcagggggatcactggagcccaggagttcaacagcctggggaacatagcaaaaccccatctctacaaaaaataaaa

SEQ ID NO: 5601 - DNA, 1447 bp, Homo sapiens
gctccagtcgcctccgacctcggcgctgggcgggcgcgccgggcctggggaaggggcgggcgcggggacccgatgcgcgggagcggaggccgagatggcttcggcgggaggcgaagactgcgagagccccgcgccggaggccgaccgtccgcaccagcggcccttcctgataggggtgagcggcggcactgccagcgggaagtcgaccgtgtgtgagaagatcatggagttgctgggacagaacgaggtggaacagcggcagcggaaggtggtcatcctgagccaggacaggttctacaaggtcctgacggcagagcagaaggccaaggccttgaaaggacagtacaattttgaccatccagatgcctttgataatgatttgatgcacaggactctgaagaacatcgtggagggcaaaacggtggaggtgccgacctatgattttgtgacacactcaaggttaccagagaccacggtggtctaccctgcggacgtggttctgtttgagggcatcttggtgttctacagccaggagatccgggacatgttccacctgcgcctcttcgtggacaccgactccgacgtcaggctgtctcgaagagacaaagaagtatgccgatgtgatcatcccrcgaggagtggacaatatggttgccatcaacctgatcgtgcagcacatccaggacattctgaatggtgacatctgcaaatggcaccgaggagggtccaatgggcggagctacaagcygacctctggcaaacggtcacatttggagtccagcagcagaccccactgaggggctgccgagcctcagggcaggtctcccgcccggcatgtgtgttcagggactgagcctggggacgcccacccacacccactgcttcctctcggcgcaccccaggggagtgttagcagcgaggccttcctcactcaggagtggaaactcagatgtgtcactcagactcaacttgctgggacactgacaggcgttcctgaggttttcagccacttaggctcgttgcggtttaaagatccctctaggtcactgagaaatgccacagaatgtgcaggaagcctgggaggcttctgtgaggaatgtgaggcacattattggggaaattgaggagacagcctagacactggctggcctgatgttttgttgacagtgaacccacagtgggagagagttttttccagtctgatctggttcttacacactcacacacataactcaaaagttttgtgaacaagtactttccttttttacatgttacatgtcctcatgttttctgttttctgtttcataacacaaggctggttgtggcctacaaacctaatttcatgacccagtggtttgcagtccagcgtggcctacacggatatggggagccactgagggatgttttccccccttgcttgtgccttaaaggcagagaagcgaggcgg

SEQ ID NO: 5602 - DNA, 2699 bp, Homo sapiens
tgcactgctctcccttcgctgtggggaagcgacaacgtcccgataacttgcagactgtggcgcaactggtcttggtagcggaggcacccgaatgctgcccgggtgagatgaggaagccaaggcccagcagagctgagatgtgactgcagagccgtccaaccccagtcctgtgacctttctctggtgcctgatacctctcagcatttgagggccttttctcttcctgcttcatctctaaaggtccttctaggagagaggtgaaagaaacctggcaaagaaaacggtctcgacaatgagtaggccacccatcactactaactacagatgacttgccatttcatttacaaagatgtcttctgctgctgaaaatggagaggcagcacctggaaaacaaaatgaagaaaaaacctataaaaagactgcatcatctgctattaaaggtgctattcagctgggaataggatacacagtgggtaatctcacttccaagccagaacgagatgttcttatgcaagacttttatgtggtggaaagtgtgttcctacccagcgaagggagcaatctgaccccagcacatcactacccagactttagatttaagacatacgctccattagcattccgatatttcagagaactttttggtatcaagcctgatgattacttgtattccatctgcagtgaacctctaatagaactgtctaaccctggagccagtggatccttgttttttgtgaccagtgatgatgaatttatcatcaaaacagttcagcacaaagaagctgagtttcttcagaagctactgccaggctattacatgaatttaaaccagaatccaaggactcttttgccaaaattttacggactgtattgtatgcaatcaggaggcattaatatcaggattgtggtgatgaacaacgttttgccacgctccatgagaatgcactttacatatgacttgaaaggctcaacgtataagcgaagagcatcccgtaaagagagagagaaatccaaccccacatttaaggacttagatttcctgcaagacatgcacgaagggttgtattttgatacggaaacatacaacgcgcttatgaaaacacttcagagagactgccgggtgctagaaagcttcaagatcatggattatagccttctgttgggaattcatttcctggaccattccctcaaagagaaagaggaggagaccccacaaaatgtgcctgatgctaagcggactgggatgcagaaggttctctactcaacagccatggaatctatccagggtccagggaaatctggagatgggataatcacagagaacccagacacaatgggaggcattccagctaaaagccataggggagaaaaactacttttatttatgggcattattgacattctgcaatcatataggttaatgaagaagttagaacattcctggaaagctcttgtttatgatggggacactgtttctgttcatagaccaagcttttatgcagacagatttcttaagttcatgaattccagagttttcaagaaaattcaagctttgaaggcttcaccgtctaagaaacggtgcaattcaatcgccgccctaaaggccacttcacaggagattgtgtcctcaattagccaggaatggaaggatgagaagcgggatttgctgactgaaggacaaagttttagcagccttgatgaagaagccctgggatcccgacacaggccagacctggtccctagcactccatcactgtttgaagctgcttccttggcaaccacaatttcatcttcttccttatacgtcaatgagcactatccacacgacaggcctacactctattcaaacagcaaagggttaccttccagttcaacatttaccttggaagaggggaccatctacttgaccgctgagcccaacactctggaagtgcaggatgacaatgcttctgtgcttgacgtctatttataagtgaaaatggtgatcacctaagcayatggatgagacgtgagcacagttatggcagagaagtttctccgcaccmgaattatccacagcaacttggctgagccccactacacacagagaaatcatcaacctgacttaagagttttcaagatgtcaacttcaggctgatcagcagatgggatgtgaaaaatactaccctattctatcatttgctgttgcttgctgaactgtgaagaactgcatgaactatatttaagctgctttctgtaccattgccaatcacctttttggagttggaagtgctattttcctatggacttttgcattatttcattgtgcatgcatccagtgattatacataagcaacatatgtaatctgcttatatatttttaaaaatccatccacacacatggtaaattaagtataaattcttttgcaaaattatagttcatgtcattgaaagtttaaattggtttcatttaaagatcaatatactaggtctgccttcactttatagaaaactagcttctataaagattttttcactgtttactagtgaaatgagaaaagcaaagctatttataaaaggccttatgtcgtgtacatacattgtctttgaaatatttgtgatctagtttattgcttgtaaaagagaaattatataatttatttagtaaatactactgtaaactatagttttgtgagagaaataaaatattttgttctcaa

SEQ ID NO: 5603 - DNA, 2359 bp, Homo sapiens
cagaaacctggcaaagaaaacggtctcgacaatgagtaggccacccatcactactaactacagatgacttgccatttcatttacaactgcatcatctgctattaaaggtgctattcagctgggaataggatacacagtgggtaatctcacttccaagccagaacgagatgttcttatgcaagacttttatgtggtggaaagtgtgttcctacccagcgaagggagcaatctgaccccagcacatcactacccagactttagatttaagacatacgctccattagcattccgatatttcagagaactttttggtatcaagcctgatgattacttgtattccatctgcagtgaacctctaatagaactgtctaaccctggagccagtggatccttgttttttgtgaccagtgatgatgaatttatcatcaaaacagttcagcacaaagaagctgagtttcttcagaagctactgccaggctattacatgaatttaaaccagaatccaaggactcttttgccaaaattttacggactgtattgtatgcaatcaggaggcattaatatcaggattgtggtgatgaacaacgttttgccacgctccatgagaatgcactttacatatgacttgaaaggctcaacgtataagcgaagagcatcccgtaaagagagagagaaatccaaccccacatttaaggacttagatttcctgcaagacatgcacgaagggttgtattttgatacggaaacatacaacgcgcttatgaaaacacttcagagagactgccggaaagcttcaagatcatggattatagccttctgttgggaattcatttcctggaccattccctcaaagagaaagaggaggagaccccacaaaatgtgcctgatgctaagcggactgggatgcagaaggttctctactcaacagccatggaatctatccagggtccagggaaatctggagatgggataatcacagagaacccagacacaatgggaggcattccagctaaaagccataggggagaaaaactacttttatttatgggcattattgacattctgcaatcatataggttaatgaagaagttagaacattcctggaaagctcttgtttatgatggggacactgtttctgttcatagaccaagcttttatgcagacagatttcttaagttcatgaattccagagttttcaagaaaattcaagctttgaaggcttcaccgtctaagaaacggtgcaattcaatcgccgccctaaaggccacttcacaggagattgtgtcctcaattagccaggaatggaaggatgagaagcgggatttgctgactgaaggacaaagttttagcagccttgatgaagaagccctgggatcccgacacaggccagacctggtccctagcactccatcactgtttgaagctgcttccttggcaaccacaatttcatcttcttccttatacgtcaatgagcactatccacacgacaggcctacactctattcaaacagcaaagggttaccttccagttcaacatttaccttggaagaggggaccatctacttgaccgctgagcccaacactctggaagtgcaggatgacartgcttctgtgcttgacgtctatttataagtgaaaatggtgatcacctaagcacatggatgagacgtgagcacagttatggcagagaagtttctccgcaccagaattatccacagcaacttggctgagccccactacayacagagaaatcatcaacctgacttaagagttttcaagatgtcaacttmaggctgatcagcagatgggatgtgaaaaatactaccctattctatcatttgctgttgcttgctgaactgtgaagaactgcatgaactatatttaagctgctttctgtaccattgccaatcacctttttggagttggaagtgctattttcctatggacttttgcattatttcattgtgcatgcatccagtgattatacataagcaacatatgtaatctgcttatatatttttaaaaatccatccacacacatggtaaattaagtataaattcttttgcaaaattatagttcatgtcattgaaagtttaaattggtttcatttaaagatcaatatactaggtctgccttcactttatagaaaactagcttctataaagattttttcactgtttactagtgaaatgagaaaagcaaagctatttataaaaggccttatgtcgtgtacatacattgtctttgaaatatttgtgatctagtttattgcttgtaaaagagaaattatataatttatttagtaaatactactgtaaactatagttttgtgagagaaataaaatattttgttctcaa

SEQ ID NO: 5604 - DNA, 1409 bp, Homo sapiens
gccttggagagtactcgggttcgtgaacttcccggaggcgcaatgagctgcattaacctgcccactgtgctgccyggctcccccagcaagacccgggggcagatccaggtgcgggggccagccctgcgcgtggctggggatgaggtggtcgtggtgatagcctgtgtccaggcatccgcgcagggcgggccctcaaatgacctcaccttctctcctaggtgattctcgggccgatgttctcaggaaaaagcacagagttgatgagacgcgtccgtcgcttccagattgctcagtacaagtgcctggtgatcaagtatgccaaagacactcgctacagcagcagcttctgcacacatgaccggaacaccatggargcrctgcccgcctgcctgctccgagacgtggcccaggaggccctgggcgtggctgtcataggcatcgacgaggggcagtttttccctgacatcrtggagttctgcgaggccatggccaacgccgggaagaccgtaattgtggctgcactggatgggaccttccagaggaagccatttggggccatcctgaacctggtgccgctggccgagagcgtggtgaagctgacggcggtgtgcatggagtgcttccgggaagccgcctataccaagaggctcggcacagagaaggaggtcgaggtgattgggggagcagacaagtaccactcygtgtgtcggctctgctacttcaagaaggcctcaggccagcctgcygggccggacaacaaagagaactgcccagtgccaggaaagccaggggaagccgtggctgccaggaagctctttgccccacagcagattctgcaatgcagccctgccaactgagggacctgcragggccgcccgctcccttcctgccactgccgcctactggacgctgccctgcatgctgcccagccactccaggaggaagtcggraggcgtggaggrtgaccacaccttggccttctgggaactctcctttgtgtggctgccccacctgccgcatgctccctcctctcctacccactggtctgcttaaagcttccctctcagctgctgggacgatcgcccaggctggagctggccccgcttggtggcctgggatctggcacactccctctccttggggtgagggacagagccccacgctgttgacatcagcctgcttcttcccctctgcggctttcactgctgagtttctgttctccctgggaagcctgtgccagcacctttgagccttggcccacactgaggcttaggcctctctgcctgggatgggctcccaatctcttcaagtgtggagagggcagggtccacgcctctgctgtagcttatgaaattaactaattgaaaattcactggttggtggacgcacatttctctttcacctgggtt

SEQ ID NO: 5605 - DNA, 2151 bp, Homo sapiens
gatttccaggccctcccagtccytgggcgcacgtcccggattcctcccacgagggggcgggctgcggccaaatctcccgccaggtcagcggccgggcgctgattggccccatggcggcggggccggctcgtgattggccagcacgccgtggtttaaagcggtcggcgcgggaaccaggggcttactgcgggacggccttggagagtactcgggttcgtgaacttcccggaggcgcaatgagctgcattaacctgcccactgtgctgccyggctcccccagcaagacccgggggcagatccaggtgattctcgggccgatgttctcaggaaaaagcacagagttgatgagacgcgtccgtcgcttccagattgctcagtacaagtgcctggtgatcaagtatgccaaagacactcgctacagcagcagcttctgcacacatgaccggtcagaacaccatggargcrctgcccgcctgcctgctccgagacgtggcccaggaggccctgggcgtggctgtcataggcatcgacgaggggcagtttttccctgacatcrtggagttctgcgaggccatggccaacgccgggaagaccgtaattgtggctgcactggatgggaccttccagaggaagccatttggggccatcctgaacctggtgccgctggccgagagcgtggtgaagctgacggcggtgtgcatggagtgcttccgggaagccgcctataccaagaggctcggcacagagaaggaggtcgaggtgattgggggagcagacaagtaccactcygtgtgtcggctctgctacttcaagaaggcctcaggccagcctgcygggccggacaacaaagagaactgcccagtgccaggaaagccaggggaagccgtggctgccaggaagctctttgccccacagcagattctgcaatgcagccctgccaactgagggacctgcragggccgcccgctcccttcctgccactgccgcctactggacgctgccctgcatgctgcccagccagatggcctggattcacgccctcttgtttccttttgggctcaaagcccttcctacctctggtgatggtttccacaggaacaacagcatctttcaccaagatgggtggcaccaaccttgctgggacttggatcccaggggcttatctcttcaagtgtggagagggcagggtccacgcctctgctgtagcttatgaaattaactaattgaaaattcactggttggtggacgcacatttctctttcacctgggtttccctgggtctcatggacagctccaacttgatttgggtggggattttcttccagatctttttttcttttgttttgagacagggtctctgtcgcccaggctggagtgcagtgacgcaatccctgctcactgcagcctctgcttccccagttgaagtgattctcccccgtcagcctcccaagtagccgatattacaggcgtgtaccaccacacctggctaatttttgtatttttagtagagacgagttttcaccatgttggccaggctggtctygaactcctggcctcaagtgatccacctgcctcggcctcccaaagtgctgggattacaggcgtgaggcactgcacctggcccccagatctttctgtagtaatactgatctcttaaccacaacccttgaactgagaaatgatcatggggtgtgtcctaagcagaacatcatctgccttcctgtctgggccagtgtcaggacaaaaatgggtgtacagaggagcccggggcccagttggaaggaagaggcactgtcctgcccgctgggcctgtgaggtcaggttttgtttgtgaaacaaactcttggtaattcaggagtcaagacatctctcagctgtgcctcagagatgggctgttggcagctcacttgsgggcaagcatcgctggggtaaggtgtgtcctgtgcaggcagggtcaccactcccagggcctccccagcctccctctccccttcgctagtgatgtgtcccaagccaaagccatcgggtgaggctgggagcagtgccctgttagttcgtactggggatttttaaacaatcgggacttgccgatgacagctccctctgtcattgctcaaaagaagaagccagaagttgctttagggccttgac

SEQ ID NO: 5606 - DNA, 2147 bp, Homo sapiens
gatttccaggccctcccagtccytgggcgcacgtcccggattcctcccacgagggggcgggctgcggccaaatctcccgccaggtcagcggccgggcgctgattggccccatggcggcggggccggctcgtgattggccagcacgccgtggtttaaagcggtcggcgcgggaaccaggggcttactgcgggacggccttggagagtactcgggttcgtgaacttcccggaggcgcaatgagctgcattaacctgcccactgtgctgccyggctcccccagcaagacccgggggcagatccaggtgattctcgggccgatgttctcaggaaaaagcacagagttgatgagacgcgtccgtcgcttccagattgctcagtacaagtgcctggtgatcaagtatgccaaagacactcgctacagcagcagcttctgcacacatgaccggaacaccatggargcrctgcccgcctgcctgctccgagacgtggcccaggaggccctgggcgtggctgtcataggcatcgacgaggggcagtttttccctgacatcrtggagttctgcgaggccatggccaacgccgggaagaccgtaattgtggctgcactggatgggaccttccagaggaagccatttggggccatcctgaacctggtgccgctggccgagagcgtggtgaagctgacggcggtgtgcatggagtgcttccgggaagccgcctataccaagaggctcggcacagagaaggaggtcgaggtgattgggggagcagacaagtaccactcygtgtgtcggctctgctacttcaagaaggcctcaggccagcctgcygggccggacaacaaagagaactgcccagtgccaggaaagccaggggaagccgtggctgccaggaagctctttgccccacagcagattctgcaatgcagccctgccaactgagggacctgcragggccgcccgctcccttcctgccactgccgcctactggacgctgccctgcatgctgcccagccagatggcctggattcacgccctcttgtttccttttgggctcaaagcccttcctacctctggtgatggtttccacaggaacaacagcatctttcaccaagatgggtggcaccaaccttgctgggacttggatcccaggggcttatctcttcaagtgtggagagggcagggtccacgcctctgctgtagcttatgaaattaactaattgaaaattcactggttggtggacgcacatttctctttcacctgggtttccctgggtctcatggacagctccaacttgatttgggtggggattttcttccagatctttttttcttttgttttgagacagggtctctgtcgcccaggctggagtgcagtgacgcaatccctgctcactgcagcctctgcttccccagttgaagtgattctcccccgtcagcctcccaagtagccgatattacaggcgtgtaccaccacacctggctaatttttgtatttttagtagagacgagttttcaccatgttggccaggctggtctygaactcctggcctcaagtgatccacctgcctcggcctcccaaagtgctgggattacaggcgtgaggcactgcacctggcccccagatctttctgtagtaatactgatctcttaaccacaacccttgaactgagaaatgatcatggggtgtgtcctaagcagaacatcatctgccttcctgtctgggccagtgtcaggacaaaaatgggtgtacagaggagcccggggcccagttggaaggaagaggcactgtcctgcccgctgggcctgtgaggtcaggttttgtttgtgaaacaaactcttggtaattcaggagtcaagacatctctcagctgtgcctcagagatgggctgttggcagctcacttgsgggcaagcatcgctggggtaaggtgtgtcctgtgcaggcagggtcaccactcccagggcctccccagcctccctctccccttcgctagtgatgtgtcccaagccaaagccatcgggtgaggctgggagcagtgccctgttagttcgtactggggatttttaaacaatcgggacttgccgatgacagctccctctgtcattgctcaaaagaagaagccagaagttgctttagggccttgac

SEQ ID NO: 5607 - DNA, 2526 bp, Homo sapiens
gatttccaggccctcccagtccytgggcgcacgtcccggattcctcccacgagggggcgggctgcggccaaatctcccgccaggtcagcggccgggcgctgattggccccatggcggcggggccggctcgtgattggccagcacgccgtggtttaaagcggtcggcgcgggaaccaggggcttactgcgggacggccttggagagtactcgggttcgtgaacttcccggaggcgcaatgagctgcattaacctgcccactgtgctgccyggctcccccagcaagacccgggggcagatccaggtgattctcgggccgatgttctcaggaaaaagcacagagttgatgagacgcgtccgtcgcttccagattgctcagtacaagtgcctggtgatcaagtatgccaaagacactcgctacagcagcagcttctgcacacatgaccggaacaccatggargcrctgcccgcctgcctgctccgagacgtggcccaggaggccctgggcgtggctgtcataggcatcgacgaggggcagtttttccctgacatcrtggagttctgcgaggccatggccaacgccgggaagaccgtaattgtggctgcactggatgggaccttccagaggaagccatttggggccatcctgaacctggtgccgctggccgagagcgtggtgaagctgacggcggtgtgcatggagtgcttccgggaagccgcctataccaagaggctcggcacagagaaggaggtcgaggtgattgggggagcagacaagtaccactcygtgtgtcggctctgctacttcaagaaggcctcaggccagcctgcygggccggacaacaaagagaactgcccagtgccaggaaagccaggggaagccgtggctgccaggaagctctttgccccacagcagattctgcaatgcagccctgccaactgagggacctgcragggccgcccgctcccttcctgccactgccgcctactggacgctgccctgcatgctgcccagccactccaggaggaagtcggraggcgtggaggrtgaccacaccttggccttctgggaactctcctttgtgtggctgccccacctgccgcatgctccctcctctcctacccactggtctgcttaaagcttccctctcagctgctgggacgatcgcccaggctggagctggccccgcttggtggcctgggatctggcacactccctctccttggggtgagggacagagccccacgctgttgacatcagcctgcttcttcccctctgcggctttcactgctgagtttctgttctccctgggaagcctgtgccagcacctttgagccttggcccacactgaggcttaggcctctctgcctgggatgggctcccaccctcccctgaggatggcctggattcacgccctcttgtttccttttgggctcaaagcccttcctacctctggtgatggtttccacaggaacaacagcatctttcaccaagatgggtggcaccaaccttgctgggacttggatcccaggggcttatctcttcaagtgtggagagggcagggtccacgcctctgctgtagcttatgaaattaactaattgaaaattcactggttggtggacgcacatttctctttcacctgggtttccctgggtctcatggacagctccaacttgatttgggtggggattttcttccagatctttttttcttttgttttgagacagggtctctgtcgcccaggctggagtgcagtgacgcaatccctgctcactgcagcctctgcttccccagttgaagtgattctcccccgtcagcctcccaagtagccgatattacaggcgtgtaccaccacacctggctaatttttgtatttttagtagagacgagttttcaccatgttggccaggctggtctygaactcctggcctcaagtgatccacctgcctcggcctcccaaagtgctgggattacaggcgtgaggcactgcacctggcccccagatctttctgtagtaatactgatctcttaaccacaacccttgaactgagaaatgatcatggggtgtgtcctaagcagaacatcatctgccttcctgtctgggccagtgtcaggacaaaaatgggtgtacagaggagcccggggcccagttggaaggaagaggcactgtcctgcccgctgggcctgtgaggtcaggttttgtttgtgaaacaaactcttggtaattcaggagtcaagacatctctcagctgtgcctcagagatgggctgttggcagctcacttgsgggcaagcatcgctggggtaaggtgtgtcctgtgcaggcagggtcaccactcccagggcctccccagcctccctctccccttcgctagtgatgtgtcccaagccaaagccatcgggtgaggctgggagcagtgccctgttagttcgtactggggatttttaaacaatcgggacttgccgatgacagctccctctgtcattgctcaaaagaagaagccagaagttgctttagggccttgac

SEQ ID NO: 5608 - DNA, 3567 bp, Homo sapiens
cccgcctccctaggcgtggaggagggggggcggctcagccccgcgcccgtgcgcgcgctcgcggccgggttgcagggctgggcgcgcgccccgcgtcccgggcaggaagatggtggcgagcgcgcgagtgcagaagctggtgcggcgctacaagctggcgattgccacggcgctggccatcctgctgctgcagggcctggtagtgtggagcttcagcggcctggaggaggacgaggcgggcgagaaaggaaggcagaggaagccacggccactggaccctggcgarggttccaaggacacagacagttcagcagggcgacggggcagcacaggcagaaggcatgggcgctggcggggccgtgctgagagcccaggagtgcccgtggccaaggtggtacgggcagtaaccagccggcagagagccagccggcgggtcccacctgccccaccyccggaagccccaggccrccagaacctgagtggggcagcagctggggaggcgctggtaggggcagctggcttcccaccacacggagatacagggagcgtggagggcgccccccagcccacggacaatggcttcacccccaagtgcgagatcgtgggcaaggacgcactgtctgcactggcccgggccagcaccaagcagtgccagcaggagatcgccaatgtggtgtgcctgcaccaggctgggagcctcatgcccaaggctgtgccccggcactgtcagctgactgggaagatgagccccggcatccagtgggatgagagccaagcccagcagcccatggatggccccccggtgcgaatcgcctacatgctggtggttcacggccgcgccatccgccagctgaagcgtctcctcaaggccgtttatcacgagcagcacttcttttacatccatgtggacaagcgttccgactacctgcaccgggaggtggtggagctggcccagggctatgataacgtgcgggtgacgccctggcgcatggttaccatctggggcggggccagcctcctgasgatgtacctgcggagcatgcgggacctgctagaggtgcctggctgggcctgggacttcttcatcaacctcagtgccactgactatccaaccaggaccaatgaggagctggtggcattcctatccaagaaccgggacaagaatttcctcaagtcacatggccgggacaactccaggttcatcaagaaacagggcctggaccggctcttccatgagtgcgactcacacatgtggcgcctgggcgagcggcagatcccagcaggcattgtggtggatggcggttctgactggttcgtgctgacacgcagctttgtggagtatgtggtgtacacagatgacccgcttgtggcccagctgcgccagttctacacatacacactgctcccagccgagtccttcttccacacggtgctggagaacagcctggcctgtgagaccctcgtggacaacaacctgcgggtcaccaactggaaccgcaagctgggctgcaagtgccagtacaagcacattgtggactggtgtggctgctcccccaacgacttcaagccacaggacttcctccggctgcagcaagtctccagacccaccttcttcgcccggaagttcgagtcgactgtgaaccaggaggtgctggaaatcctggacttccacctgtayggcagctacccccccggcacgccagccctcaaggcctactgggagaacacctacgacgcggctgatggccccagtgggctcagtgatgtcatgctcactgcttacacagccttcgcccgcctcagcctgcaccatgccgccactgctgcacccccaatgggcaccccactctgcaggtttgagcccaggggcttgccgtccagcgtgcacctgtatttctatgacgaccatttccagggctacctggtgacgcaggcggtgcarccctcagcccasgggccggcagagacgcttgagatgtggctgatgccccaagggtcgctgaagctgttggggcrcagtgaccaggccagccggctccagagtctrgaggttggcactgattgggaccccaaagagcgtcttttcyggaactttggggggttactggggccgctggacgagcctgtggcygtgcagcgctgggcccggggccccaacctcacagccacrgtggtctggatcgacccaacctatgtggtggccacatcttatgacatcacagtagatacggagactgaggtcacgcaatacaagcccccactgagccggcccctgcggccagggccctggactgttcgactccttcagttctgggaaccgctgggtgagacccgcttccttgtgctgcccttgaccttcaaccgcaaactacctctcaggaaagatgatgccagctggctgcacgcagggccaccccacaacgagtacatggagcagagtttccagggcctgagtagcatcctgaacctgcctcagccggagctcgcggaggaggctgcccagcggcacasacagctcacaggccctgcgctcgaggcctggacagacagggaactgagcagcttctggtccgtggctggactgtgtgccataggcccctctccctgcccctccctggagccctgcagactgaccagctggagctctctgtcccccgaccccaaatcagagctggggcctgtcaaagcagacgggcgactcaggtagcagggccccagccagtacccgtggaggacccgggaaattgcaccttacagacagtggaggggtgtcccctcccacaggcaagaaccagaggcccaggctgcacacccatttcagccatcaagaacccacacagacggcagggaaggtggacacagtatgaactactgctgatgtctctgttggggatcagagggctggcgggaacgcgagaagggcaccagcagcattccacacccagctcttcctcaccttcctgtctagtttgaatttcttttttttctttttttttttttttttttaatttaaaaaggaaaatgggtggttgggagagaaactagaacagaagatgtgcaatagggctcagagcagccccaggaagtgggccatgtctgtggggagcagkggcttgctgagcccacctgctattgttctgcacgaggctgggcctgcctcactctccagggcctcatgccccattctgggcctgtggtgctcgtggctgaggctccacagggctgcaagtgccctgccaggctctaaggcccgaagaacaggtgatatcgggggcrctgcagagctgggctctagcrggacagttcttttgtagccaggggaccctagaagtggggtggggcggctccagggctttccagcataccctgcccctggatgggaaaggcagggtcagggcccactgagacccatgcagagtttccaggtgtgcactggaagtgaggtcacatgagcagcgtgggaagaagactctgtcaagactctcagaagaacctggagtaattgtgcctgaagctcagcgtgaagtctgaaatatgcaacagaagaaatatatctctatctctcta

SEQ ID NO: 5609 - DNA, 2287 bp, Homo sapiens
ccgcgccccgccccgccccgccggcggagaccgaatccgccgcaccccataggcagaggccaccctccccgcctccccgcccgctgcgcgcccgccccgccccggctcactttaaaagtttactcgggccgggacgcagggcaaagcgagccatggctgtctacgtcgggatgctgcgcctggggaggctgtgcgccgggagctcgggggtgctgggggcccgggccgccctctctcggagttggcaggaagccaggttgcagggtgtccgcttcctcagttccagagaggtggatcgcatggtctccacgcccatcggaggcctcagctacgttcaggggtgcaccaaaaagcatcttaacagcaagactgtgggccagtgcctggagaccacagcacagagggtcccagaacgagaggccttggtcgtcctccatgaagacgtcaggttgacctttgcccaactcaaggaggaggtggacaaagctgcttctggcctcctgagcattggcctctgcaaaggtgaccggctgggcatgtggggacctaactcctatgcatgggtgctcatgcagttggccaccgcccaggcgggcatcattctwgtgtctgtgaacccagcctaccaggctatggaactggagtaygtcctcaagaaggtgggctgcaaggcccttgtgttccccaagcaattcaagacccagcaatactacaacgtcctgaagcagatctgtccagaagtggagaatgcccagccaggggccttgaagagtcagaggctcccagatctgaccacagtcatctcggtggatgcccctttgccggggaccctgctcctggatgaagtggtggcggctggcagcacacggcagcatctggaccagctccaatacaaccagcagttcctgtcctgccatgaccccatcaacatccagttcacctcggggacaacaggcagccccaagggggccaccctctcccactacaacattgtcaacaactccaacattttaggagagcgcctgaaactgcatgagaagacaccagagcagttgcggatgatcctgcccaaccccctgtaccattgcctgggttccrtggcaggcacaatgatgtgtctgatgtacggtgccaccctcatcctggcctctcccatcttcaatggcaagaaggcactggaggccatcagcagagagagaggcaccttcctgtatggtacccccacgatgttcgtggacattctgaaccagccagacttctccagttatgacatctcgaccatgtgtggaggtgtcattgctgggtcccctgcacctccagagttgatccgagccatcatcaacaagataaatatgaaggacctggtggttgcttatggaaccacagagaacagtcccgtgacattcgcgcacttccctgaggacactgtggagcagaaggcagaaagcgtgggcagaattatgcctcacacggaggcscggatcatgaacatggaggcagggacgctggcaaagctgaacacgcccggggagctgtgcatccgagggtactgcgtcatgctgggctactggggtgagcctcagaagacagaggaagcagtggatcaggacaagtggtattggacaggagatgtcgccacaatgaatgagcagggcttctgcaagatcgtgggccgctctaaggatatgatcatccggggtggtgagaacatctaccccgcagagctcgaggacttctttcacacacacccgaaggtgcaggaagtgcaggtggtgggagtgaaggacgatcggatgggggaagagatttgtgcctgcattcggctgaaggacggggaggagaccacggtggaggagataaaagctttctgcaaagggaagatctctcacttcaagattccgaagtacatcgtgtttgtcacaaactaccccctcaccatttcaggaaagatccagaaattcaaacttcgagagcagatggaacgacatctaaatctgtgaataaagcagcaggcctgtcctggccggttggcttgactctctcctgtcagaatgcaacctggctttatgcacctagatgtccccagcacccagttytgagccaggcacatcaaatgtcaaggaattgactgaacgaactaagagctcctggatgggtccgggaactcgcctgggcacaaggtgccaaaaggcaggcagcctgcccaggccctccctcctgtccatcccccacattcccctstctgtccttgtgatttggcataaagagcttctgttttctttggctt

SEQ ID NO: 5610 - DNA, 4135 bp, Homo sapiens
tgcagtcggggttcagccagagggggcgccgggcgtaccgacgtagcggggagaaacgggtcgcgctttaacggcgctgcgcaggcgccactcacgggccggacgtgacgcagggaaagttccggcttcggcctccgccgctgccgccgccgctgctacagccgccgccgccgctgttgccgcggcttgttattcttaaaatggcgccgctagacctggacaagtatgtggaaatagcgcggctgtgcaagtacctgccagagaacgacctgaagcggctatgtgactacgtttgtgacctcctcttagaagagtcaaatgttcagccagtatcaacaccagtaacagtgtgtggagatatccatggacagttttatgacctttgtgaactgttcagaactggaggtcaggttcctgacacaaactacatatttatgggtgattttgtagacagaggttactatagtttggagaccttcacttaccttcttgcattaaaggctaaatggcctgatcgtattacacttttgcgaggaaatcatgagagtagacagataacacaggtctatggattttatgatgagtgccaaaccaaatatggaaatgctaatgcctggagatactgtaccaaagtttttgacatgctcacagtagcagctttaatagatgagcagattttgtgtgtccatggtggtttatctcctgatatcaaaacactggatcaaattcgaacyatcgaacggaatcaggaaattcctcataaaggagcattttgtgatctggtttggtcagatcctgaagatgtggatacctgggctatcagtccccgaggagcaggttggctttttggagcaaaggtcacaaatgagtttgttcatatcaacaacttaaaactcatctgcagagcacatcaactagtgcacgaaggctataaatttatgtttgatgagaagctggtgacagtatggtctgctcctaattactgctatcgttgtggaaatattgcttcgatcatggtcttcaaagatgtaaatacaagagaaccaaagttattccgggcrgttccagattcagaacgtgttattcctcccagaacgacaacgccatatttcctttgaggccttcgcccatcctgctgacccatttttctgccctcttcttaccccaattttcttgtattaccctctacaatatactttttattgagcactttgctgctgaaatgctgcctcttgcctttttttttttaaattttaaattatctaaatttattgtttgttgtggtgtctatagcaaagtttttctatcaattttcccccatcccatccccaccctggactcatttgagaagacttgagaaatgtcttaatactcacactgctgcatgtagctcttgcttatttactggtctgggaaacaggatgtgtttcctttttttaaaagccaattgacagattacacctaaatactcctccttttgtatcattcagccttttgttttagtttggtaagttttaagaaatttcagcagcaaagttgttattcagtgggcacgatggactccaaatgcctcaagttatgtatacctgtcccagatgtaaacttcattgtcctttgttggatgatattttaaatggatataaaataaattggtctaaagggctgccctccttgttgtgtttttaaattttagttaaaaactgctacagcttatgactttgtactttaagataattgtattgatcttttttcagattccttgtattttttaataaagtaatcttaaataaaactcagataggttaagtgttagaaattttaaacagcttacattgttagcgtaaagttatcttttcttttttcctaatcagagttcttgaccctttggttattgagtttaaaacttcaattgaaattcaatagtatttatttttkaaaaaaatcactaaactgtgcctaaagaacataactgccatattaatgttttggtttatatcctctatagtaatagaaaaacatttaatacttgtaatgctgatgtgttaatttgataccagttgagtagaatgtgatcaatccagtttacaatctatcatgagtattattaactaaaatctatgtgcttttcaataggaatcattcttctcttgctgtaacacttgaccttaacttttagaaagtgttcatttttaaactgcaactggaaaggttgaaaagttaggactcttgtatttgtgaactgtaatctgaagcagattatttaaagtgtagaaaaagaaacaagttcttcttttttgcaaaggtctgtgataccatatttcagctttgtgtaagtaatttgaatatccaaagggttgtgatgatcagttctgaatatgcaactgtccacttaataaggacaagtattccagtatctcttatgactgtagtcataaatgatgttggaatgtacattttgtgaaatagttggtatccctttactatgattaatttttgttattccaggaaatacttgtgaagccagccaattaataaagcactttagcatctgttcaggtagttttgaaaaccmacttttccccttcaggataagaacttccaggttacctaaaaatgcaataaaaatctttatagtctaagcttcttggcatataatttttcatcagggttttcttttattaattgagcacaatactgttttgatttaatttttttccctcaaaccacccagctccttacatagtttttaattatatagctatmtgaaagaggtggctaagacatttgctgcacacacttgaactaatgttgggtcagtagcttcgtgttactgccctgatcccagtgtaattcaggtggaaaggtatttttatctcacagggatatgtagctatgtattttactaattgtgaaacactggaaattaatgatgcagacaacttggtgtggtctttgaacagctctctgcagtatttttttttttcctgttaccataaattgtatttaagtgcttgctttccacttaagttgtactaatagaaccggtaactcccagccctccctgtttgacactccttagcttagattgatgtagttgtttttgttatccctataatgtgacttttatttttaagtcattgtgtactgcatttgtttgtcactagttgggcacgtgccaataatattctctccattccttatctgccatctctgttttgcctgatttctcttcaactgaataatggctttttgcatggaaaaaatagtttttactattagacgtgtaaagggaagagagagctaatgtattggactttgtgagcctacaaggaatattttggatccctccaataaataagggctatgtactatatgtactatatagagttatcatgtggtggaagatacttgcaagtcatagatttatgggcaggaggatttgttactscctatatctaggctgaatgtaaaatcccttatgttgtatcaatgggggtaaaaactatttttatttgcctatgatatacttggtttctaataaagtgccctaggctctagtgagaactgtctactttgaattgccatttactccctttcctcctttggccgatatgctcttggctagctttttataagttaatgtgtttccccaaaaagtttcactactttatattcatttgagtgtgatcctaaaacacctggatcaacagtacatctcatatgcaatctgcatcagctcctattctgtctggatgtctagaactgttggaagattttgacgtcttaagccctaggttttgctttgggaaataaggtttgaaatattgttcattgcattaagatttgtgtgtgtgtgctttgtaagcccagaaccaggttttggaaaatgcctgtactgtgaaagcaaattaggactctttctgagcctctttcattgtcagaaatagaatcactttccatcagcttccaggaaattgtgtrtctggagtcgaagagatttracatcaagaatccagatttttaaatgtaattgttttttaaatgctaatgtttgtaaagcaccttcagttcttcggatgaaaggtgctatattccctcagtgtaaattaataaaaagrttacaggaagtttgtca

SEQ ID NO: 5611 - DNA, 4178 bp, Homo sapiens
tgcagtcggggttcagccagagggggcgccgggcgtaccgacgtagcggggagaaacgggtcgcgctttaacggcgctgcgcaggcgccactcacgggccggacgtgacgcagggaaagttccggcttcggcctccgccgctgccgccgccgctgctacagccgccgccgccgctgttgccgcggcttgttattcttaaaatggcgccgctagacctggacaagtatgtggaaatagcgcggctgtgcaagtacctgccagagaacgacctgaagcggctatgtgactacgtttgtgacctcctcttagaagagtcaaatgttcagccagtatcaacaccagtaacagtgtgtggagatatccatggacagttttatgacctttgtgaactgttcagaactggaggtcaggttcctgacacaaactacatatttatgggtgattttgtagacagaggttactatagtttggagaccttcacttaccttcttgcattaaaggctaaatggcctgatcgtattacacttttgcgaggaaatcatgagagtagacagataacacaggtctatggattttatgatgagtgccaaaccaaatatggaaatgctaatgcctggagatactgtaccaaagtttttgacatgctcacagtagcagctttaatagatgagcagattttgtgtgtccatggtggtttatctcctgatatcaaaacactggatcaaattcgaacyatcgaacggaatcaggaaattcctcataaaggagcattttgtgatctggtttggtcagatcctgaagatgtggatacctgggctatcagtccccgaggagcaggttggctttttggagcaaaggtcacaaatgagtttgttcatatcaacaacttaaaactcatctgcagagcacatcaactagtgcacgaaggctataaatttatgtttgatgagaagctggtgacagtatggtctgctcctaattactgctatcgttgtggaaatattgcttcgatcatggtcttcaaagatgtaaatacaagagaaccaaagttattccgggcrgttccagattcagaacgtgttattcctcccagaacgacaacgccatatttcctttgaggccttcgcccatcctgctgacccatttttctgccctcttcttaccccaattttcttgtattaccctctacaatatactttttattgagcactttgctgctgaaatgctgcctcttgcctttttttttttaaattttaaattatctaaatttattgtttgttgtggtgtctatagcaaagtttttctatcaattttcccccatcccatccccaccctggactcatttgagaagacttgagaaatgtcttaatactcacactgctgcatgtagctcttgcttatttactggtctgggaaacaggatgtgtttcctttttttaaaagccaattgacagattacacctaaatactcctccttttgtatcattcagccttttgttttagtttggtaagttttaagaaatttcagcagcaaagttgttattcagtgggcacgatggactccaaatgcctcaagttatgtatacctgtcccagatgtaaacttcattgtcctttgttggatgatattttaaatggatataaaataaattggtctaaagggctgccctccttgttgtgtttttaaattttagttaaaaactgctacagcttatgactttgtactttaagataattgtattgatcttttttcagattccttgtattttttaataaagtaatcttaaataaaactcagataggttaagtgttagaaattttaaacagcttacattgttagcgtaaagttatcttttcttttttcctaatcagagttcttgaccctttggttattgagtttaaaacttcaattgaaattcaatagtatttatttttkaaaaaaatcactaaactgtgcctaaagaacataactgccatattaatgttttggtttatatcctctatagtaatagaaaaacatttaatacttgtaatgctgatgtgttaatttgataccagttgagtagaatgtgatcaatccagtttacaatctatcatgagtattattaactaaaatctatgtgcttttcaataggaatcattcttctcttgctgtaacacttgaccttaacttttagaaagtgttcatttttaaactgcaactggaaaggttgaaaagttaggactcttgtatttgtgaactgtaatctgaagcagattatttaaagtgtagaaaaagaaacaagttcttcttttttgcaaaggtctgtgataccatatttcagctttgtgtaagtaatttgaatatccaaagggttgtgatgatcagttctgaatatgcaactgtccacttaataaggacaagtattccagtatctcttatgactgtagtcataaatgatgttggaatgtacattttgtgaaatagttggtatccctttactatgattaatttttgttattccaggaaatacttgtgaagccagccaattaataaagcactttagcatctgttcaggtagttttgaaaaccmacttttccccttcaggataagaacttccaggttacctaaaaatgcaataaaaatctttatagtctaagcttcttggcatataatttttcatcagggttttcttttattaattgagcacaatactgttttgatttaatttttttccctcaaaccacccagctccttacatagtttttaattatatagctatmtgaaagaggtggctaagacatttgctgcacacacttgaactaatgttgggtcagtagcttcgtgttactgccctgatcccagtgtaattcaggtggaaaggtatttttatctcacagggatatgtagctatgtattttactaattgtgaaacactggaaattaatgatgcagacaacttggtgtggtctttgaacagctctctgcagtatttttttttttcctgttaccataaattgtatttaagtgcttgctttccacttaagttgtactaatagaaccggtaactcccagccctccctgtttgacactccttagcttagattgatgtagttgtttttgttatccctataatgtgacttttatttttaagtcattgtgtactgcatttgtttgtcactagttgggcacgtgccaataatattctctccattccttatctgccatctctgttttgcctgatttctcttcaactgaataatggctttttgcatggaaaaaatagtttttactattagacgtgtaaagggaagagagagctaatgtattggactttgtgagcctacaaggaatattttggatccctccaataaataagggctatgtactatatgtactatatagagttatcatgtggtggaagatacttgcaagtcatagatttatgggcaggaggatttgttactscctatatctaggctgaatgtaaaatcccttatgttgtatcaatgggggtaaaaactatttttatttgcctatgatatacttggtttctaataaagtgccctaggctctagtgagaactgtctactttgaattgccatttactccctttcctcctttggccgatatgctcttggctagctttttataagttaatgtgtttccccaaaaagtttcactactttatattcatttgagtgtgatcctaaaacacctggatcaacagtacatctcatatgcaatctgcatcagctcctattctgtctggatgtctagaactgttggaagattttgacgtcttaagccctaggttttgctttgggaaataaggtttgaaatattgttcattgcattaagatttgtgtgtgtgtgctttgtaagcccagaaccaggttttggaaaatgcctgtactgtgaaagcaaattaggactctttctgagcctctttcattgtcagaaatagaatcactttccatcagcttccaggaaattgtgtrtctggagtcgaagagatttracatcaagaatccagatttttaaatgtaattgttttttaaatgtgctatattccctcagtgtaaattaataaaaagrttacaggaagtttgtcaaaaaattcaatgcatagtctgtagtatgtcctgacaagaagttagcattttatataagaaattaaaaaatgcttattcctcca

SEQ ID NO: 5612 - DNA, 4745 bp, Homo sapiens
gactgggagcaggcagcccgggcggagcgggccggtgccgaggacggccccaggcattgctctgccccgggcattgcgcggcgcgcgtgagggggatgcggcaggaggcggcgcggcgggaggagtaggcggcggcgccctcgggagggagctgcgcgcgggccagacggcgcccggaggctccgcagtgccgccgccgtcgcccgggaggctccgcgcgggagccatgtaaccctgcggcgggctccgggctgctccgtccttccccagctcccgggctagcgcggcagcggggccacgatgaagaagcagttcaatcgcatgcgccagctggccaaccagacggtgggcagggctgaaaagacagaagttttgagtgaagaccttcttcaggtggagaagcgtctggagctggtgaaacaggtgtcccacagcacscacaagaagctcaccgcatgtctgcagggccagcaaggggcagaggctgacaagcgctccaaaaagttgcctttgacaacactggctcagtgtctgatggaggggtcagctatcctgggagatgacacacttcttgggaagatgctgaaactctgtggagagacggaggacaagctggctcaggagctgatacattttgagttgcaagtagagagagacgtgattgagcccctgtttttgctggcggaggtggaaatcccaaatattcaaaagcagaggaaacacttagccaagttggtgctggacatggattcctcacgaaccaggtggcagcagacttccaagtcttcaggtttgtccagcagcttacagcctgcgggtgccaaggctgatgccctcagggaagaaatggaagaggctgccaacagagtggagatttgcagggaccagctctcagctgatatgtacagttttgtggccaaagaaattgactatgcaaactactttcaaacgctaatagaagtgcaagctgaataccacaggaagtccctgacactattgcaggctgtattgcctcagatcaaagcacaacaggaggcctgggtagagaagccttccttcgggaagccgctggaggagcacctcaccatcagcggccgggagatcgccttccccatcgaggcgtgtgtgaccatgctgcttgagtgtgggatgcaggaggagggrctcttccgagtagccccctctgcctccaaactgaagaagctgaaagcggccctggactgctgcgtggtggatgtgcaggagtactcggcagacccccacgcaattgcaggagctttgaaatcttacctccgagagttgccagaacctcttatgacctttgaactctatgatgagtggatccaggcttccaatgtccaggagcaagacaagaagcttcaggctctatggaatgcttgtgaaaagttgcccaaggccaatcacaacaacatccgatacttgataaaatttttatccaagctgtcagaatatcaagatgtaaacaagatgactcccagtaatatggcaattgttttaggacccaacctcctatggccacargcagaagggaacattacagagatgatgaccacagtgtcgctgcaaattgttgggatcattgaacctatcatccagcatgcagactggttcttccctggggagatagagttcaacattactggcaattatgggagtccagtacacrtgaaccataatgccaactacagctcaatgccctccccagacatggaccctgctgaccggcgccagcccgagcaggcccgccggcccctcagygtcgccacggataatatgatgctggagttttacaaaaaggatggcatgggtgtgagggtcatggacacaaactgggtggctcgaagaggctcctcggccggtcggaaagtgtcctgcgccccgccctccatgcagcctcccgccccgcccgccgagctggctgcgcccytgccttcgccgctgccggagcagcccctggacagccccgcggcccccgcgctctctccatccggcctgggcctccagcctgggcccgagcgcaccagcacaacaaaaagcaaggaactttctccaggctctgcacagaaaggaagtccaggctccagccagggcacagcctgtgcagggactcaaccaggggctcaacctggagctcagccgggcgccagccccagccccagccagccgcctgcagaccagagtcctcacaccctccggaaagtttcaaagaagctggcaccgattccacccaaggtcccctttggccagccgggggctatggcagaccagtccgctggccagccgtccccagtcagcctgtcccccaccccgcccagcaccccgtcaccctatggactgagctaccctcaggggtactccttggcctcgggccagctctccccagctgcagctcctcccctggcctctccytctgtctttacaagcactttgagcaaatcgcggcccactcctaagccgcgacagagacctactctgccgcctcctcagcctcccacagtaaacctctcggcctctagtccacagtccacggaggcccccatgctagatggcatgtcccctggggaaagcatgtctacagctgtgtgacatgagtggcgcagttttggatacgtgtgagggggattttcaggatcttgtccactttgatattccctcgatccacatagagctcgggtcgacgctccgcctgagtcccctggagcacatgcggcgacactcagtaactgacaagagggactcggaggaggagtctgagagcaccgccctctgacatgacaccgcccatcctgcctcgcgtgtacatacatcacgggccctaggaacgccgccaggagcagcgtccatgagcttgccaagtgttctctgctggctctttcctgccactgccaacacgaggttggaatttggcagaaaattgtgatctccagtccgtgtggtgatgctggtggtgcaggttttgtttgttcctttcgggtggtgacttcggccttttgtttgacctttgccttttgactttgtgcctcttttgatccactttcagcctccatgccarrmaacacccacctctccatccaaggctggtcaggaacgtcctttgcagggtcggggtggtgcgggagaggctcactttgcctggttagacccaagggctgctaccttttccttggacggctcatgtcaggtcttgcaggatcagtttaatggccacagaaaggaagcaggacagcagggcccctctcacccacaactggaccaggtccaggattctagcagtcctggggcactgacctttgccagctacctgggggagggcttgccactggaaaacctttcaggccgcccccatcagtgggctccaaagtaaatggctgaaaacaaaaatgtttcacttcctaacagttttcctttttccactgtgtgactgaaagctcctatatcattttatatttctgaatctataaaacaaaacaaacaagcctgamagtgtctggaggagccaaaggtggcctccctgtccccaaatatattggctatatgagagtaattttacccctctacgtacctaaaggcacccagttcactagtctgtggggtcctggagcctgtctcttctttctggaggttcaaactgaatagcaataattacgttacccaaagcatgtggaggaaaagtgaaaccagccacggagacgctggcccacgggctcggcctgcggtgtggcctgctttgctcaccagcgtcagccgctcatttccttctcatgaagtcccatctggtcatggggacgagggccgggagggcaccgggtagccttttcacacttggggattaggggagtgagaaaagatttgggccatgcatgcaaagtcaaagtttaaaattttatccttttcaaatagatgatataatatacctatacatgatataatatttgtatatatgaaatctctctatatttgtttaatttgagccattcaatctmaaccaatgtacaggtgtacaatgaaaaatttaaatgcttagttatttttcccaacacagtgtaaagtcaccctcctctgagagtgggatgtgcagagttttgatgttgcagctttgctcacttcctggcargggcaggtcatgcctcaatttgtaatgggagtctggggtaagggtgggggttgaaagttgttatctytaaatacatgtacaaatcgttgtcaaaagtaacgttattaaaatagatttattatccctgagcttggcatctgttcttgctttaataaacctgcggggacatggccgtcaatctcaaatgcacaccgggatggagcctgaaggtcaccacctgtgtaaagccaggtccctggctgatctctcgcttgcttgtcttttgagtttttaaagctcttctttttacattctcctgggtagggaatatacayaataaatactagattcaacttacttacttacttacttactttacttacttacttccttggaaaatgctctccatttgtcgagcactaatccacgtctgtaaatcccgcaaggaggacaatggaaaccagccccgtgtgccatttctcaaaaccttcgagggcaaagtgatcctcactcctctcagtatggaagcaacaacacagcaaatctattgtctccacttttacccagaaccaccagaagacttgcatttccctgaccaatgacaccagcccagccaggctctcactgattg

SEQ ID NO: 5613 - DNA, 4711 bp, Homo sapiens
gactgggagcaggcagcccgggcggagcgggccggtgccgaggacggccccaggcattgctctgccccgggcattgcgcggcgcgcgtgagggggatgcggcaggaggcggcgcggcgggaggagtaggcggcggcgccctcgggagggagctgcgcgcgggccagacggcgcccggaggctccgcagtgccgccgccgtcgcccgggaggctccgcgcgggagccatgtaaccctgcggcgggctccgggctgctccgtccttccccagctcccgggctagcgcggcagcggggccacgatgaagaagcagttcaatcgcatgcgccagctggccaaccagacggtgggcagggctgaaaagacagaagttttgagtgaagaccttcttcaggtggagaagcgtctggagctggtgaaacaggtgtcccacagcacscacaagaagctcaccgcatgtctgcagggccagcaaggggcagaggctgacaagcgctccaaaaagttgcctttgacaacactggctcagtgtctgatggaggggtcagctatcctgggagatgacacacttcttgggaagatgctgaaactctgtggagagacggaggacaagctggctcaggagctgatacattttgagttgcaagtagagagagacgtgattgagcccctgtttttgctggcggaggtggaaatcccaaatattcaaaagcagaggaaacacttagccaagttggtgctggacatggattcctcacgaaccaggtggcagcagacttccaagtcttcaggtttgtccagcagcttacagcctgcgggtgccaaggctgatgccctcagggaagaaatggaagaggctgccaacagagtggagatttgcagggaccagctctcagctgatatgtacagttttgtggccaaagaaattgactatgcaaactactttcaaacgctaatagaagtgcaagctgaataccacaggaagtccctgacactattgcaggctgtattgcctcagatcaaagcacaacaggaggcctgggtagagaagccttccttcgggaagccgctggaggagcacctcaccatcagcggccgggagatcgccttccccatcgaggcgtgtgtgaccatgctgcttgagtgtgggatgcaggaggagggrctcttccgagtagccccctctgcctccaaactgaagaagctgaaagcggccctggactgctgcgtggtggatgtgcaggagtactcggcagacccccacgcaattgcaggagctttgaaatcttacctccgagagttgccagaacctcttatgacctttgaactctatgatgagtggatccaggcttccaatgtccaggagcaagacaagaagcttcaggctctatggaatgcttgtgaaaagttgcccaaggccaatcacaacaacatccgatacttgataaaatttttatccaagctgtcagaatatcaagatgtaaacaagatgactcccagtaatatggcaattgttttaggacccaacctcctatggccacargcagaagggaacattacagagatgatgaccacagtgtcgctgcaaattgttgggatcattgaacctatcatccagcatgcagactggttcttccctggggagatagagttcaacattactggcaattatgggagtccagtacacrtgaaccataatgccaactacagctcaatgccctccccagacatggaccctgctgaccggcgccagcccgagcaggcccgccggcccctcagygtcgccacggataatatgatgctggagttttacaaaaaggatgggtatgaactgctcgccagcatgggtgtgagggtcatggacacaaactgggtggctcgaagaggctcctcggccggtcggaaagtgtcctgcgccccgccctccatgcagcctcccgccccgcccgccgagctggctgcgcccytgccttcgccgctgccggagcagcccctggacagccccgcggcccccgcgctctctccatccggcctgggcctccagcctgggcccgagcgcaccagcacaacaaaaagcaaggaactttctccaggctctgcacagaaaggaagtccaggctccagccagggcacagcctgtgcagggactcaaccaggggctcaacctggagctcagccgggcgccagccccagccccagccagccgcctgcagaccagagtcctcacaccctccggaaagtttcaaagaagctggcaccgattccacccaaggtcccctttggccagccgggggctatggcagaccagtccgctggccagccgtccccagtcagcctgtcccccaccccgcccagcaccccgtcaccctatggactgagctaccctcaggggtactccttggcctcgggccagctctccccagctgcagctcctcccctggcctctccytctgtctttacaagcactttgagcaaatcgcggcccactcctaagccgcgacagagacctactctgccgcctcctcagcctcccacagtaaacctctcggcctctagtccacagtccacggaggcccccatgctagatggcatgtcccctggggaaagcatgtctacagatcttgtccactttgatattccctcgatccacatagagctcgggtcgacgctccgcctgagtcccctggagcacatgcggcgacactcagtaactgacaagagggactcggaggaggagtctgagagcaccgccctctgacatgacaccgcccatcctgcctcgcgtgtacatacatcacgggccctaggaacgccgccaggagcagcgtccatgagcttgccaagtgttctctgctggctctttcctgccactgccaacacgaggttggaatttggcagaaaattgtgatctccagtccgtgtggtgatgctggtggtgcaggttttgtttgttcctttcgggtggtgacttcggccttttgtttgacctttgccttttgactttgtgcctcttttgatccactttcagcctccatgccarrmaacacccacctctccatccaaggctggtcaggaacgtcctttgcagggtcggggtggtgcgggagaggctcactttgcctggttagacccaagggctgctaccttttccttggacggctcatgtcaggtcttgcaggatcagtttaatggccacagaaaggaagcaggacagcagggcccctctcacccacaactggaccaggtccaggattctagcagtcctggggcactgacctttgccagctacctgggggagggcttgccactggaaaacctttcaggccgcccccatcagtgggctccaaagtaaatggctgaaaacaaaaatgtttcacttcctaacagttttcctttttccactgtgtgactgaaagctcctatatcattttatatttctgaatctataaaacaaaacaaacaagcctgamagtgtctggaggagccaaaggtggcctccctgtccccaaatatattggctatatgagagtaattttacccctctacgtacctaaaggcacccagttcactagtctgtggggtcctggagcctgtctcttctttctggaggttcaaactgaatagcaataattacgttacccaaagcatgtggaggaaaagtgaaaccagccacggagacgctggcccacgggctcggcctgcggtgtggcctgctttgctcaccagcgtcagccgctcatttccttctcatgaagtcccatctggtcatggggacgagggccgggagggcaccgggtagccttttcacacttggggattaggggagtgagaaaagatttgggccatgcatgcaaagtcaaagtttaaaattttatccttttcaaatagatgatataatatacctatacatgatataatatttgtatatatgaaatctctctatatttgtttaatttgagccattcaatctmaaccaatgtacaggtgtacaatgaaaaatttaaatgcttagttatttttcccaacacagtgtaaagtcaccctcctctgagagtgggatgtgcagagttttgatgttgcagctttgctcacttcctggcargggcaggtcatgcctcaatttgtaatgggagtctggggtaagggtgggggttgaaagttgttatctytaaatacatgtacaaatcgttgtcaaaagtaacgttattaaaatagatttattatccctgagcttggcatctgttcttgctttaataaacctgcggggacatggccgtcaatctcaaatgcacaccgggatggagcctgaaggtcaccacctgtgtaaagccaggtccctggctgatctctcgcttgcttgtcttttgagtttttaaagctcttctttttacattctcctgggtagggaatatacayaataaatactagattcaacttacttacttacttacttactttacttacttacttccttggaaaatgctctccatttgtcgagcactaatccacgtctgtaaatcccgcaaggaggacaatggaaaccagccccgtgtgccatttctcaaaaccttcgagggcaaagtgatcctcactcctctcagtatggaagcaacaacacagcaaatctattgtctccacttttacccagaaccaccagaagacttgcatttccctgaccaatgacaccagcccagccaggctctcactgattg

SEQ ID NO: 5614 - DNA, 4703 bp, Homo sapiens
gactgggagcaggcagcccgggcggagcgggccggtgccgaggacggccccaggcattgctctgccccgggcattgcgcggcgcgcgtgagggggatgcggcaggaggcggcgcggcgggaggagtaggcggcggcgccctcgggagggagctgcgcgcgggccagacggcgcccggaggctccgcagtgccgccgccgtcgcccgggaggctccgcgcgggagccatgtaaccctgcggcgggctccgggctgctccgtccttccccagctcccgggctagcgcggcagcggggccacgatgaagaagcagttcaatcgcatgcgccagctggccaaccagacggtgggcagggctgaaaagacagaagttttgagtgaagaccttcttcaggtggagaagcgtctggagctggtgaaacaggtgtcccacagcacscacaagaagctcaccgcatgtctgcagggccagcaaggggcagaggctgacaagcgctccaaaaagttgcctttgacaacactggctcagtgtctgatggaggggtcagctatcctgggagatgacacacttcttgggaagatgctgaaactctgtggagagacggaggacaagctggctcaggagctgatacattttgagttgcaagtagagagagacgtgattgagcccctgtttttgctggcggaggtggaaatcccaaatattcaaaagcagaggaaacacttagccaagttggtgctggacatggattcctcacgaaccaggtggcagcagacttccaagtcttcaggtttgtccagcagcttacagcctgcgggtgccaaggctgatgccctcagggaagaaatggaagaggctgccaacagagtggagatttgcagggaccagctctcagctgatatgtacagttttgtggccaaagaaattgactatgcaaactactttcaaacgctaatagaagtgcaagctgaataccacaggaagtccctgacactattgcaggctgtattgcctcagatcaaagcacaacaggaggcctgggtagagaagccttccttcgggaagccgctggaggagcacctcaccatcagcggccgggagatcgccttccccatcgaggcgtgtgtgaccatgctgcttgagtgtgggatgcaggaggagggrctcttccgagtagccccctctgcctccaaactgaagaagctgaaagcggccctggactgctgcgtggtggatgtgcaggagtactcggcagacccccacgcaattgcaggagctttgaaatcttacctccgagagttgccagaacctcttatgacctttgaactctatgatgagtggatccaggcttccaatgtccaggagcaagacaagaagcttcaggctctatggaatgcttgtgaaaagttgcccaaggccaatcacaacaacatccgatacttgataaaatttttatccaagctgtcagaatatcaagatgtaaacaagatgactcccagtaatatggcaattgttttaggacccaacctcctatggccacargcagaagggaacattacagagatgatgaccacagtgtcgctgcaaattgttgggatcattgaacctatcatccagcatgcagactggttcttccctggggagatagagttcaacattactggcaattatgggagtccagtacacrtgaaccataatgccaactacagctcaatgccctccccagacatggaccctgctgaccggcgccagcccgagcaggcccgccggcccctcagygtcgccacggataatatgatgctggagttttacaaaaaggatgggtatgaactgcatgggtgtgagggtcatggacacaaactgggtggctcgaagaggctcctcggccggtcggaaagtgtcctgcgccccgccctccatgcagcctcccgccccgcccgccgagctggctgcgcccytgccttcgccgctgccggagcagcccctggacagccccgcggcccccgcgctctctccatccggcctgggcctccagcctgggcccgagcgcaccagcacaacaaaaagcaaggaactttctccaggctctgcacagaaaggaagtccaggctccagccagggcacagcctgtgcagggactcaaccaggggctcaacctggagctcagccgggcgccagccccagccccagccagccgcctgcagaccagagtcctcacaccctccggaaagtttcaaagaagctggcaccgattccacccaaggtcccctttggccagccgggggctatggcagaccagtccgctggccagccgtccccagtcagcctgtcccccaccccgcccagcaccccgtcaccctatggactgagctaccctcaggggtactccttggcctcgggccagctctccccagctgcagctcctcccctggcctctccytctgtctttacaagcactttgagcaaatcgcggcccactcctaagccgcgacagagacctactctgccgcctcctcagcctcccacagtaaacctctcggcctctagtccacagtccacggaggcccccatgctagatggcatgtcccctggggaaagcatgtctacagatcttgtccactttgatattccctcgatccacatagagctcgggtcgacgctccgcctgagtcccctggagcacatgcggcgacactcagtaactgacaagagggactcggaggaggagtctgagagcaccgccctctgacatgacaccgcccatcctgcctcgcgtgtacatacatcacgggccctaggaacgccgccaggagcagcgtccatgagcttgccaagtgttctctgctggctctttcctgccactgccaacacgaggttggaatttggcagaaaattgtgatctccagtccgtgtggtgatgctggtggtgcaggttttgtttgttcctttcgggtggtgacttcggccttttgtttgacctttgccttttgactttgtgcctcttttgatccactttcagcctccatgccarrmaacacccacctctccatccaaggctggtcaggaacgtcctttgcagggtcggggtggtgcgggagaggctcactttgcctggttagacccaagggctgctaccttttccttggacggctcatgtcaggtcttgcaggatcagtttaatggccacagaaaggaagcaggacagcagggcccctctcacccacaactggaccaggtccaggattctagcagtcctggggcactgacctttgccagctacctgggggagggcttgccactggaaaacctttcaggccgcccccatcagtgggctccaaagtaaatggctgaaaacaaaaatgtttcacttcctaacagttttcctttttccactgtgtgactgaaagctcctatatcattttatatttctgaatctataaaacaaaacaaacaagcctgamagtgtctggaggagccaaaggtggcctccctgtccccaaatatattggctatatgagagtaattttacccctctacgtacctaaaggcacccagttcactagtctgtggggtcctggagcctgtctcttctttctggaggttcaaactgaatagcaataattacgttacccaaagcatgtggaggaaaagtgaaaccagccacggagacgctggcccacgggctcggcctgcggtgtggcctgctttgctcaccagcgtcagccgctcatttccttctcatgaagtcccatctggtcatggggacgagggccgggagggcaccgggtagccttttcacacttggggattaggggagtgagaaaagatttgggccatgcatgcaaagtcaaagtttaaaattttatccttttcaaatagatgatataatatacctatacatgatataatatttgtatatatgaaatctctctatatttgtttaatttgagccattcaatctmaaccaatgtacaggtgtacaatgaaaaatttaaatgcttagttatttttcccaacacagtgtaaagtcaccctcctctgagagtgggatgtgcagagttttgatgttgcagctttgctcacttcctggcargggcaggtcatgcctcaatttgtaatgggagtctggggtaagggtgggggttgaaagttgttatctytaaatacatgtacaaatcgttgtcaaaagtaacgttattaaaatagatttattatccctgagcttggcatctgttcttgctttaataaacctgcggggacatggccgtcaatctcaaatgcacaccgggatggagcctgaaggtcaccacctgtgtaaagccaggtccctggctgatctctcgcttgcttgtcttttgagtttttaaagctcttctttttacattctcctgggtagggaatatacayaataaatactagattcaacttacttacttacttacttactttacttacttacttccttggaaaatgctctccatttgtcgagcactaatccacgtctgtaaatcccgcaaggaggacaatggaaaccagccccgtgtgccatttctcaaaaccttcgagggcaaagtgatcctcactcctctcagtatggaagcaacaacacagcaaatctattgtctccacttttacccagaaccaccagaagacttgcatttccctgaccaatgacaccagcccagccaggctctcactgattg

SEQ ID NO: 5615 - DNA, 3743 bp, Homo sapiens
ggatcsgccatgcggagcggctaggtggtgcacgggaaacgcgggcgtaggtgaccggcggctttctcagttttggtggagacgggcgcatgtgggcgctttgctcgctgctgcggtccgcggccggacgcaccatgtcgcagggacgcaccatatcgcaggcacccgcccgccgcgagcggccgcgcaaggacccgctgcggcacctgcgcacgcgagagaagcgcggaccgtcggggtgctycggcggcccaaacaccgtktacctgcaggtggtggcagcgggtagccgggactcgggcgccgcgctctacgtcttctccgagttcaaccggtatctcttcaactgtggagaaggcgttcagagactcatgcaggagcacaagttaaaggttgctcgcctggacaacatattcctgacacgaatgcactggtctaatgttgggggcttaagtggaatgattcttactttaaaggaaaccgggcttccaaagtgtgtactttctggacctccacaactggaaaaatacctcgaagcaatcaaaatattttctggtccattgaaaggaatagaactggctgtgcggccccactctgccccagaatacgaggatgaaaccatgacagtttaccagatccccatacacagtgaacagaggaggggaaagcaccaaccatggcagagtccagaaaggcctctcagcaggctcagtccagagcratcttcagactccgagtygaatgaaaatgagccacaccttccacatggtgttagccagagaagaggggtcagggactcttccctggtcgtagctttcatctgtaagcttcacttaaagagaggaaacttcttggtgctcaaagcaaaggagatgggcctcccagttgggacagctgccatcgctcccatcattgctgctgtcaaggacgggaaaagcatcactcatgaaggaagagagattttggctgaagagctgtgtactcctccagatcctggtgctgcttttgtggtggtagaatgtccagatgaaagcttcattcaacccatctgtgagaatgccacctttcagaggtaccaaggaaaggcagatgcccccgtggccttggtggttcacatggccccagcatctgtgcttgtggacagcaggtaccagcagtggatggagaggtttgggcctgacacccagcacttggtcctgaatgagaactgtgcctcagttcacaaccttcgcagccacaagattcaaacccagctcaacctcatccacccggacatcttccccctgctcaccagtttccgctgtaagaaggagggccccaccctcagtgtgcccatggttcagggtgaatgcctcctcaagtaccagctccgtcccaggagggagtggcagaggratgccattattacttgcaatcctgaggaattcatagttgaggcgctgcagcttcccaacttccagcagagcgtgcaggagtacaggaggagtgcgcaggacggcccagccccagcagagaaaagaagtcagtacccagaaatcatcttccttggaacagggtctgccatcccgatgaagattcgaaatgtcagtgccacacttgtcaacataagccccgacacgtctctgctactggactgtggtgagggcacrtttgggcagctgtgccgtcattacggagaccaggtggacagggtcctgggcaccctggctrctgtgtttgtgtcccacctgcacgcagatcaccacacgggcttgccaagtatcttgctgcagagagaacgcgccttggcatctttgggaaagccgcttcaccctttgctggtggttgcccccaaccagctcaaagcctggctccagcagtaccacaaccagtgccaggaggtcctgcaccacatcagtatgattcctgccaaatgccttcaggaaggggctgagatctccagtcctgcagtggaaagattgatcagttcgctgttgcgaacrtgtgatttggaagagtttcagacctgtctggtgcggcactgcaagcatgcgtttggctgtgcgctggtgcacacctctggctggaaagtggtctattccggggacaccatgccctgcgaggctctggtccggatggggaaagatgccaccctcctgatacatgaagccaccctggaagatggtttggaagaggaagcagtggaaaagacacacagcacaacgtcccaagccatcagygtggggatgcggatgaacgcggagttcattatgctgaaccacttcagccagcgctatgccaaggtccccctcttcagccccaacttcagcgagaaagtgggagttgcctttgaccacatgaaggtctgctttggagactttccaacaatgcccaagctgattcccccactgaaagccctgtttgctggcgacatcgaggagatggaggagcrcagggagaagcgggagctgcggcaggtgcgggcggccctcctgtccagggagctggcaggcggcctggaggatsgggagcctcagcagaagcgggcccacacagaggagccacaggccaagaaggtcagagcccagtgaagatctgggagaccctgaactcagaaggctgtgtgtcttctgccccacgcacgcacccgtrtctgccctccttgctggtagaagctgaagagcacggtcccccaggaggcagctcaggataggtggtatggagctgtgccgaggcttgggstcccacataagcactagtctatagatgcctcttaggactggtgcctggcacagcygcgggccaggaggctgccacacggaagcaagcagatgaactaatttcatttcaaggcagtttttaaagaagtcwtggaaacagacggcggcacctttcctctaatccagcaaartgattccctgcacaccagagacaagcagagtaacaggatcagtgggtytaagtgtccgagacttaacgaaaatagtatttcagctgcaataaagattgagtttgcaattgtgagttcttttgcttcctcctgcacagakcagggtctgctgtgcaccaccttggagaaggctctctgtgctgtagtgtggcagctgcctggtacccgggtggcttggaagaagtcagctcccgtcgtagtgagcacctctggaacctgtcctcagagagccacccttattcgccaagtctttttgacaactcgagctgtgccagctcacagcagggcgtgctttctcwmtcaatcaatcaatcaatcaatcaaatcaatcagtgagagcctggctgggctggtgtcattggtcagggaaatgcaagtcttctggtggttctgggtaaaagtggagacaatagatttgctgtgttgttgcttccatactgagaggagtgaggatcactttgccctcgaaggttttgagaaatggcacacggggctggtttccattgtcctccttgcgggatttacagacgtggattagtgctcgacaaatggagagcattttccaaggaagtaagtaagtaaagtaagtaagtaagtaagtaagttgaatctagtatttattrtgtatattccctacccaggagaatgtaaaaagaagagctttaaaaactcaaaagacaagcaagcgagagatcagccagggacctggctttacacaggtggtgaccttcaggctccatcccggtgtgcatttgagattgacggccatgtccccgcaggtttattaaagcaagaacagatgccaagctcaggg

SEQ ID NO: 5616 - DNA, 4075 bp, Homo sapiens
ttcrtgggtttgcggacccaccagcgaaggcgggaggtgtcgcagggacatcttctggctgtttccgtcgcctgcgtggcccttgcaccccggtcttccattagcggcgcagacgtttgggcctaagcgctgggcgaggcgaggccctgcccctccccgccaacggccattctctggaccygtctttcttccgggaggcggtgacagctgctgagacgtgttscagccagagtctctccgctttaatgcgctcccattagtgccgtcccccactggaaaaccgtggcttctgtattatttgccatctttgttgtgtaggagcagggagggcttcctcccggggtcctargyggcggtgcagtccgtcgtagaagaattagagtagaagttgtcggggtccgctcttaggacgcagccgcctcatgggggtccaggggctctggaagctgctggagtgctccgggcggcaggtcagccycgaagcgctggaagggaagatcctggctgttgatattagcatttggttaaaccaagcacttaaaggagtccgggatcgccaygggaactcaatagaaaatcctcatcttctcactttgtttcatcggctctgcaaactcttattttttcgaattcgtcctatttttgtgtttgatggggatgctccactattgaagaaacagactttggtgaagagaaggcagagaaaggacttagcgtccagtgactccaggaaaacgacagagaagcttctgaaaacatttttgaaaagacaagccatcaaaactgccttcagaagcaaaagagatgaagcactacccagtcttacccaagttcgaagagaaaacgacctstatgttttgcctcctttacaagaggaagaaaaacacagttcagaagaggaagatgaaaaagaatggcaagaaagaatgaatcaaaaacaagcattacaggaagagttctttcataatcctcaagcgatagatattgagtctgaggacttcagcagcctgccccctgaagtaaagcatgaaatcttgactgatatgaaagagttcaccaagcgcagaagaacattatttgaagcaatgccagaggagtctgatgacttttcacagtaccaactcaaaggcttgcttaaaaagaactatctgaaccagcatatagaacatgtccaaaaggaartgaatcrgcaacattcaggacacatcygaaggcagtatgaagatgaagggggctttctgaaggaggtagagtcaaggagagtggtctctgaagacacttcacattacatcttgataaaaggtattcaagctaagacagttgcagaagtggattcagagtctcttccttcttscagcaaaatgcayggcatgtcttttgaygtgaagtcatctccatgtgaaaaactgaagacagagaaagagcctgatgctacccctccttctccaagaactttactagctatgcaagctgccctgctgggaagtagctcagaagaggagctggagagtgaaaatcgaaggcaggcccgtgggaggaacgcacctgctgctgtagacgaaggctccatatcaccccggactctttcagccattaagagagctcttgacgatgacgaagatgtaaaagtgtgtgctggggatgatgtgcagaygggagggccaggagcagaagaaatgcgtataaacagctccaccgagaacagtgatgaaggacttaaagtgagagatggaaaaggaataccgtttactgcaacacttgcgtcatctagtgtgaactctgcagaggagcacgtagccagcactaatgaggggagagagcccacagactcagttccaaaagaacaaatgtcacttgttcaygtggggactgaagcctttccgataagtgatgagtctatgattaaggacagaaaagatcggctgcctctggagagtgcagtggttagacatagtgacgcacctgggctcccgaatggaagggaactgacaccggcatctccaacttstacaaattctgtgtcaaagaatgaaacacatgctgaagtgcttgagcagcagaacgaactttgcccatatgagagtaaattcgattcttctcttctttcaagtgatgatgaaacaaaatgtaaaccgaattctgcttctgaagtcattggccctgtcagtttgcaagaaacaagtagcatagtaagtgtcccttcagaggcagtagataatgtggaaaatgtggtgtcatttaatgctaaagagcatgagaattttctggaaaccatccaagaacagcagaccactgaatctgcaggccaggatttaatttccattccaaaggccgtggaaccaatggaaattgactcggaagaaagtgaatctgatggaagtttcattgaagtgcaaagtgtgattagtgatgaggaacttcaagcagaattmcctgaaacttccaaacctccctcagaacaaggcgaagaggaactggtaggaactagggagggagaagcccctgctgagtccgagagcctmctgagggacaactctgagagggacgacgtggatggtgagccacaggaagctgagaaagatgcggaagattcgctccatgaatggcaagatattaatttggaggagttggaaactctggagagcaacctcttagcacagcagaattcactgaaagctcaaaaacagcagcaagaacggatcgctgctactgtcaccggacagatgttcctggaaagccaggaactcctgcgcctgttcggcattccctacatccaggctcccatggaagcagaggygcagtgcgcmatcctggacctgactgatcagacttccggaaccatcactgatgacagtgatatctggctgtttggagcgcggcatgtctatagaaacttttttaataaaaacaagtttgtagaatattatcaatatgtggactttcacaatcaattgggattggaccggaataagttaataaatttggcttatttgcttggaagtgattataccgaaggaataccaactgtgggttgtgtaaccgccatggaaattctcaatgaattccctgggcatggcctggaacctctcctaaaattctcagaatggtggcatgaagctcaaaaaaatccaaagataagacctaatcctcatgacaccaaagtgaaaaaaaaattacggacattgcaactcacccctggctttcctaacccagctgttgccgaggcctacctcaaacccgtggtggatgactcgaagggatcctttctgtgggggaaacctgatctcgacaaaattagakaattttgtcagcggtatttcggctggaacagaacgaagacagatgaatctctgtttcctgtattaaagcaactcgatgcccagcagacacagctccgaattgattccttctttagattagcacaacaggagaaagaagatgctaaacgtattaagagccagagactaaacagagctgtgacatgtatgctaaggaaagagaaagaagcagcagccagcgaaatagaagcagtttctgttgccatggagaaagaatttgagctacttgataaggcaaaacgaaaaacccagaagagaggcataacaaataccttagaagagtcatcaagcctgaaaagaaagaggctttcagattctaaacgaaagaatacatgcggtggatttttgggggagacctgcctctcagaatcatctgatggatcttcaagtgaasatgctgaaagttcatctttaatgaatgtacaaaggagaacagctgygaaagagccaaaaaccagtgcttcagattcgcagaactcagtgaaggaagctcccgtgaagaatggaggtgcgaccaccagcagctctagtgatagtgatgacgatggagggaaagagaagatggtcctcgtgaccgccagatctgtgtttgggaagaaaagaaggaaactaagacgtgcgaggggaagaaaaaggaaaacctaattaaaaaatatgtatcctctataattagtyatgacagccatttgtaatgaatttgtcgcaaagacgtaataaaattaactggtrgcacggtc

SEQ ID NO: 5617 - DNA, 201 bp, Homo sapiens
atgggggtccaggggctctggaagctgctggagtgctccgggcggcaggtcagccycgaagcgctggaagggaagatcctggctgttgaaacttcccagtggccgtatcacctcctgccattccttttgtcctgctgcactggcttcctggagatagggaccgtctctgttttgttcatggctgaattgtttggtgtatat

SEQ ID NO: 5618 - DNA, 1870 bp, Homo sapiens
gcccgggcaggagcgggcttgccctgcggagcagtagctaggaacagatccacttgcaggttgctgytcccagccatggcttcgcgctgctggcgctggtggggctggtcggcgtggcctcggacccggctgcctcccgccgggagcaccccgagcttctgccaccatttctccacacaggagaagaccccccakatctgtgtggtgggcagtggcccagctggcttctacacggcccaacacctgctaaagcacccccaggcccacgtggacatctacgagaaacagcctgtgccctttggcctggtgcgctttggtgtggcgcctgatcaccccgaggtgaagaatgtcatcaacacatttacccagacggcccattctggccgctgtgccttctggggcaacgtggaggtgggcagggaygtgacggtgccggagctgcrggaggcctaccacgctgtggtgctgagctacggggcagaggaccatcgggccctggaaattcctggtgaggagctgccaggtgtgtgctccgcccgggccttcgtgggctggtacaacgggcttcctgagaaccaggagctggagccagacctgagctgtgacacagccgtgattctggggcaggggaacgtggctctggacgtggcccgcatcctactgaccccacctgagcacctggagagaacggacatcacgaaggcagccctgggtgtactgaggcagagtcgagtgaagacagtgtggctagtgggccggcgtggacccctgcaagtggccttcaccattaaggagcttcgggagatgattcagttaccgggagcyyggcccattttggatcctgtggatttcttgggtctccaggacaagatcaaggaggtcccccgcccgaggaagcggctgacggaactgctgcttcgaacggccacagagaagccagggccggcggaagctgcccgccaggcatcggcctcccgtgcctggggcctccgctttttccgaagcccccagcaggtgctgccctcaccagatgggcggcgggcagcaggtgtccgcctagcagtcactagactggagggtgtcgatgaggccacccgtgcagtgcccacgggagacatggaagacctcccttgtgggctggtgctcagcagcattggrtataagagycgccctgtcgacccaagcgtgccctttgactccaagcttggggtcatccccaatgtggagggccgggttatggatgtgccagkcctctactgcagcggctgggtgaagagaggacctacaggtgtcatagccacaaccatgactgacagcttcctcaccggccagatgctgctgcaggacctgaaggctgggttgctcccctctggccccaggcctggctacgcagccatccaggccctgctcagcagccgaggggtccggccagtctctttctcagactgggagaagctggatgccgaggaggtggcccggggccagggcacggggaagcccagggagaagctggtggatcctcaggagatgctgcgcctcctgggccactgagcccagccccagccccggcccccagcagggaagggatgagtgttgggaggggaagggctgggtccgtctgagtgggactttgcacctctgctgatcccggccggccctggcttggaggcttggctgctcttccagcgtctctcctccctcctggggaaggtcgcccttgcgcgcaaggttttagctttcagcaactgaggtaaccttagggacaggtggaggtgtgggccgatctaaccccttacccatctctctactgctggactgtggagggtcaccaggttgggaacatgctggaaataaaacagctgcaaccaag

SEQ ID NO: 5619 - DNA, 1888 bp, Homo sapiens
gcccgggcaggagcgggcttgccctgcggagcagtagctaggaacagatccacttgcaggttgctgytcccagccatggcttcgcgctgctggcgctggtggggctggtcggcgtggcctcggacccggctgcctcccgccgggagcaccccgagcttctgccaccatttctccacacaggagaagaccccccakatctgtgtggtgggcagtggcccagctggcttctacacggcccaacacctgctaaagcacccccaggcccacgtggacatctacgagaaacagcctgtgccctttggcctggtgcgctttggtgtggcgcctgatcaccccgaggtgaagaatgtcatcaacacatttacccagacggcccattctggccgctgtgccttctggggcaacgtggaggtgggcagggaygtgacggtgccggagctgcrggaggcctaccacgctgtggtgctgagctacggggcagaggaccatcgggccctggaaattcctggtgaggagctgccaggtgtgtgctccgcccgggccttcgtgggctggtacaacgggcttcctgagaaccaggagctggagccagacctgagctgtgacacagccgtgattctggggcaggggaacgtggctctggacgtggcccgcatcctactgaccccacctgagcacctggaggccctccttttgtgccagagaacggacatcacgaaggcagccctgggtgtactgaggcagagtcgagtgaagacagtgtggctagtgggccggcgtggacccctgcaagtggccttcaccattaaggagcttcgggagatgattcagttaccgggagcyyggcccattttggatcctgtggatttcttgggtctccaggacaagatcaaggaggtcccccgcccgaggaagcggctgacggaactgctgcttcgaacggccacagagaagccagggccggcggaagctgcccgccaggcatcggcctcccgtgcctggggcctccgctttttccgaagcccccagcaggtgctgccctcaccagatgggcggcgggcagcaggtgtccgcctagcagtcactagactggagggtgtcgatgaggccacccgtgcagtgcccacgggagacatggaagacctcccttgtgggctggtgctcagcagcattggrtataagagycgccctgtcgacccaagcgtgccctttgactccaagcttggggtcatccccaatgtggagggccgggttatggatgtgccagkcctctactgcagcggctgggtgaagagaggacctacaggtgtcatagccacaaccatgactgacagcttcctcaccggccagatgctgctgcaggacctgaaggctgggttgctcccctctggccccaggcctggctacgcagccatccaggccctgctcagcagccgaggggtccggccagtctctttctcagactgggagaagctggatgccgaggaggtggcccggggccagggcacggggaagcccagggagaagctggtggatcctcaggagatgctgcgcctcctgggccactgagcccagccccagccccggcccccagcagggaagggatgagtgttgggaggggaagggctgggtccgtctgagtgggactttgcacctctgctgatcccggccggccctggcttggaggcttggctgctcttccagcgtctctcctccctcctggggaaggtcgcccttgcgcgcaaggttttagctttcagcaactgaggtaaccttagggacaggtggaggtgtgggccgatctaaccccttacccatctctctactgctggactgtggagggtcaccaggttgggaacatgctggaaataaaacagctgcaaccaag

SEQ ID NO: 5620 - DNA, 568 bp, Homo sapiens
gatcccaaratggctgggcgaaaacttgctctaaaaaccattgactgggtagcttttgcagagatcataccccagaaccaaaaggccattgctagttccctgaaatcctggaatgagaccctcacctccaggttggctgctttacctgagaatccaccagctatcgactgggcttactacaaggccaatgtggccaaggctggcttggtggatgactttgagaagaagtttaatgcgctgaaggttcccgtgccagaggataaatatactgcccaggtggatgccgaagaaaaagaagatgtgaaatcttgtgctgagtgggtgtctctctcaaaggccaggattgtagaatatgagaaagagatggagaagatgaagaacttaattccatttgatcagatgaccattgaggacytgaatgaagctttcycagaaaccaaattagacaagaaaaagtatccctattgscctcaccaamcaattgagaatttataaaattgagtccaggaggaagctctggcccttgtattacacattctggayattaaaaataataattatacagttc

SEQ ID NO: 5621 - DNA, 644 bp, Homo sapiens
ggctgaggaaagatcttcccgtgacccacttccgttacttgctgcggaggaccgtgggcagccagggtcggtgaaggatcccaaratggctgggcgaaaacttgctctaaaaaccattgactgggtagcttttgcagagatcataccccagaaccaaaaggccattgctagttccctgaaatcctggaatgagaccctcacctccaggttggctgctttacctgagaatccaccagctatcgactgggcttactacaaggccaatgtggccaaggctggcttggtggatgactttgagaagaagtttaatgcgctgaaggttcccgtgccagaggataaatatactgcccaggtggatgccgaagaaaaagaagatgtgaaatcttgtgctgagtgggtgtctctctcaaaggccaggattgtagaatatgagaaagagatggagaagatgaagaacttaattccatttgatcagatgaccattgaggacytgaatgaagctttcycagaaaccaaattagacaagaaaaagtatccctattgscctcaccaamcaattgagaatttataaaattgagtccaggaggaagctctggcccttgtattacacattctggayattaaaaataataattatacagttc

SEQ ID NO: 5622 - DNA, 568 bp, Homo sapiens
ggctgaggaaagatcttcccgtgacccacttccgttacttgctgcggaggaccgtgggcagccagggtcggtgaaggatcccaaratggctgggcgaaaacttgctctaaaaaccattgactgggtagcttttgcagagatcataccccagaaccaaaaggccattgctagttccctgaaatcctggaatgagaccctcacctccaggttggctgctttacctgagaatccaccagctatcgactgggcttactacaaggccaatgtggccaaggctggcttggtggatgactttgagaagaaggtgaaatcttgtgctgagtgggtgtctctctcaaaggccaggattgtagaatatgagaaagagatggagaagatgaagaacttaattccatttgatcagatgaccattgaggacytgaatgaagctttcycagaaaccaaattagacaagaaaaagtatccctattgscctcaccaamcaattgagaatttataaaattgagtccaggaggaagctctggcccttgtattacacattctggayattaaaaataataattataca

SEQ ID NO: 5623 - DNA, 1611 bp, Homo sapiens
cgtgacaacgggggcgaagcgcaggcgcaaggagcaagcgcagattgtgggcggctgtgtcagctgacccaaggggccttcgaggtgccttaggccgcttgcsttgctctcagaatcgctgccgccatggctagtcagtctcaggggattcagcagctgctgcaggccgagaagcgggcagccgagaaggtgtccgaggcccgcaaaagaaagaaccggaggctgaagcaggccaaagaagaagctcaggctgaaattgaacagtaccgcctgcagagggagaaagaattcaaggccaaggaagctgcggcattgggatcccgtggcagttgcagcactgaagtggagaaggagacccaggagaagatgaccatcctccagacatacttccrgcagaacagggatgaagtcttggacaacctcttggcttttgtctgtgacattcggccagaaatccatgaaaactaccgcataaatggatagaagagagaagcacctgtgctgtggagtggcattttagatgccctcacgaatatgaagcttagcacagctctagttacattcttatgatatggcattaaattatttccatatattatataataggtccttccactttttggagagtagcaaatctagcttttttgtacagacttagaaattatctaaagatttcatctttttacctcatatttcttaggaatttaatggttatatgttgtctttttttcctatgtcttttggctcaagcaacatgtatatcagtgttgactttttctttcttagatctagtttaaaaaaaaaaaaamccacataacaattctttgaagaaaggaagggattaaataatttttttccctaacactttcttgaaggtcaggggctttatctatgaaaaagtagtaaatagttctttgtaacctgtgtgaagcagcagccagccttaaagtagtccattcttgctaatggttagaacagtgaatactagtggaattgtttgggctgcttttagtttctcttaatcaaaattactagatgatagaattcaagaacttgttacatgtattacttggtgtatcgataatcatttaaaagtaaagactctgtcatgcatttttccccattcttttttttttccctgtctccgtgacaaccagtggttcttcatttttgatcatgcgaaatgcaytttgacccagatggtctgcagaacttcacttaggacattagcacacaaatagcacacatatcacatayccatttatatacataattagaaaatgttcctgatacatgtgtcatgtgatttcttccaacaaatgttttggaaaacagcaagcaactagtctgtaggttgtcttttctctagagatccttgtcctgggacagcctggggcaagttattaagcatatttccttcctggtgggctagatgatgtgcattatacctgtagtaccttcatactagcccttacaagttaaatgtcctgtggccatcttagccgaaagtctttggttgcaaaatcttataggtaaaaacagttgaaagaacattatgggatttccttgcttgttctgatacaatacaactagatgaccttaaaaaccctc

SEQ ID NO: 5624 - DNA, 1337 bp, Homo sapiens
cgtgacaacgggggcgaagcgcaggcgcaaggagcaagcgcagattgtgggcggctgtgtcagctgacccaaggggccttcgaggtgccttaggccgcttgcsttgctctcagaatcgctgccgccatggctagtcagtctcaggggattcagcagctgctgcaggccgagaagcgggcagccgagaaggtgtccgaggcccgcaaaagaaagaaccggaggctgaagcaggccaaagaagaagctcaggctgaaattgaacagtaccgcctgcagagggagaaagaattcaaggccaaggaagctgcggcattgggatcccgtggcagttgcagcactgaagtggagaaggagacccaggagaagatgaccatcctccagacatacttccrgcagaacagggatgaagtcttggacaacctcttggcttttgtctgtgacattcggccagaaatccatgaaaactaccgcataaatggatagaagagagaagcacctgtgctgtggagtggcattttagatgccctcacgaatatgaagcttagcacagctctagttacattcttatgatatggcattaaattatttccatatattatataataggtccttccactttttggagagtagcaaatctagcttttttgtacagacttagaaattatctaaagatttcatctttttaccacatgtatatcagtgttgactttttctttcttagatctagtttaaaaaaaaaaaaamccacataacaattctttgaagaaaggaagggattaaataatttttttccctaacactttcttgaaggtcaggggctttatctatgaaaaagtagtaaatagttctttgtaacctgtgtgaagcagcagccagccttaaagtagtccattcttgctaatggttagaacagtgaatactagtggaattgtttgggctgcttttagtttctcttaatcaaaattactagatgatagaattcaagaacttgttacatgtattacttggtgtatcgataatcatttaaaagtaaagactctgtcatgcatttttccccattcttttttttttccctgtctccgtgacaaccagtggttcttcatttttgatcatgcgaaatgcaytttgacccagatggtctgcagaacttcacttaggacattagcacacaaatagcacacatatcacatayccatttatatacataattagaaaatgttcctgatacatgtgtcatgtgatttcttccaacaaatgttttggaaaacagcaagcaactagtctgtaggttgtcttttctctagagatccttgtcctgggacagcctggggcaagtt

SEQ ID NO: 5625 - DNA, 2095 bp, Homo sapiens
gcaggcagccgtccgcctcctgcagggaatgcttgctcctgggtgcacgcacggataccgcgatggtccgagaccacgctctgggacagcaagcctcaagcctcgcacaggagagggccgcggagcttcctcgacccgccccgccgcccttcccgcgggaggccccgcccccgccccccgccccgattggctgtcgggagagaggcggggcctaggggattggctgcccggcgaccgcgggctgacgtggcggggctggcgtgtgggtctcgcagcgttgctcacagaacagagtagaggcggcggcggcggcggccggacccagactggtagtgaggctttggaccccgagccgctgcaatgccgctggagctggagctgtgtcccgggcgctgggtgggcgggcaacacccgtgcttcatcattgccgagatcggccagaaccaccagggcgacctggaygtagccaagcgcatgatccgcatggccaaggagtgtggggctgattgtgcyaagttccagaagagtgagctagaattcaagtttaatcggaaagccttggasaggccatacacctcgaagcattcctgggggaagacgtacggggagcacaaacgacatctggagttcagccatgaccagtacagggagctgcagaggtacgccgaggaggttgggatcttcttcactgcctctggcatggatgagatggcagttgaattcctgcatgaactgaatgttccatttttcaaagttggatctggagacactaataattttccttatctggaaaagacagccaaaaaaggtcgcccaatggtgatctccagtgggatgcagtcaatggacaccatgaagcaagtttatcagatcgtgaagcccctcaaccccaacttctgcttcttgcagtgtaccagcgcatacccgctccagcctgaggacgtcaacctgcgggtcatctcggaatatcagaagctctttcctgacattcccatagggtattctgggcatgaaacaggcatagcgatatctgtggccgcagtggctctgggggccaaggtgttggaacgtcacataactttggacaagacctggaaggggagtgaccactcggcctcgctggagcctggagaactggccgagctggtgcggtcagtgcgtcttgtggagcgtgccctgggctccccaaccaagcagctgctgccctgtgagatggcctgcaatgagaagctgggcaagtctgtggtggccaaagtgaaaattccggaaggcaccattctaacaatggacatgctcaccgtgaaggtgggtgagcccaaaggctatcctcctgaagacatctttaatctagtgggcaagaaggtcctggtcactgttgaagaggatgacaccatcatggaagaaytggtagataatcatggcaaaaaaatcaagtcttaaaaataaagtgccattctctgaattctcagttcccttgctgatgctgtcaggtgtgtttgagtgaggcgagggcaggaatggcggtctccagggacctggctgtcatccacctccacctgctccttagacagcagatgtttctgggctaggccctgtgtcagcccactggagacagaaaaagatccagtgatgcaatctctccttcaagttggccagcttagtgcactggccaacagtgcattataaacagagcaccagaagaaggggtggttccaaacaaagtccatatcctccagttgctgggtggctgcagagaggggtgagagctggctgcacatgtcctttcctttaagccttcattctcacttccttacagccctttacttctccattgtctttatccctttcctgcccttggcctctgtgtttagttggcattgtatagcagtcactccacatcagagaaaggactggtcaaaggatcttgtaggcagaaaatgctgaaagcactcctttcagagcaaagagagggaaatggcatgtgttccttctctgaacaaatattgagggccatctttgtgccaggcactgctttaggcacagagtatatggccatgaacaagccccaatcccttcctcagagaacttccattca

SEQ ID NO: 5626 - DNA, 888 bp, Homo sapiens
gcaggcagccgtccgcctcctgcagggaatgcttgctcctgggtgcacgcacggataccgcgatggtccgagaccacgctctgggacagcaagcctcaagcctcgcacaggagagggccgcggagcttcctcgacccgccccgccgcccttcccgcgggaggccccgcccccgccccccgccccgattggctgtcgggagagaggcggggcctaggggattggctgcccggcgaccgcgggctgacgtggcggggctggcgtgtgggtctcgcagcgttgctcacagaacagagtagaggcggcggcggcggcggccggacccagactggtagtgaggctttggaccccgagccgctgcaatgccgctggagctggagctgtgtcccgggcgctgggtgggcgggcaacacccgtgcttcatcattgccgagatcggccagaaccaccagggcgacctggaygtagccaagcgcatgatccgcatggccaaggagtgtggggctgattgtgcyaagttccagaagagtgagctagaattcaagtttaatcggaaagccttggasaggccatacacctcgaagcattcctgggggaagacgtacggggagcacaaacgacatctggagttcagccatgaccagtacagggagctgcagaggtacgccgaggaggttgggatcttcttcactgcctctggcatggatgagatggcagttgaattcctgcatgaactgaatgttccatttttcaaagttggatctggagacactaataattttccttatctggaaaagacagccaaaaaaggtcgcccaatggtgatctccagtgggatgcaataatcatggcaaaaaaatcaagtcttaaaaataaagtgccattctctg

SEQ ID NO: 5627 - DNA, 1840 bp, Homo sapiens
gcaggcagccgtccgcctcctgcagggaatgcttgctcctgggtgcacgcacggataccgcgatggtccgagaccacgctctgggacagcaagcctcaagcctcgcacaggagagggccgcggagcttcctcgacccgccccgccgcccttcccgcgggaggccccgcccccgccccccgccccgattggctgtcgggagagaggcggggcctaggggattggctgcccggcgaccgcgggctgacgtggcggggctggcgtgtgggtctcgcagcgttgctcacagaacagagtagaggcggcggcggcggcggccggacccagactggtagtgaggctttggaccccgagccgctgcaatgccgctggagctggagctgtgtcccgggcgctgggtgggcgggcaacacccgtgcttcatcattgccgagatcggccagaaccaccagggcgacctggaygtagccaagcgcatgatccgcatggccaaggagtgtggggctgattgtgcyaagttccagaagagtgagctagaattcaagtttaatcggaaagccttggasaggccatacacctcgaagcattcctgggggaagacgtacggggagcacaaacgacatctggagttcagccatgaccagtacagggagctgcagaggtacgccgaggaggttgggatcttcttcactgcctctggcatggatgaggaatatcagaagctctttcctgacattcccatagggtattctgggcatgaaacaggcatagcgatatctgtggccgcagtggctctgggggccaaggtgttggaacgtcacataactttggacaagacctggaaggggagtgaccactcggcctcgctggagcctggagaactggccgagctggtgcggtcagtgcgtcttgtggagcgtgccctgggctccccaaccaagcagctgctgccctgtgagatggcctgcaatgagaagctgggcaagtctgtggtggccaaagtgaaaattccggaaggcaccattctaacaatggacatgctcaccgtgaaggtgggtgagcccaaaggctatcctcctgaagacatctttaatctagtgggcaagaaggtcctggtcactgttgaagaggatgacaccatcatggaagaaytggtagataatcatggcaaaaaaatcaagtcttaaaaataaagtgccattctctgaattctcagttcccttgctgatgctgtcaggtgtgtttgagtgaggcgagggcaggaatggcggtctccagggacctggctgtcatccacctccacctgctccttagacagcagatgtttctgggctaggccctgtgtcagcccactggagacagaaaaagatccagtgatgcaatctctccttcaagttggccagcttagtgcactggccaacagtgcattataaacagagcaccagaagaaggggtggttccaaacaaagtccatatcctccagttgctgggtggctgcagagaggggtgagagctggctgcacatgtcctttcctttaagccttcattctcacttccttacagccctttacttctccattgtctttatccctttcctgcccttggcctctgtgtttagttggcattgtatagcagtcactccacatcagagaaaggactggtcaaaggatcttgtaggcagaaaatgctgaaagcactcctttcagagcaaagagagggaaatggcatgtgttccttctctgaacaaatattgagggccatctttgtgccaggcactgctttaggcacagagtatatggccatgaacaagccccaatcccttcctcagagaacttccattca

SEQ ID NO: 5628 - DNA, 2115 bp, Homo sapiens
gcaggcagccgtccgcctcctgcagggaatgcttgctcctgggtgcacgcacggataccgcgatggtccgagaccacgctctgggacagcaagcctcaagcctcgcacaggagagggccgcggagcttcctcgacccgccccgccgcccttcccgcgggaggccccgcccccgccccccgccccgattggctgtcgggagagaggcggggcctaggggattggctgcccggcgaccgcgggctgacgtggcggggctggcgtgtgggtctcgcagcgttgctcacagaacagagtagaggcggcggcggcggcggccggacccagactggtagtgaggctttggaccccgagccgctgcaatgccgctggagctggagctgtgtcccgggcgctgggtgggcgggcaacacccgtgcttcatcattgccgagatcggccagaaccaccagggcgacctggaygtagccaagcgcatgatccgcatggccaaggagtgtggggctgattgtgcyaagttccagaagagtgagctagaattcaagtttaatcggaaagccttggasaggccatacacctcgaagcattcctgggggaagacgtacggggagcacaaacgacatctggagttcagccatgaccagtacagggagctgcagaggtacgccgaggaggttgggatcttcttcactgcctctggcatggatgagatggcagttgaattcctgcatgaactgaatgttccatttttcaaagttggatctggagacactaataattttccttatctggaaaagacagccaaaaaaggggaggcctctgagactcagagacggacagtactctgcccaggcacagctagaagtggcagctccacacctcacattcattcacactcttgaatcagcactcattctactgtactgccatgtgtaccagcgcatacccgctccagcctgaggacgtcaacctgcgggtcatctcggaatatcagaagctctttcctgacattcccatagggtattctgggcatgaaacaggcatagcgatatctgtggccgcagtggctctgggggccaaggtgttggaacgtcacataactttggacaagacctggaaggggagtgaccactcggcctcgctggagcctggagaactggccgagctggtgcggtcagtgcgtcttgtggagcgtgccctgggctccccaaccaagcagctgctgccctgtgagatggcctgcaatgagaagctgggcaagtctgtggtggccaaagtgaaaattccggaaggcaccattctaacaatggacatgctcaccgtgaaggtgggtgagcccaaaggctatcctcctgaagacatctttaatctagtgggcaagaaggtcctggtcactgttgaagaggatgacaccatcatggaagaaytggtagataatcatggcaaaaaaatcaagtcttaaaaataaagtgccattctctgaattctcagttcccttgctgatgctgtcaggtgtgtttgagtgaggcgagggcaggaatggcggtctccagggacctggctgtcatccacctccacctgctccttagacagcagatgtttctgggctaggccctgtgtcagcccactggagacagaaaaagatccagtgatgcaatctctccttcaagttggccagcttagtgcactggccaacagtgcattataaacagagcaccagaagaaggggtggttccaaacaaagtccatatcctccagttgctgggtggctgcagagaggggtgagagctggctgcacatgtcctttcctttaagccttcattctcacttccttacagccctttacttctccattgtctttatccctttcctgcccttggcctctgtgtttagttggcattgtatagcagtcactccacatcagagaaaggactggtcaaaggatcttgtaggcagaaaatgctgaaagcactcctttcagagcaaagagagggaaatggcatgtgttccttctctgaacaaatattgagggccatctttgtgccaggcactgctttaggcacagagtatatggccatgaacaagccccaatcccttcctcagagaacttccattca

SEQ ID NO: 5629 - DNA, 5831 bp, Homo sapiens
tggggaaggccacagtgtcgcgaggccgtggcagcggcggcccccgcggagcggcggggtgggtggggggcccgggccgcgtggaggccgcgcgatcctctccgcgcgcgctctcgccggggtcgccggacaaagctcgcccccctcgcccggcacccctacagtcgccctcccaattacagcggctgcaacaataggcaggcgttggggcttttctggctgcgtggtaacgggtccgacccgaatgttgcgtttttggcgaagctgcgatcggggctcagccaaacctccagatatgtccggcgtcggccggacacgggcattagcggtccccttgggctagccgacctcaaattgtcttaaaaacgtgtcattccagattttcaaggaaaggaggccactgtctgcagctcccgtgaagatgtccactccagacccacccctgggcggaactcctcggccaggtccttccccgggccctggcccttcccctggagccatgctgggccctagcccgggtccctcgccgggctccgcccacagcatgatggggcccagcccagggccgccctcagcaggacaccccatccccacccaggggcctggagggtaccctcaggacaacatgcaccagatgcacaagcccatggagtccatgcatgagaagggcatgtcggacgacccgcgctacaaccagatgaaaggaatggggatgcggtcagggggccatgctgggatggggcccccgcccagccccatggaccagcactcccaaggttacccctcgcccctgggtggctctgagcatgcctctagtccagttccagccagtggcccgtcttcggggccccagatgtcttccgggccaggaggtgccccgctggatggtgctgacccccaggccttkgggcagcagaaccggggcccaaccccatttaaccagaaccagctgcaccagctcagagctcagatcatggcctacaagatgctggccagggggcagcccctccccgaccacctgcagatggcggtgcagggcaagcggccgatgcccgggatgcagcagcagatgccaacgctacctccaccctcggtgtccgcaacaggacccggccctggccctggcccyggccccggcccgggtcccggcccggcacctccaaattacagcaggcctcatggtatgggagggcccaacatgcctcccccaggaccctcgggcgtgccccccgggatgccaggccagcctcctggagggcctcccaagccctggcctgaaggacccatggcgaatgctgctgcccccacgagcacccctcagaagctgattcccccgcagccaacgggccgcccttcccccgcgccccctgccgtcccacccgccgcctcgcccgtgatgccaccgcagacccagtcccccgggcagccggcccagcccgcgcccatggtgccactgcaccagaagcagagccgcatcacccccatccagaagccgcggggcctcgaccctgtggagatcctgcaggagcgcgagtacaggctgcaggctcgcatcgcacaccgaattcaggaacttgaaaaccttcccgggtccctggccggggatttgcgaaccaaagcgaccattgagctcaaggccctcaggctgctgaacttccagaggcagctgcgccaggaggtggtggtgtgcatgcggagggacacagcgctggagacagccctcaatgctaaggcctacaagcgcagcaagcgccagtccctgcgcgaggcccgcatcactgagaagctggagaagcagcagaagatcgagcaggagcgcaagcgccggcagaarcaccaggaatacctcaatagcattctccagcatgccaaggatttcaaggaatatcacagatccgtcacaggcaaaatccagaagctgaccaaggcrgtggccacgtaccaygccaacacggagcgggagcagaagaaagagaaygagcggatcgagaaggagcgcatgcggaggctcatggctgaagatgaggaggggtaccgcaagctcatcgaccagaagaaggacaagcgcctggcctacctcttgcagcagacagacgagtacgwggctaacctcacggagctggtgcsgcagcacaaggctgcccaggtcgccaaggagaaaaagaagaaaaagaaaaagaagaaggcagaaaatgcagaaggacagacgcctgccattgggccggatggcgagcctctggacgagaccagccagatgagcgacctcccggtgaaggtgatccacgtggagagtgggaagatcctcacaggcacagatgcccccaaagccgggcagctggaggcctggctcgagatgaacccggggtatgaagtagctccgaggtctgatagtgaagaaagtggctcagaagaagaggaagaggaggaggaggaagagcagccgcaggcagcacagcctcccaccctgcccgtggaggagaagaagaagattccagatccagacagcgatgacgtctctgaggtggacgcgcggcacatcattgagaatgccaagcaagatgtcgatgatgaatatggcgtgtcccaggcccttgcacgtggcctgcagtcctactatgccgtggcccatgctgtcactgagagagtggacaagcagtcagcgcttatggtcaatggtgtcctcaaacagtaccagatcaaaggtttggagtggctggtgtccctgtacaacaacaacctgaacggcatcctggccgacgagatgggcctggggaagaccatccagaccatcgcgctcatcacgtacctcatggagcacaaacgcatcaatgggcccttcctcatcatcgtgcctctctcaacgctgtccaactgggcgtacgagtttgacaagtgggccccctccgtggtgaaggtgtcttacaagggatccccagcagcaagacgggcctttgtcccccagctccggagtgggaagttcaacgtcttgctgacgacgtacgagtacatcatcaaagacaagcacatcctcgccaagatccgttggaagtacatgattgtggacgaaggtcaccgcatgaagaaccaccactgcaagctgacgcaggtgctcaacacgcactatgtggcaccccgccgcctgctgctgacgggcacaccgctgcagaacaagcttcccgagctctgggcgctgctcaacttcctgctgcccaccatcttcaagagctgcagcaccttcgagcagtggtttaacgcaccctttgccatgaccggggaaaaggtggacctgaatgaggaggaaaccattctcatcatccggcgtctccacaaagtgctgcggcccttcttgctccgacgactcaagaaggaagtcgaggcccagttgcccgaaaaggtggagtacgtcatcaagtgcgacatgtctgcgctgcagcgagtgctctaccgccacatgcaggccaagggcgtgctgctgactgatggctccgagaaggacaagaagggcaaaggcggcaccaagaccctgatgaacaccatcatgcagctgcggaagatctgcaaccacccctacatgttccagcacatcgaggagtccttttccgagcacttggggttcactggcggcattgtccaagggctggacctgtaccgagcctcgggtaaatttgagcttcttgatagaattcttcccaaactccgagcaaccaaccacaaagtgctgctgttctgccaaatgacctccctcatgaccatcatggaagattactttgcgtatcgcggctttaaatacctcaggcttgatggaaccacgaaggcggaggaccggggcatgctgctgaaaaccttcaacgagcccggctctgagtacttcatcttcctgctcagcacccgggctggggggctcggcctgaacctccagtcggcagacactgtgatcatttttgacagcgactggaatcctcaccaggacctgcaagcgcaggaccgagcccaccgcatcgggcagcagaacgaggtgcgtgtgctccgcctctgcaccgtcaacagcgtggaggagaagatcctagctgcagccaagtacaagctcaacgtggaccagaaggtgatccaggccggcatgttcgaccagaagtcctccagccatgagcggcgcgccttcctgcaggccatcctggagcacgaggagcaggatgagagcagacactgcagcacgggcagcggcagtgccagcttcgcccacactgcccctccgccagcgggcgtcaaccccgacttggaggagccacctctaaaggaggaagacgaggtgcccgacgacgagaccgtcaaccagatgatcgcccggcacgaggaggagtttgatctgttcatgcgcatggacctggaccgcaggcgcgaggaggcccgcaaccccaagcggaagccgcgcctcatggaggaggacgagctcccctcgtggatcatcaaggacgaygcggaggtggagcggctgacctgtgaggaggaggaggagaagatgttcggccgtggctcccgccaccgcaaggaggtggactacagcgactcactgacggagaagcagtggctcaaggccatcgaggagggcacgctggaggagatcgaagaggaggtccggcagaagaaatcatcacggaagcgcaagcgagacagcgacgccggctcctccaccccgaccaccagcacccgcagccgcgacaaggacgacgagagcaagaagcagaagaagcgcgggcggccgcctgccgagaaactctcccctaacccacccaacctcaccaagaagatgaagaagattgtgsatgccgtgatcaagtacaaggacagcagcagtggacgtcagctcagcgaggtcttcatccagctgccctcgcgaaaggagctgcccgagtactacgagctcatccgcaagcccgtggacttcaagaagataaaggagcgcattcgcaaccacaagtaccgcagcctcaaygacctagagaaggaygtcatgctcctgtgccagaacgcacagaccttcaacctggagggctccctgatctatgaagactccatcgtcttgcagtcggtcttcaccagcgtgcggcagaaaatcgagaaggaggatgacagtgaaggcgaggagagtgaggaggaggaagagggcgaggaggaaggctccgaatccgaatctcggtccgtcaaagtgaagatcaagcttggccggaaggagaaggcacaggaccggctgaagggcggccggcggcggccgagccgagggtcccgagccaagccggtcgtgagtgacgaygacagtgaggaggaacaagaggaggaccgctcaggaagtggcagcgaagaagactgagccccgacattccagtctcgaccccgagcccctcgttccagagctgagatggcataggccttagcagtaacgggtagcagcagatgtagtttcagacttggagtaaaactgtataaacaaaagaatcttccatatttatacagcagagaagctgtaggactgtttgtgactggccctgtcctggcatcagtagcatctgtaacagcattaactgtcttaaagagagagagagagaattccgaattggggaacacacgatacctgtttttcttttccgttgctggcagtactgttgcgccgcagtttggagtcactgtagttaagtgtggatgcatgtgcgtcaccgtccactcctcctactgtattttattggacaggtcagactcgccgggggcccggcgagggtatgtcagtgtcactggatgtcaaacagtaataaattaaaccaacaacaaaacgcacagcc

SEQ ID NO: 5630 - DNA, 5545 bp, Homo sapiens
gggcgggcgcgcgcgcgaggcttcccctcgtttggcggcggcggcggcttctttgtttcgtgaagagaagcgagacgcccattctgcccccggccccgcgcggaggggcgggggaggcgccgggaagtcgacggcgccggcggctcctggaggccactgtctgcagctcccgtgaagatgtccactccagacccacccctgggcggaactcctcggccaggtccttccccgggccctggcccttcccctggagccatgctgggccctagcccgggtccctcgccgggctccgcccacagcatgatggggcccagcccagggccgccctcagcaggacaccccatccccacccaggggcctggagggtaccctcaggacaacatgcaccagatgcacaagcccatggagtccatgcatgagaagggcatgtcggacgacccgcgctacaaccagatgaaaggaatggggatgcggtcagggggccatgctgggatggggcccccgcccagccccatggaccagcactcccaaggttacccctcgcccctgggtggctctgagcatgcctctagtccagttccagccagtggcccgtcttcggggccccagatgtcttccgggccaggaggtgccccgctggatggtgctgacccccaggccttkgggcagcagaaccggggcccaaccccatttaaccagaaccagctgcaccagctcagagctcagatcatggcctacaagatgctggccagggggcagcccctccccgaccacctgcagatggcggtgcagggcaagcggccgatgcccgggatgcagcagcagatgccaacgctacctccaccctcggtgtccgcaacaggacccggccctggccctggcccyggccccggcccgggtcccggcccggcacctccaaattacagcaggcctcatggtatgggagggcccaacatgcctcccccaggaccctcgggcgtgccccccgggatgccaggccagcctcctggagggcctcccaagccctggcctgaaggacccatggcgaatgctgctgcccccacgagcacccctcagaagctgattcccccgcagccaacgggccgcccttcccccgcgccccctgccgtcccacccgccgcctcgcccgtgatgccaccgcagacccagtcccccgggcagccggcccagcccgcgcccatggtgccactgcaccagaagcagagccgcatcacccccatccagaagccgcggggcctcgaccctgtggagatcctgcaggagcgcgagtacaggctgcaggctcgcatcgcacaccgaattcaggaacttgaaaaccttcccgggtccctggccggggatttgcgaaccaaagcgaccattgagctcaaggccctcaggctgctgaacttccagaggcagctgcgccaggaggtggtggtgtgcatgcggagggacacagcgctggagacagccctcaatgctaaggcctacaagcgcagcaagcgccagtccctgcgcgaggcccgcatcactgagaagctggagaagcagcagaagatcgagcaggagcgcaagcgccggcagaarcaccaggaatacctcaatagcattctccagcatgccaaggatttcaaggaatatcacagatccgtcacaggcaaaatccagaagctgaccaaggcrgtggccacgtaccaygccaacacggagcgggagcagaagaaagagaaygagcggatcgagaaggagcgcatgcggaggctcatggctgaagatgaggaggggtaccgcaagctcatcgaccagaagaaggacaagcgcctggcctacctcttgcagcagacagacgagtacgwggctaacctcacggagctggtgcsgcagcacaaggctgcccaggtcgccaaggagaaaaagaagaaaaagaaaaagaagaaggcagaaaatgcagaaggacagacgcctgccattgggccggatggcgagcctctggacgagaccagccagatgagcgacctcccggtgaaggtgatccacgtggagagtgggaagatcctcacaggcacagatgcccccaaagccgggcagctggaggcctggctcgagatgaacccggggtatgaagtagctccgaggtctgatagtgaagaaagtggctcagaagaagaggaagaggaggaggaggaagagcagccgcaggcagcacagcctcccaccctgcccgtggaggagaagaagaagattccagatccagacagcgatgacgtctctgaggtggacgcgcggcacatcattgagaatgccaagcaagatgtcgatgatgaatatggcgtgtcccaggcccttgcacgtggcctgcagtcctactatgccgtggcccatgctgtcactgagagagtggacaagcagtcagcgcttatggtcaatggtgtcctcaaacagtaccagatcaaaggtttggagtggctggtgtccctgtacaacaacaacctgaacggcatcctggccgacgagatgggcctggggaagaccatccagaccatcgcgctcatcacgtacctcatggagcacaaacgcatcaatgggcccttcctcatcatcgtgcctctctcaacgctgtccaactgggcgtacgagtttgacaagtgggccccctccgtggtgaaggtgtcttacaagggatccccagcagcaagacgggcctttgtcccccagctccggagtgggaagttcaacgtcttgctgacgacgtacgagtacatcatcaaagacaagcacatcctcgccaagatccgttggaagtacatgattgtggacgaaggtcaccgcatgaagaaccaccactgcaagctgacgcaggtgctcaacacgcactatgtggcaccccgccgcctgctgctgacgggcacaccgctgcagaacaagcttcccgagctctgggcgctgctcaacttcctgctgcccaccatcttcaagagctgcagcaccttcgagcagtggtttaacgcaccctttgccatgaccggggaaaaggtggacctgaatgaggaggaaaccattctcatcatccggcgtctccacaaagtgctgcggcccttcttgctccgacgactcaagaaggaagtcgaggcccagttgcccgaaaaggtggagtacgtcatcaagtgcgacatgtctgcgctgcagcgagtgctctaccgccacatgcaggccaagggcgtgctgctgactgatggctccgagaaggacaagaagggcaaaggcggcaccaagaccctgatgaacaccatcatgcagctgcggaagatctgcaaccacccctacatgttccagggctggacctgtaccgagcctcgggtaaatttgagcttcttgatagaattcttcccaaactccgagcaaccaaccacaaagtgctgctgttctgccaartgacctccctcatgaccatcatggaagattactttgcgtatcgcggctttaaatacctcaggcttgatggaaccacgaaggcggaggaccggggcatgctgctgaaaaccttcaacgagcccggctctgagtacttcatcttcctgctcagcacccgggctggggggctcggcctgaacctccagtcggcagacactgtgatcatttttgacagcgactggaatcctcaccaggacctgcaagcgcaggaccgagcccaccgcatcgggcagcagaacgaggtgcgtgtgctccgcctctgcaccgtcaacagcgtggaggagaagatcctagctgcagccaagtacaagctcaacgtggaccagaaggtgatccaggccggcatgttcgaccagaagtcctccagccatgagcggcgcgccttcctgcaggccatcctggagcacgaggagcaggatgagagcagacactgcagcacgggcagcggcagtgccagcttcgcccacactgcccctccgccagcgggcgtcaaccccgacttggaggagccacctctaaaggaggaagacgaggtgcccgacgacgagaccgtcaaccagatgatcgcccggcacgaggaggagtttgatctgttcatgcgcatggacctggaccgcaggcgcgaggaggcccgcaaccccaagcggaagccgcgcctcatggaggaggacgagctcccctcgtggatcatcaaggacgaygcggaggtggagcggctgacctgtgaggaggaggaggagaagatgttcggccgtggctcccgccaccgcaaggaggtggactacagcgactcactgacggagaagcagtggctcaagaccctgaaggccatcgaggagggcacgctggaggagatcgaagaggaggtccggcagaagaaatcatcacggaagcgcaagcgagacagcgacgccggctcctccaccccgaccaccagcacccgcagccgcgacaaggacgacgagagcaagaagcagaagaagcgcgggcggccgcctgccgagaaactctcccctaacccacccaacctcaccaagaagatgaagaagattgtgsatgccgtgatcaagtacaaggacagcagtggacgtcagctcagcgaggtcttcatccagctgccctcgcgaaaggagctgcccgagtactacgagctcatccgcaagcccgtggacttcaagaagataaaggagcgcattcgcaaccacaagtaccgcagcctcaaygacctagagaaggaygtcatgctcctgtgccagaacgcacagaccttcaacctggagggctccctgatctatgaagactccatcgtcttgcagtcggtcttcaccagcgtgcggcagaaaatcgagaaggaggatgacagtgaaggcgaggagagtgaggaggaggaagagggcgaggaggaaggctccgaatccgaatgtgagtcctcggtccgtcaaagtgaagatcaagcttggccggaaggagaaggcacaggaccggctgaagggcggccggcggcggccgagccgagggtcccgagccaagccggtcgtgagtgacgaygacagtgaggaggaacaagaggaggaccgctcaggaagtggcagcgaagaagactgagccccgacattccagtctcgaccccgagcccctcgttccagagctgagatggcataggccttagcagtaacgggtagcagcagatgtagtttcagacttggagtaaaactgtataaacaaaagaatcttccatatttatacagcagagaagctgtaggactgtttgtgactggccctgtcctggcatcagtagcatctgtaacagcattaactgtcttaaagagagagagagagaattccgaattggggaacacacgatacctgtttttcttttccgttgctggcagtactgttgcgccgcagtttggagtcactgtagttaagtgtggatgcatgtgcgtcaccgtccactcctcctactgtattttattggacaggtcagactcgccgggggcccggcgagggtatgtcagtgtcactggatgtcaaacagtaataaattaaaccaacaacaaaacgcacagcc

SEQ ID NO: 5631 - DNA, 5683 bp, Homo sapiens
gggcgggcgcgcgcgcgaggcttcccctcgtttggcggcggcggcggcttctttgtttcgtgaagagaagcgagacgcccattctgcccccggccccgcgcggaggggcgggggaggcgccgggaagtcgacggcgccggcggctcctggaggccactgtctgcagctcccgtgaagatgtccactccagacccacccctgggcggaactcctcggccaggtccttccccgggccctggcccttcccctggagccatgctgggccctagcccgggtccctcgccgggctccgcccacagcatgatggggcccagcccagggccgccctcagcaggacaccccatccccacccaggggcctggagggtaccctcaggacaacatgcaccagatgcacaagcccatggagtccatgcatgagaagggcatgtcggacgacccgcgctacaaccagatgaaaggaatggggatgcggtcagggggccatgctgggatggggcccccgcccagccccatggaccagcactcccaaggttacccctcgcccctgggtggctctgagcatgcctctagtccagttccagccagtggcccgtcttcggggccccagatgtcttccgggccaggaggtgccccgctggatggtgctgacccccaggccttkgggcagcagaaccggggcccaaccccatttaaccagaaccagctgcaccagctcagagctcagatcatggcctacaagatgctggccagggggcagcccctccccgaccacctgcagatggcggtgcagggcaagcggccgatgcccgggatgcagcagcagatgccaacgctacctccaccctcggtgtccgcaacaggacccggccctggccctggcccyggccccggcccgggtcccggcccggcacctccaaattacagcaggcctcatggtatgggagggcccaacatgcctcccccaggaccctcgggcgtgccccccgggatgccaggccagcctcctggagggcctcccaagccctggcctgaaggacccatggcgaatgctgctgcccccacgagcacccctcagaagctgattcccccgcagccaacgggccgcccttcccccgcgccccctgccgtcccacccgccgcctcgcccgtgatgccaccgcagacccagtcccccgggcagccggcccagcccgcgcccatggtgccactgcaccagaagcagagccgcatcacccccatccagaagccgcggggcctcgaccctgtggagatcctgcaggagcgcgagtacaggctgcaggctcgcatcgcacaccgaattcaggaacttgaaaaccttcccgggtccctggccggggatttgcgaaccaaagcgaccattgagctcaaggccctcaggctgctgaacttccagaggcagctgcgccaggaggtggtggtgtgcatgcggagggacacagcgctggagacagccctcaatgctaaggcctacaagcgcagcaagcgccagtccctgcgcgaggcccgcatcactgagaagctggagaagcagcagaagatcgagcaggagcgcaagcgccggcagaarcaccaggaatacctcaatagcattctccagcatgccaaggatttcaaggaatatcacagatccgtcacaggcaaaatccagaagctgaccaaggcrgtggccacgtaccaygccaacacggagcgggagcagaagaaagagaaygagcggatcgagaaggagcgcatgcggaggctcatggctgaagatgaggaggggtaccgcaagctcatcgaccagaagaaggacaagcgcctggcctacctcttgcagcagacagacgagtacgwggctaacctcacggagctggtgcsgcagcacaaggctgcccaggtcgccaaggagaaaaagaagaaaaagaaaaagaagaaggcagaaaatgcagaaggacagacgcctgccattgggccggatggcgagcctctggacgagaccagccagatgagcgacctcccggtgaaggtgatccacgtggagagtgggaagatcctcacaggcacagatgcccccaaagccgggcagctggaggcctggctcgagatgaacccggggtatgaagtagctccgaggtctgatagtgaagaaagtggctcagaagaagaggaagaggaggaggaggaagagcagccgcaggcagcacagcctcccaccctgcccgtggaggagaagaagaagattccagatccagacagcgatgacgtctctgaggtggacgcgcggcacatcattgagaatgccaagcaagatgtcgatgatgaatatggcgtgtcccaggcccttgcacgtggcctgcagtcctactatgccgtggcccatgctgtcactgagagagtggacaagcagtcagcgcttatggtcaatggtgtcctcaaacagtaccagatcaaaggtttggagtggctggtgtccctgtacaacaacaacctgaacggcatcctggccgacgagatgggcctggggaagaccatccagaccatcgcgctcatcacgtacctcatggagcacaaacgcatcaatgggcccttcctcatcatcgtgcctctctcaacgctgtccaactgggcgtacgagtttgacaagtgggccccctccgtggtgaaggtgtcttacaagggatccccagcagcaagacgggcctttgtcccccagctccggagtgggaagttcaacgtcttgctgacgacgtacgagtacatcatcaaagacaagcacatcctcgccaagatccgttggaagtacatgattgtggacgaaggtcaccgcatgaagaaccaccactgcaagctgacgcaggtgctcaacacgcactatgtggcaccccgccgcctgctgctgacgggcacaccgctgcagaacaagcttcccgagctctgggcgctgctcaacttcctgctgcccaccatcttcaagagctgcagcaccttcgagcagtggtttaacgcaccctttgccatgaccggggaaaaggtggacctgaatgaggaggaaaccattctcatcatccggcgtctccacaaagtgctgcggcccttcttgctccgacgactcaagaaggaagtcgaggcccagttgcccgaaaaggtggagtacgtcatcaagtgcgacatgtctgcgctgcagcgagtgctctaccgccacatgcaggccaagggcgtgctgctgactgatggctccgagaaggacaagaagggcaaaggcggcaccaagaccctgatgaacaccatcatgcagctgcggaagatctgcaaccacccctacatgttccagcacatcgaggagtccttttccgagcacttggggttcactggcggcattgtccaagggctggacctgtaccgagcctcgggtaaatttgagcttcttgatagaattcttcccaaactccgagcaaccaaccacaaagtgctgctgttctgccaaatgacctccctcatgaccatcatggaagattactttgcgtatcgcggctttaaatacctcaggcttgatggaaccacgaaggcggaggaccggggcatgctgctgaaaaccttcaacgagcccggctctgagtacttcatcttcctgctcagcacccgggctggggggctcggcctgaacctccagtcggcagacactgtgatcatttttgacagcgactggaatcctcaccaggacctgcaagcgcaggaccgagcccaccgcatcgggcagcagaacgaggtgcgtgtgctccgcctctgcaccgtcaacagcgtggaggagaagatcctagctgcagccaagtacaagctcaacgtggaccagaaggtgatccaggccggcatgttcgaccagaagtcctccagccatgagcggcgcgccttcctgcaggccatcctggagcacgaggagcaggatgagagcagacactgcagcacgggcagcggcagtgccagcttcgcccacactgcccctccgccagcgggcgtcaaccccgacttggaggagccacctctaaaggaggaagacgaggtgcccgacgacgagaccgtcaaccagatgatcgcccggcacgaggaggagtttgatctgttcatgcgcatggacctggaccgcaggcgcgaggaggcccgcaaccccaagcggaagccgcgcctcatggaggaggacgagctcccctcgtggatcatcaaggacgaygcggaggtggagcggctgacctgtgaggaggaggaggagaagatgttcggccgtggctcccgccaccgcaaggaggtggactacagcgactcactgacggagaagcagtggctcaagaaaattacaggaaaagatatccatgacacagccagcagtgtggcacgtgggctacaattccagcgtggccttcagttctgcacacgtgcgtcaaaggccatcgaggagggcacgctggaggagatcgaagaggaggtccggcagaagaaatcatcacggaagcgcaagcgagacagcgacgccggctcctccaccccgaccaccagcacccgcagccgcgacaaggacgacgagagcaagaagcagaagaagcgcgggcggccgcctgccgagaaactctcccctaacccacccaacctcaccaagaagatgaagaagattgtgsatgccgtgatcaagtacaaggacagcagcagtggacgtcagctcagcgaggtcttcatccagctgccctcgcgaaaggagctgcccgagtactacgagctcatccgcaagcccgtggacttcaagaagataaaggagcgcattcgcaaccacaagtaccgcagcctcaaygacctagagaaggaygtcatgctcctgtgccagaacgcacagaccttcaacctggagggctccctgatctatgaagactccatcgtcttgcagtcggtcttcaccagcgtgcggcagaaaatcgagaaggaggatgacagtgaaggcgaggagagtgaggaggaggaagagggcgaggaggaaggctccgaatccgaatctcggtccgtcaaagtgaagatcaagcttggccggaaggagaaggcacaggaccggctgaagggcggccggcggcggccgagccgagggtcccgagccaagccggtcgtgagtgacgaygacagtgaggaggaacaagaggaggaccgctcaggaagtggcagcgaagaagactgagccccgacattccagtctcgaccccgagcccctcgttccagagctgagatggcataggccttagcagtaacgggtagcagcagatgtagtttcagacttggagtaaaactgtataaacaaaagaatcttccatatttatacagcagagaagctgtaggactgtttgtgactggccctgtcctggcatcagtagcatctgtaacagcattaactgtcttaaagagagagagagagaattccgaattggggaacacacgatacctgtttttcttttccgttgctggcagtactgttgcgccgcagtttggagtcactgtagttaagtgtggatgcatgtgcgtcaccgtccactcctcctactgtattttattggacaggtcagactcgccgggggcccggcgagggtatgtcagtgtcactggatgtcaaacagtaataaattaaaccaacaacaaaacgcacagcc

SEQ ID NO: 5632 - DNA, 5438 bp, Homo sapiens
gaggccactgtctgcagctcccgtgaagatgtccactccagacccacccctgggcggaactcctcggccaggtccttccccgggccctggcccttcccctggagccatgctgggccctagcccgggtccctcgccgggctccgcccacagcatgatggggcccagcccagggccgccctcagcaggacaccccatccccacccaggggcctggagggtaccctcaggacaacatgcaccagatgcacaagcccatggagtccatgcatgagaagggcatgtcggacgacccgcgctacaaccagatgaaaggaatggggatgcggtcagggggccatgctgggatggggcccccgcccagccccatggaccagcactcccaaggttacccctcgcccctgggtggctctgagcatgcctctagtccagttccagccagtggcccgtcttcggggccccagatgtcttccgggccaggaggtgccccgctggatggtgctgacccccaggccttkgggcagcagaaccggggcccaaccccatttaaccagaaccagctgcaccagctcagagctcagatcatggcctacaagatgctggccagggggcagcccctccccgaccacctgcagatggcggtgcagggcaagcggccgatgcccgggatgcagcagcagatgccaacgctacctccaccctcggtgtccgcaacaggacccggccctggccctggcccyggccccggcccgggtcccggcccggcacctccaaattacagcaggcctcatggtatgggagggcccaacatgcctcccccaggaccctcgggcgtgccccccgggatgccaggccagcctcctggagggcctcccaagccctggcctgaaggacccatggcgaatgctgctgcccccacgagcacccctcagaagctgattcccccgcagccaacgggccgcccttcccccgcgccccctgccgtcccacccgccgcctcgcccgtgatgccaccgcagacccagtcccccgggcagccggcccagcccgcgcccatggtgccactgcaccagaagcagagccgcatcacccccatccagaagccgcggggcctcgaccctgtggagatcctgcaggagcgcgagtacaggctgcaggctcgcatcgcacaccgaattcaggaacttgaaaaccttcccgggtccctggccggggatttgcgaaccaaagcgaccattgagctcaaggccctcaggctgctgaacttccagaggcagctgcgccaggaggtggtggtgtgcatgcggagggacacagcgctggagacagccctcaatgctaaggcctacaagcgcagcaagcgccagtccctgcgcgaggcccgcatcactgagaagctggagaagcagcagaagatcgagcaggagcgcaagcgccggcagaarcaccaggaatacctcaatagcattctccagcatgccaaggatttcaaggaatatcacagatccgtcacaggcaaaatccagaagctgaccaaggcrgtggccacgtaccaygccaacacggagcgggagcagaagaaagagaaygagcggatcgagaaggagcgcatgcggaggctcatggctgaagatgaggaggggtaccgcaagctcatcgaccagaagaaggacaagcgcctggcctacctcttgcagcagacagacgagtacgwggctaacctcacggagctggtgcsgcagcacaaggctgcccaggtcgccaaggagaaaaagaagaaaaagaaaaagaagaaggcagaaaatgcagaaggacagacgcctgccattgggccggatggcgagcctctggacgagaccagccagatgagcgacctcccggtgaaggtgatccacgtggagagtgggaagatcctcacaggcacagatgcccccaaagccgggcagctggaggcctggctcgagatgaacccggggtatgaagtagctccgaggtctgatagtgaagaaagtggctcagaagaagaggaagaggaggaggaggaagagcagccgcaggcagcacagcctcccaccctgcccgtggaggagaagaagaagattccagatccagacagcgatgacgtctctgaggtggacgcgcggcacatcattgagaatgccaagcaagatgtcgatgatgaatatggcgtgtcccaggcccttgcacgtggcctgcagtcctactatgccgtggcccatgctgtcactgagagagtggacaagcagtcagcgcttatggtcaatggtgtcctcaaacagtaccagatcaaaggtttggagtggctggtgtccctgtacaacaacaacctgaacggcatcctggccgacgagatgggcctggggaagaccatccagaccatcgcgctcatcacgtacctcatggagcacaaacgcatcaatgggcccttcctcatcatcgtgcctctctcaacgctgtccaactgggcgtacgagtttgacaagtgggccccctccgtggtgaaggtgtcttacaagggatccccagcagcaagacgggcctttgtcccccagctccggagtgggaagttcaacgtcttgctgacgacgtacgagtacatcatcaaagacaagcacatcctcgccaagatccgttggaagtacatgattgtggacgaaggtcaccgcatgaagaaccaccactgcaagctgacgcaggtgctcaacacgcactatgtggcaccccgccgcctgctgctgacgggcacaccgctgcagaacaagcttcccgagctctgggcgctgctcaacttcctgctgcccaccatcttcaagagctgcagcaccttcgagcagtggtttaacgcaccctttgccatgaccggggaaaaggtggacctgaatgaggaggaaaccattctcatcatccggcgtctccacaaagtgctgcggcccttcttgctccgacgactcaagaaggaagtcgaggcccagttgcccgaaaaggtggagtacgtcatcaagtgcgacatgtctgcgctgcagcgagtgctctaccgccacatgcaggccaagggcgtgctgctgactgatggctccgagaaggacaagaagggcaaaggcggcaccaagaccctgatgaacaccatcatgcagctgcggaagatctgcaaccacccctacatgttccagcacatcgaggagtccttttccgagcacttggggttcactggcggcattgtccaagggctggacctgtaccgagcctcgggtaaatttgagcttcttgatagaattcttcccaaactccgagcaaccaaccacaaagtgctgctgttctgccaaatgacctccctcatgaccatcatggaagattactttgcgtatcgcggctttaaatacctcaggcttgatggaaccacgaaggcggaggaccggggcatgctgctgaaaaccttcaacgagcccggctctgagtacttcatcttcctgctcagcacccgggctggggggctcggcctgaacctccagtcggcagacactgtgatcatttttgacagcgactggaatcctcaccaggacctgcaagcgcaggaccgagcccaccgcatcgggcagcagaacgaggtgcgtgtgctccgcctctgcaccgtcaacagcgtggaggagaagatcctagctgcagccaagtacaagctcaacgtggaccagaaggtgatccaggccggcatgttcgaccagaagtcctccagccatgagcggcgcgccttcctgcaggccatcctggagcacgaggagcaggatgagagcagacactgcagcacgggcagcggcagtgccagcttcgcccacactgcccctccgccagcgggcgtcaaccccgacttggaggagccacctctaaaggaggaagacgaggtgcccgacgacgagaccgtcaaccagatgatcgcccggcacgaggaggagtttgatctgttcatgcgcatggacctggaccgcaggcgcgaggaggcccgcaaccccaagcggaagccgcgcctcatggaggaggacgagctcccctcgtggatcatcaaggacgaygcggaggtggagcggctgacctgtgaggaggaggaggagaagatgttcggccgtggctcccgccaccgcaaggaggtggactacagcgactcactgacggagaagcagtggctcaaggccatcgaggagggcacgctggaggagatcgaagaggaggtccggcagaagaaatcatcacggaagcgcaagcgagacagcgacgccggctcctccaccccgaccaccagcacccgcagccgcgacaaggacgacgagagcaagaagcagaagaagcgcgggcggccgcctgccgagaaactctcccctaacccacccaacctcaccaagaagatgaagaagattgtgsatgccgtgatcaagtacaaggacagcagcagtggacgtcagctcagcgaggtcttcatccagctgccctcgcgaaaggagctgcccgagtactacgagctcatccgcaagcccgtggacttcaagaagataaaggagcgcattcgcaaccacaagtaccgcagcctcaaygacctagagaaggaygtcatgctcctgtgccagaacgcacagaccttcaacctggagggctccctgatctatgaagactccatcgtcttgcagtcggtcttcaccagcgtgcggcagaaaatcgagaaggaggatgacagtgaaggcgaggagagtgaggaggaggaagagggcgaggaggaaggctccgaatccgaatctcggtccgtcaaagtgaagatcaagcttggccggaaggagaaggcacaggaccggctgaagggcggccggcggcggccgagccgagggtcccgagccaagccggtcgtgagtgacgaygacagtgaggaggaacaagaggaggaccgctcaggaagtggcagcgaagaagactgagccccgacattccagtctcgaccccgagcccctcgttccagagctgagatggcataggccttagcagtaacgggtagcagcagatgtagtttcagacttggagtaaaactgtataaacaaaagaatcttccatatttatacagcagagaagctgtaggactgtttgtgactggccctgtcctggcatcagtagcatctgtaacagcattaactgtcttaaagagagagagagagaattccgaattggggaacacacgatacctgtttttcttttccgttgctggcagtactgttgcgccgcagtttggagtcactgtagttaagtgtggatgcatgtgcgtcaccgtccactcctcctactgtattttattggacaggtcagactcgccgggggcccggcgagggtatgtcagtgtcactggatgtcaaacagtaataaattaaaccaacaacaaaacgcacagcc

SEQ ID NO: 5633 - DNA, 5587 bp, Homo sapiens
gggcgggcgcgcgcgcgaggcttcccctcgtttggcggcggcggcggcttctttgtttcgtgaagagaagcgagacgcccattctgcccccggccccgcgcggaggggcgggggaggcgccgggaagtcgacggcgccggcggctcctggaggccactgtctgcagctcccgtgaagatgtccactccagacccacccctgggcggaactcctcggccaggtccttccccgggccctggcccttcccctggagccatgctgggccctagcccgggtccctcgccgggctccgcccacagcatgatggggcccagcccagggccgccctcagcaggacaccccatccccacccaggggcctggagggtaccctcaggacaacatgcaccagatgcacaagcccatggagtccatgcatgagaagggcatgtcggacgacccgcgctacaaccagatgaaaggaatggggatgcggtcagggggccatgctgggatggggcccccgcccagccccatggaccagcactcccaaggttacccctcgcccctgggtggctctgagcatgcctctagtccagttccagccagtggcccgtcttcggggccccagatgtcttccgggccaggaggtgccccgctggatggtgctgacccccaggccttkgggcagcagaaccggggcccaaccccatttaaccagaaccagctgcaccagctcagagctcagatcatggcctacaagatgctggccagggggcagcccctccccgaccacctgcagatggcggtgcagggcaagcggccgatgcccgggatgcagcagcagatgccaacgctacctccaccctcggtgtccgcaacaggacccggccctggccctggcccyggccccggcccgggtcccggcccggcacctccaaattacagcaggcctcatggtatgggagggcccaacatgcctcccccaggaccctcgggcgtgccccccgggatgccaggccagcctcctggagggcctcccaagccctggcctgaaggacccatggcgaatgctgctgcccccacgagcacccctcagaagctgattcccccgcagccaacgggccgcccttcccccgcgccccctgccgtcccacccgccgcctcgcccgtgatgccaccgcagacccagtcccccgggcagccggcccagcccgcgcccatggtgccactgcaccagaagcagagccgcatcacccccatccagaagccgcggggcctcgaccctgtggagatcctgcaggagcgcgagtacaggctgcaggctcgcatcgcacaccgaattcaggaacttgaaaaccttcccgggtccctggccggggatttgcgaaccaaagcgaccattgagctcaaggccctcaggctgctgaacttccagaggcagctgcgccaggaggtggtggtgtgcatgcggagggacacagcgctggagacagccctcaatgctaaggcctacaagcgcagcaagcgccagtccctgcgcgaggcccgcatcactgagaagctggagaagcagcagaagatcgagcaggagcgcaagcgccggcagaarcaccaggaatacctcaatagcattctccagcatgccaaggatttcaaggaatatcacagatccgtcacaggcaaaatccagaagctgaccaaggcrgtggccacgtaccaygccaacacggagcgggagcagaagaaagagaaygagcggatcgagaaggagcgcatgcggaggctcatggctgaagatgaggaggggtaccgcaagctcatcgaccagaagaaggacaagcgcctggcctacctcttgcagcagacagacgagtacgwggctaacctcacggagctggtgcsgcagcacaaggctgcccaggtcgccaaggagaaaaagaagaaaaagaaaaagaagaaggcagaaaatgcagaaggacagacgcctgccattgggccggatggcgagcctctggacgagaccagccagatgagcgacctcccggtgaaggtgatccacgtggagagtgggaagatcctcacaggcacagatgcccccaaagccgggcagctggaggcctggctcgagatgaacccggggtatgaagtagctccgaggtctgatagtgaagaaagtggctcagaagaagaggaagaggaggaggaggaagagcagccgcaggcagcacagcctcccaccctgcccgtggaggagaagaagaagattccagatccagacagcgatgacgtctctgaggtggacgcgcggcacatcattgagaatgccaagcaagatgtcgatgatgaatatggcgtgtcccaggcccttgcacgtggcctgcagtcctactatgccgtggcccatgctgtcactgagagagtggacaagcagtcagcgcttatggtcaatggtgtcctcaaacagtaccagatcaaaggtttggagtggctggtgtccctgtacaacaacaacctgaacggcatcctggccgacgagatgggcctggggaagaccatccagaccatcgcgctcatcacgtacctcatggagcacaaacgcatcaatgggcccttcctcatcatcgtgcctctctcaacgctgtccaactgggcgtacgagtttgacaagtgggccccctccgtggtgaaggtgtcttacaagggatccccagcagcaagacgggcctttgtcccccagctccggagtgggaagttcaacgtcttgctgacgacgtacgagtacatcatcaaagacaagcacatcctcgccaagatccgttggaagtacatgattgtggacgaaggtcaccgcatgaagaaccaccactgcaagctgacgcaggtgctcaacacgcactatgtggcaccccgccgcctgctgctgacgggcacaccgctgcagaacaagcttcccgagctctgggcgctgctcaacttcctgctgcccaccatcttcaagagctgcagcaccttcgagcagtggtttaacgcaccctttgccatgaccggggaaaaggtggacctgaatgaggaggaaaccattctcatcatccggcgtctccacaaagtgctgcggcccttcttgctccgacgactcaagaaggaagtcgaggcccagttgcccgaaaaggtggagtacgtcatcaagtgcgacatgtctgcgctgcagcgagtgctctaccgccacatgcaggccaagggcgtgctgctgactgatggctccgagaaggacaagaagggcaaaggcggcaccaagaccctgatgaacaccatcatgcagctgcggaagatctgcaaccacccctacatgttccagcacatcgaggagtccttttccgagcacttggggttcactggcggcattgtccaagggctggacctgtaccgagcctcgggtaaatttgagcttcttgatagaattcttcccaaactccgagcaaccaaccacaaagtgctgctgttctgccaaatgacctccctcatgaccatcatggaagattactttgcgtatcgcggctttaaatacctcaggcttgatggaaccacgaaggcggaggaccggggcatgctgctgaaaaccttcaacgagcccggctctgagtacttcatcttcctgctcagcacccgggctggggggctcggcctgaacctccagtcggcagacactgtgatcatttttgacagcgactggaatcctcaccaggacctgcaagcgcaggaccgagcccaccgcatcgggcagcagaacgaggtgcgtgtgctccgcctctgcaccgtcaacagcgtggaggagaagatcctagctgcagccaagtacaagctcaacgtggaccagaaggtgatccaggccggcatgttcgaccagaagtcctccagccatgagcggcgcgccttcctgcaggccatcctggagcacgaggagcaggatgagagcagacactgcagcacgggcagcggcagtgccagcttcgcccacactgcccctccgccagcgggcgtcaaccccgacttggaggagccacctctaaaggaggaagacgaggtgcccgacgacgagaccgtcaaccagatgatcgcccggcacgaggaggagtttgatctgttcatgcgcatggacctggaccgcaggcgcgaggaggcccgcaaccccaagcggaagccgcgcctcatggaggaggacgagctcccctcgtggatcatcaaggacgaygcggaggtggagcggctgacctgtgaggaggaggaggagaagatgttcggccgtggctcccgccaccgcaaggaggtggactacagcgactcactgacggagaagcagtggctcaaggccatcgaggagggcacgctggaggagatcgaagaggaggtccggcagaagaaatcatcacggaagcgcaagcgagacagcgacgccggctcctccaccccgaccaccagcacccgcagccgcgacaaggacgacgagagcaagaagcagaagaagcgcgggcggccgcctgccgagaaactctcccctaacccacccaacctcaccaagaagatgaagaagattgtgsatgccgtgatcaagtacaaggacagcagcagtggacgtcagctcagcgaggtcttcatccagctgccctcgcgaaaggagctgcccgagtactacgagctcatccgcaagcccgtggacttcaagaagataaaggagcgcattcgcaaccacaagtaccgcagcctcaaygacctagagaaggaygtcatgctcctgtgccagaacgcacagaccttcaacctggagggctccctgatctatgaagactccatcgtcttgcagtcggtcttcaccagcgtgcggcagaaaatcgagaaggaggatgacagtgaaggcgaggagagtgaggaggaggaagagggcgaggaggaaggctccgaatccgaatctcggtccgtcaaagtgaagatcaagcttggccggaaggagaaggcacaggaccggctgaagggcggccggcggcggccgagccgagggtcccgagccaagccggtcgtgagtgacgaygacagtgaggaggaacaagaggaggaccgctcaggaagtggcagcgaagaagactgagccccgacattccagtctcgaccccgagcccctcgttccagagctgagatggcataggccttagcagtaacgggtagcagcagatgtagtttcagacttggagtaaaactgtataaacaaaagaatcttccatatttatacagcagagaagctgtaggactgtttgtgactggccctgtcctggcatcagtagcatctgtaacagcattaactgtcttaaagagagagagagagaattccgaattggggaacacacgatacctgtttttcttttccgttgctggcagtactgttgcgccgcagtttggagtcactgtagttaagtgtggatgcatgtgcgtcaccgtccactcctcctactgtattttattggacaggtcagactcgccgggggcccggcgagggtatgtcagtgtcactggatgtcaaacagtaataaattaaaccaacaacaaaacgcacagcc

SEQ ID NO: 5634 - DNA, 4468 bp, Homo sapiens
gggcgggcgcgcgcgcgaggcttcccctcgtttggcggcggcggcggcttctttgtttcgtgaagagaagcgagacgcccattctgcccccggccccgcgcggaggggcgggggaggcgccgggaagtcgacggcgccggcggctcctggaggccactgtctgcagctcccgtgaagatgtccactccagacccacccctgggcggaactcctcggccaggtccttccccgggccctggcccttcccctggagccatgctgggccctagcccgggtccctcgccgggctccgcccacagcatgatggggcccagcccagggccgccctcagcaggacaccccatccccacccaggggcctggagggtaccctcaggacaacatgcaccagatgcacaagcccatggagtccatgcatgagaagggcatgtcggacgacccgcgctacaaccagatgaaaggaatggggatgcggtcagggggccatgctgggatggggcccccgcccagccccatggaccagcactcccaaggttacccctcgcccctgggtggctctgagcatgcctctagtccagttccagccagtggcccgtcttcggggccccagatgtcttccgggccaggaggtgccccgctggatggtgctgacccccaggccttkgggcagcagaaccggggcccaaccccatttaaccagaaccagaagaaagagaaygagcggatcgagaaggagcgcatgcggaggctcatggctgaagatgaggaggggtaccgcaagctcatcgaccagaagaaggacaagcgcctggcctacctcttgcagcagacagacgagtacgwggctaacctcacggagctggtgcsgcagcacaaggctgcccaggtcgccaaggagaaaaagaagaaaaagaaaaagaagaaggcagaaaatgcagaaggacagacgcctgccattgggccggatggcgagcctctggacgagaccagccagatgagcgacctcccggtgaaggtgatccacgtggagagtgggaagatcctcacaggcacagatgcccccaaagccgggcagctggaggcctggctcgagatgaacccggggtatgaagtagctccgaggtctgatagtgaagaaagtggctcagaagaagaggaagaggaggaggaggaagagcagccgcaggcagcacagcctcccaccctgcccgtggaggagaagaagaagattccagatccagacagcgatgacgtctctgaggtggacgcgcggcacatcattgagaatgccaagcaagatgtcgatgatgaatatggcgtgtcccaggcccttgcacgtggcctgcagtcctactatgccgtggcccatgctgtcactgagagagtggacaagcagtcagcgcttatggtcaatggtgtcctcaaacagtaccagatcaaaggtttggagtggctggtgtccctgtacaacaacaacctgaacggcatcctggccgacgagatgggcctggggaagaccatccagaccatcgcgctcatcacgtacctcatggagcacaaacgcatcaatgggcccttcctcatcatcgtgcctctctcaacgctgtccaactgggcgtacgagtttgacaagtgggccccctccgtggtgaaggtgtcttacaagggatccccagcagcaagacgggcctttgtcccccagctccggagtgggaagttcaacgtcttgctgacgacgtacgagtacatcatcaaagacaagcacatcctcgccaagatccgttggaagtacatgattgtggacgaaggtcaccgcatgaagaaccaccactgcaagctgacgcaggtgctcaacacgcactatgtggcaccccgccgcctgctgctgacgggcacaccgctgcagaacaagcttcccgagctctgggcgctgctcaacttcctgctgcccaccatcttcaagagctgcagcaccttcgagcagtggtttaacgcaccctttgccatgaccggggaaaaggtggacctgaatgaggaggaaaccattctcatcatccggcgtctccacaaagtgctgcggcccttcttgctccgacgactcaagaaggaagtcgaggcccagttgcccgaaaaggtggagtacgtcatcaagtgcgacatgtctgcgctgcagcgagtgctctaccgccacatgcaggccaagggcgtgctgctgactgatggctccgagaaggacaagaagggcaaaggcggcaccaagaccctgatgaacaccatcatgcagctgcggaagatctgcaaccacccctacatgttccagcacatcgaggagtccttttccgagcacttggggttcactggcggcattgtccaagggctggacctgtaccgagcctcgggtaaatttgagcttcttgatagaattcttcccaaactccgagcaaccaaccacaaagtgctgctgttctgccaaatgacctccctcatgaccatcatggaagattactttgcgtatcgcggctttaaatacctcaggcttgatggaaccacgaaggcggaggaccggggcatgctgctgaaaaccttcaacgagcccggctctgagtacttcatcttcctgctcagcacccgggctggggggctcggcctgaacctccagtcggcagacactgtgatcatttttgacagcgactggaatcctcaccaggacctgcaagcgcaggaccgagcccaccgcatcgggcagcagaacgaggtgcgtgtgctccgcctctgcaccgtcaacagcgtggaggagaagatcctagctgcagccaagtacaagctcaacgtggaccagaaggtgatccaggccggcatgttcgaccagaagtcctccagccatgagcggcgcgccttcctgcaggccatcctggagcacgaggagcaggatgaggaggaagacgaggtgcccgacgacgagaccgtcaaccagatgatcgcccggcacgaggaggagtttgatctgttcatgcgcatggacctggaccgcaggcgcgaggaggcccgcaaccccaagcggaagccgcgcctcatggaggaggacgagctcccctcgtggatcatcaaggacgaygcggaggtggagcggctgacctgtgaggaggaggaggagaagatgttcggccgtggctcccgccaccgcaaggaggtggactacagcgactcactgacggagaagcagtggctcaaggccatcgaggagggcacgctggaggagatcgaagaggaggtccggcagaagaaatcatcacggaagcgcaagcgagacagcgacgccggctcctccaccccgaccaccagcacccgcagccgcgacaaggacgacgagagcaagaagcagaagaagcgcgggcggccgcctgccgagaaactctcccctaacccacccaacctcaccaagaagatgaagaagattgtgsatgccgtgatcaagtacaaggacagcagtggacgtcagctcagcgaggtcttcatccagctgccctcgcgaaaggagctgcccgagtactacgagctcatccgcaagcccgtggacttcaagaagataaaggagcgcattcgcaaccacaagtaccgcagcctcaaygacctagagaaggaygtcatgctcctgtgccagaacgcacagaccttcaacctggagggctccctgatctatgaagactccatcgtcttgcagtcggtcttcaccagcgtgcggcagaaaatcgagaaggaggatgacagtgaaggcgaggagagtgaggaggaggaagagggcgaggaggaaggctccgaatccgaatctcggtccgtcaaagtgaagatcaagcttggccggaaggagaaggcacaggaccggctgaagggcggccggcggcggccgagccgagggtcccgagccaagccggtcgtgagtgacgaygacagtgaggaggaacaagaggaggaccgctcaggaagtggcagcgaagaagactgagccccgacattccagtctcgaccccgagcccctcgttccagagctgagatggcataggccttagcagtaacgggtagcagcagatgtagtttcagacttggagtaaaactgtataaacaaaagaatcttccatatttatacagcagagaagctgtaggactgtttgtgactggccctgtcctggcatcagtagcatctgtaacagcattaactgtcttaaagagagagagagagaattccgaattggggaacacacgatacctgtttttcttttccgttgctggcagtactgttgcgccgcagtttggagtcactgtagttaagtgtggatgcatgtgcgtcaccgtccactcctcctactgtattttattggacaggtcagactcgccgggggcccggcgagggtatgtcagtgtcactggatgtcaaacagtaataaattaaaccaacaacaaaacgcacagcc

SEQ ID NO: 5635 - DNA, 5488 bp, Homo sapiens
gggcgggcgcgcgcgcgaggcttcccctcgtttggcggcggcggcggcttctttgtttcgtgaagagaagcgagacgcccattctgcccccggccccgcgcggaggggcgggggaggcgccgggaagtcgacggcgccggcggctcctggaggccactgtctgcagctcccgtgaagatgtccactccagacccacccctgggcggaactcctcggccaggtccttccccgggccctggcccttcccctggagccatgctgggccctagcccgggtccctcgccgggctccgcccacagcatgatggggcccagcccagggccgccctcagcaggacaccccatccccacccaggggcctggagggtaccctcaggacaacatgcaccagatgcacaagcccatggagtccatgcatgagaagggcatgtcggacgacccgcgctacaaccagatgaaaggaatggggatgcggtcagggggccatgctgggatggggcccccgcccagccccatggaccagcactcccaaggttacccctcgcccctgggtggctctgagcatgcctctagtccagttccagccagtggcccgtcttcggggccccagatgtcttccgggccaggaggtgccccgctggatggtgctgacccccaggccttkgggcagcagaaccggggcccaaccccatttaaccagaaccagctgcaccagctcagagctcagatcatggcctacaagatgctggccagggggcagcccctccccgaccacctgcagatggcggtgcagggcaagcggccgatgcccgggatgcagcagcagatgccaacgctacctccaccctcggtgtccgcaacaggacccggccctggccctggcccyggccccggcccgggtcccggcccggcacctccaaattacagcaggcctcatggtatgggagggcccaacatgcctcccccaggaccctcgggcgtgccccccgggatgccaggccagcctcctggagggcctcccaagccctggcctgaaggacccatggcgaatgctgctgcccccacgagcacccctcagaagctgattcccccgcagccaacgggccgcccttcccccgcgccccctgccgtcccacccgccgcctcgcccgtgatgccaccgcagacccagtcccccgggcagccggcccagcccgcgcccatggtgccactgcaccagaagcagagccgcatcacccccatccagaagccgcggggcctcgaccctgtggagatcctgcaggagcgcgagtacaggctgcaggctcgcatcgcacaccgaattcaggaacttgaaaaccttcccgggtccctggccggggatttgcgaaccaaagcgaccattgagctcaaggccctcaggctgctgaacttccagaggcagctgcgccaggaggtggtggtgtgcatgcggagggacacagcgctggagacagccctcaatgctaaggcctacaagcgcagcaagcgccagtccctgcgcgaggcccgcatcactgagaagctggagaagcagcagaagatcgagcaggagcgcaagcgccggcagaarcaccaggaatacctcaatagcattctccagcatgccaaggatttcaaggaatatcacagatccgtcacaggcaaaatccagaagctgaccaaggcrgtggccacgtaccaygccaacacggagcgggagcagaagaaagagaaygagcggatcgagaaggagcgcatgcggaggctcatggctgaagatgaggaggggtaccgcaagctcatcgaccagaagaaggacaagcgcctggcctacctcttgcagcagacagacgagtacgwggctaacctcacggagctggtgcsgcagcacaaggctgcccaggtcgccaaggagaaaaagaagaaaaagaaaaagaagaaggcagaaaatgcagaaggacagacgcctgccattgggccggatggcgagcctctggacgagaccagccagatgagcgacctcccggtgaaggtgatccacgtggagagtgggaagatcctcacaggcacagatgcccccaaagccgggcagctggaggcctggctcgagatgaacccggggtatgaagtagctccgaggtctgatagtgaagaaagtggctcagaagaagaggaagaggaggaggaggaagagcagccgcaggcagcacagcctcccaccctgcccgtggaggagaagaagaagattccagatccagacagcgatgacgtctctgaggtggacgcgcggcacatcattgagaatgccaagcaagatgtcgatgatgaatatggcgtgtcccaggcccttgcacgtggcctgcagtcctactatgccgtggcccatgctgtcactgagagagtggacaagcagtcagcgcttatggtcaatggtgtcctcaaacagtaccagatcaaaggtttggagtggctggtgtccctgtacaacaacaacctgaacggcatcctggccgacgagatgggcctggggaagaccatccagaccatcgcgctcatcacgtacctcatggagcacaaacgcatcaatgggcccttcctcatcatcgtgcctctctcaacgctgtccaactgggcgtacgagtttgacaagtgggccccctccgtggtgaaggtgtcttacaagggatccccagcagcaagacgggcctttgtcccccagctccggagtgggaagttcaacgtcttgctgacgacgtacgagtacatcatcaaagacaagcacatcctcgccaagatccgttggaagtacatgattgtggacgaaggtcaccgcatgaagaaccaccactgcaagctgacgcaggtgctcaacacgcactatgtggcaccccgccgcctgctgctgacgggcacaccgctgcagaacaagcttcccgagctctgggcgctgctcaacttcctgctgcccaccatcttcaagagctgcagcaccttcgagcagtggtttaacgcaccctttgccatgaccggggaaaaggtggacctgaatgaggaggaaaccattctcatcatccggcgtctccacaaagtgctgcggcccttcttgctccgacgactcaagaaggaagtcgaggcccagttgcccgaaaaggtggagtacgtcatcaagtgcgacatgtctgcgctgcagcgagtgctctaccgccacatgcaggccaagggcgtgctgctgactgatggctccgagaaggacaagaagggcaaaggcggcaccaagaccctgatgaacaccatcatgcagctgcggaagatctgcaaccacccctacatgttccagcacatcgaggagtccttttccgagcacttggggttcactggcggcattgtccaagggctggacctgtaccgagcctcgggtaaatttgagcttcttgatagaattcttcccaaactccgagcaaccaaccacaaagtgctgctgttctgccaaatgacctccctcatgaccatcatggaagattactttgcgtatcgcggctttaaatacctcaggcttgatggaaccacgaaggcggaggaccggggcatgctgctgaaaaccttcaacgagcccggctctgagtacttcatcttcctgctcagcacccgggctggggggctcggcctgaacctccagtcggcagacactgtgatcatttttgacagcgactggaatcctcaccaggacctgcaagcgcaggaccgagcccaccgcatcgggcagcagaacgaggtgcgtgtgctccgcctctgcaccgtcaacagcgtggaggagaagatcctagctgcagccaagtacaagctcaacgtggaccagaaggtgatccaggccggcatgttcgaccagaagtcctccagccatgagcggcgcgccttcctgcaggccatcctggagcacgaggagcaggatgaggaggaagacgaggtgcccgacgacgagaccgtcaaccagatgatcgcccggcacgaggaggagtttgatctgttcatgcgcatggacctggaccgcaggcgcgaggaggcccgcaaccccaagcggaagccgcgcctcatggaggaggacgagctcccctcgtggatcatcaaggacgaygcggaggtggagcggctgacctgtgaggaggaggaggagaagatgttcggccgtggctcccgccaccgcaaggaggtggactacagcgactcactgacggagaagcagtggctcaaggccatcgaggagggcacgctggaggagatcgaagaggaggtccggcagaagaaatcatcacggaagcgcaagcgagacagcgacgccggctcctccaccccgaccaccagcacccgcagccgcgacaaggacgacgagagcaagaagcagaagaagcgcgggcggccgcctgccgagaaactctcccctaacccacccaacctcaccaagaagatgaagaagattgtgsatgccgtgatcaagtacaaggacagcagcagtggacgtcagctcagcgaggtcttcatccagctgccctcgcgaaaggagctgcccgagtactacgagctcatccgcaagcccgtggacttcaagaagataaaggagcgcattcgcaaccacaagtaccgcagcctcaaygacctagagaaggaygtcatgctcctgtgccagaacgcacagaccttcaacctggagggctccctgatctatgaagactccatcgtcttgcagtcggtcttcaccagcgtgcggcagaaaatcgagaaggaggatgacagtgaaggcgaggagagtgaggaggaggaagagggcgaggaggaaggctccgaatccgaatctcggtccgtcaaagtgaagatcaagcttggccggaaggagaaggcacaggaccggctgaagggcggccggcggcggccgagccgagggtcccgagccaagccggtcgtgagtgacgaygacagtgaggaggaacaagaggaggaccgctcaggaagtggcagcgaagaagactgagccccgacattccagtctcgaccccgagcccctcgttccagagctgagatggcataggccttagcagtaacgggtagcagcagatgtagtttcagacttggagtaaaactgtataaacaaaagaatcttccatatttatacagcagagaagctgtaggactgtttgtgactggccctgtcctggcatcagtagcatctgtaacagcattaactgtcttaaagagagagagagagaattccgaattggggaacacacgatacctgtttttcttttccgttgctggcagtactgttgcgccgcagtttggagtcactgtagttaagtgtggatgcatgtgcgtcaccgtccactcctcctactgtattttattggacaggtcagactcgccgggggcccggcgagggtatgtcagtgtcactggatgtcaaacagtaataaattaaaccaacaacaaaacgcacagcc

SEQ ID NO: 5636 - DNA, 4471 bp, Homo sapiens
gggcgggcgcgcgcgcgaggcttcccctcgtttggcggcggcggcggcttctttgtttcgtgaagagaagcgagacgcccattctgcccccggccccgcgcggaggggcgggggaggcgccgggaagtcgacggcgccggcggctcctggaggccactgtctgcagctcccgtgaagatgtccactccagacccacccctgggcggaactcctcggccaggtccttccccgggccctggcccttcccctggagccatgctgggccctagcccgggtccctcgccgggctccgcccacagcatgatggggcccagcccagggccgccctcagcaggacaccccatccccacccaggggcctggagggtaccctcaggacaacatgcaccagatgcacaagcccatggagtccatgcatgagaagggcatgtcggacgacccgcgctacaaccagatgaaaggaatggggatgcggtcagggggccatgctgggatggggcccccgcccagccccatggaccagcactcccaaggttacccctcgcccctgggtggctctgagcatgcctctagtccagttccagccagtggcccgtcttcggggccccagatgtcttccgggccaggaggtgccccgctggatggtgctgacccccaggccttkgggcagcagaaccggggcccaaccccatttaaccagaaccagaagaaagagaaygagcggatcgagaaggagcgcatgcggaggctcatggctgaagatgaggaggggtaccgcaagctcatcgaccagaagaaggacaagcgcctggcctacctcttgcagcagacagacgagtacgwggctaacctcacggagctggtgcsgcagcacaaggctgcccaggtcgccaaggagaaaaagaagaaaaagaaaaagaagaaggcagaaaatgcagaaggacagacgcctgccattgggccggatggcgagcctctggacgagaccagccagatgagcgacctcccggtgaaggtgatccacgtggagagtgggaagatcctcacaggcacagatgcccccaaagccgggcagctggaggcctggctcgagatgaacccggggtatgaagtagctccgaggtctgatagtgaagaaagtggctcagaagaagaggaagaggaggaggaggaagagcagccgcaggcagcacagcctcccaccctgcccgtggaggagaagaagaagattccagatccagacagcgatgacgtctctgaggtggacgcgcggcacatcattgagaatgccaagcaagatgtcgatgatgaatatggcgtgtcccaggcccttgcacgtggcctgcagtcctactatgccgtggcccatgctgtcactgagagagtggacaagcagtcagcgcttatggtcaatggtgtcctcaaacagtaccagatcaaaggtttggagtggctggtgtccctgtacaacaacaacctgaacggcatcctggccgacgagatgggcctggggaagaccatccagaccatcgcgctcatcacgtacctcatggagcacaaacgcatcaatgggcccttcctcatcatcgtgcctctctcaacgctgtccaactgggcgtacgagtttgacaagtgggccccctccgtggtgaaggtgtcttacaagggatccccagcagcaagacgggcctttgtcccccagctccggagtgggaagttcaacgtcttgctgacgacgtacgagtacatcatcaaagacaagcacatcctcgccaagatccgttggaagtacatgattgtggacgaaggtcaccgcatgaagaaccaccactgcaagctgacgcaggtgctcaacacgcactatgtggcaccccgccgcctgctgctgacgggcacaccgctgcagaacaagcttcccgagctctgggcgctgctcaacttcctgctgcccaccatcttcaagagctgcagcaccttcgagcagtggtttaacgcaccctttgccatgaccggggaaaaggtggacctgaatgaggaggaaaccattctcatcatccggcgtctccacaaagtgctgcggcccttcttgctccgacgactcaagaaggaagtcgaggcccagttgcccgaaaaggtggagtacgtcatcaagtgcgacatgtctgcgctgcagcgagtgctctaccgccacatgcaggccaagggcgtgctgctgactgatggctccgagaaggacaagaagggcaaaggcggcaccaagaccctgatgaacaccatcatgcagctgcggaagatctgcaaccacccctacatgttccagcacatcgaggagtccttttccgagcacttggggttcactggcggcattgtccaagggctggacctgtaccgagcctcgggtaaatttgagcttcttgatagaattcttcccaaactccgagcaaccaaccacaaagtgctgctgttctgccaaatgacctccctcatgaccatcatggaagattactttgcgtatcgcggctttaaatacctcaggcttgatggaaccacgaaggcggaggaccggggcatgctgctgaaaaccttcaacgagcccggctctgagtacttcatcttcctgctcagcacccgggctggggggctcggcctgaacctccagtcggcagacactgtgatcatttttgacagcgactggaatcctcaccaggacctgcaagcgcaggaccgagcccaccgcatcgggcagcagaacgaggtgcgtgtgctccgcctctgcaccgtcaacagcgtggaggagaagatcctagctgcagccaagtacaagctcaacgtggaccagaaggtgatccaggccggcatgttcgaccagaagtcctccagccatgagcggcgcgccttcctgcaggccatcctggagcacgaggagcaggatgaggaggaagacgaggtgcccgacgacgagaccgtcaaccagatgatcgcccggcacgaggaggagtttgatctgttcatgcgcatggacctggaccgcaggcgcgaggaggcccgcaaccccaagcggaagccgcgcctcatggaggaggacgagctcccctcgtggatcatcaaggacgaygcggaggtggagcggctgacctgtgaggaggaggaggagaagatgttcggccgtggctcccgccaccgcaaggaggtggactacagcgactcactgacggagaagcagtggctcaaggccatcgaggagggcacgctggaggagatcgaagaggaggtccggcagaagaaatcatcacggaagcgcaagcgagacagcgacgccggctcctccaccccgaccaccagcacccgcagccgcgacaaggacgacgagagcaagaagcagaagaagcgcgggcggccgcctgccgagaaactctcccctaacccacccaacctcaccaagaagatgaagaagattgtgsatgccgtgatcaagtacaaggacagcagcagtggacgtcagctcagcgaggtcttcatccagctgccctcgcgaaaggagctgcccgagtactacgagctcatccgcaagcccgtggacttcaagaagataaaggagcgcattcgcaaccacaagtaccgcagcctcaaygacctagagaaggaygtcatgctcctgtgccagaacgcacagaccttcaacctggagggctccctgatctatgaagactccatcgtcttgcagtcggtcttcaccagcgtgcggcagaaaatcgagaaggaggatgacagtgaaggcgaggagagtgaggaggaggaagagggcgaggaggaaggctccgaatccgaatctcggtccgtcaaagtgaagatcaagcttggccggaaggagaaggcacaggaccggctgaagggcggccggcggcggccgagccgagggtcccgagccaagccggtcgtgagtgacgaygacagtgaggaggaacaagaggaggaccgctcaggaagtggcagcgaagaagactgagccccgacattccagtctcgaccccgagcccctcgttccagagctgagatggcataggccttagcagtaacgggtagcagcagatgtagtttcagacttggagtaaaactgtataaacaaaagaatcttccatatttatacagcagagaagctgtaggactgtttgtgactggccctgtcctggcatcagtagcatctgtaacagcattaactgtcttaaagagagagagagagaattccgaattggggaacacacgatacctgtttttcttttccgttgctggcagtactgttgcgccgcagtttggagtcactgtagttaagtgtggatgcatgtgcgtcaccgtccactcctcctactgtattttattggacaggtcagactcgccgggggcccggcgagggtatgtcagtgtcactggatgtcaaacagtaataaattaaaccaacaacaaaacgcacagcc

SEQ ID NO: 5637 - DNA, 1563 bp, Homo sapiens
cgccggggctcacctgggtcagccctgagccctcgagcagggcggatcggccgctgcctgcttaaagctggggccgccaggagtgcgatcgcctgcggatctgcagctgggcaccggccgcaacgcccgccccgcgacggcagggaataaaggctcagggaccggcagttctactctagagcccaccagcctctcagagcctccggtgactggcctgtgtctccccctggatggacatgtggacggcgctgctcatcctgcaagccttgttgctaccctccctggctgatggtgccacccctgccctgcgctttgtagccgtgggtgactggggaggggtccccaatgccccattccacacggcccgggaaatggccaatgccaaggagatcgctcggactgtgcagatcctgggtgcagacttcatcctgtctctaggggacaatttttacttcactggtgtgcaagacatcaatgacaagaggttccaggagacctttgaggacgtattctctgaccgctcccttcgcaaagtgccctggtacgtgctagccggaaaccatgaccaccttggcaatgtctctrcccagattgcatactctaagatctccaagcgctggaacttccccagccctttctaccgcctgcacttcaagatcccacagaccaatgtgtctgtggccatttttatgctggacacagtgacactatgtggcaactcagatgacttcctcagccagcagcctgagaggccccgagacgtgaagctggcccgcacacagctgtcctggctcaagaaacagctggcggcggccagggaggactacgtgctggtggctggccactaccccgtgtggtccatagccgagcacgggcctacccactgcctggtcaagcagctacggccactgctggccacatacggggtcactgcctacctgtgcggccacgatcacaatctgcagtacctgcaagatgagaatggcgtgggctacgtgctgagtggggctgggaatttcatggacccctcaaagcggcaccagcgcaaggtccccaacggctatctgcgcttccactatgggactgaagactcactgggtggctttgcctatgtggagatcagctccaaagagatgactgtcacttacatcgaggcctcgggcaagtccctctttaagaccaggctgccgaggcgagccaggccctgaactcccatgactgcccagctctgaggcccgatctccactgttgggtgggtgggccctgccgggaccctgctcacaggcaggcttttcctccaacctgtggcgctgcagcagggcaggaaggggaaacacagctgatgaactgtggtgccacatgacccttgtggcacagatgcccacgtatgtgaaacacacatggacatgtgtcccagccacagtgttatgctctgtggctggctcacctttgctgagttccggggtgcaatgggggagggagggagggaaagcttcctcctaaatcaagcatctttctgttactgatgttcaataaaagaatagttgccaaggctgaaccagt

SEQ ID NO: 5638 - DNA, 1794 bp, Homo sapiens
ctgggtcagccctgagccctcgagcagggcggatcggccgctgcctgcttaaagctggggccgccaggagtgcgatcgcctgcggatctgcagctgggcaccggccgcaacgcccgccccgcgacggcagggactgaagggactcctgaatgtccgcgggacgtgtcgcggcggcgcccagcacggaggaggcaggcagggagggattcccacccagtgccacgtgagaacacaggcgtgcatcgcagacaagccacacaggcctcgcaggctcagcatacatgtctgcagcaacaccatcaggtacagagccgaggcccaggtaggcatgctcagctgcacgcaggaagcaagacacacccagacacacacagggaataaaggctcagggaccggcagttctactctagagcccaccagcctctcagagcctccggtgactggcctgtgtctccccctggatggacatgtggacggcgctgctcatcctgcaagccttgttgctaccctccctggctgatggtgccacccctgccctgcgctttgtagccgtgggtgactggggaggggtccccaatgccccattccacacggcccgggaaatggccaatgccaaggagatcgctcggactgtgcagatcctgggtgcagacttcatcctgtctctaggggacaatttttacttcactggtgtgcaagacatcaatgacaagaggttccaggagacctttgaggacgtattctctgaccgctcccttcgcaaagtgccctggtacgtgctagccggaaaccatgaccaccttggcaatgtctctrcccagattgcatactctaagatctccaagcgctggaacttccccagccctttctaccgcctgcacttcaagatcccacagaccaatgtgtctgtggccatttttatgctggacacagtgacactatgtggcaactcagatgacttcctcagccagcagcctgagaggccccgagacgtgaagctggcccgcacacagctgtcctggctcaagaaacagctggcggcggccagggaggactacgtgctggtggctggccactaccccgtgtggtccatagccgagcacgggcctacccactgcctggtcaagcagctacggccactgctggccacatacggggtcactgcctacctgtgcggccacgatcacaatctgcagtacctgcaagatgagaatggcgtgggctacgtgctgagtggggctgggaatttcatggacccctcaaagcggcaccagcgcaaggtccccaacggctatctgcgcttccactatgggactgaagactcactgggtggctttgcctatgtggagatcagctccaaagagatgactgtcacttacatcgaggcctcgggcaagtccctctttaagaccaggctgccgaggcgagccaggccctgaactcccatgactgcccagctctgaggcccgatctccactgttgggtgggtgggccctgccgggaccctgctcacaggcaggcttttcctccaacctgtggcgctgcagcagggcaggaaggggaaacacagctgatgaactgtggtgccacatgacccttgtggcacagatgcccacgtatgtgaaacacacatggacatgtgtcccagccacagtgttatgctctgtggctggctcacctttgctgagttccggggtgcaatgggggagggagggagggaaagcttcctcctaaatcaagcatctttctgttactgatgttcaataaaagaatagttgccaaggctgaaccagt

SEQ ID NO: 5639 - DNA, 1420 bp, Homo sapiens
ggaataaaggctcagggaccggcagttctactctagagcccaccagcctctcagagcctccggtgactggcctgtgtctccccctggatggacatgtggacggcgctgctcatcctgcaagccttgttgctaccctccctggctgatggtgccacccctgccctgcgctttgtagccgtgggtgactggggaggggtccccaatgccccattccacacggcccgggaaatggccaatgccaaggagatcgctcggactgtgcagatcctgggtgcagacttcatcctgtctctaggggacaatttttacttcactggtgtgcaagacatcaatgacaagaggttccaggagacctttgaggacgtattctctgaccgctcccttcgcaaagtgccctggtacgtgctagccggaaaccatgaccaccttggcaatgtctctrcccagattgcatactctaagatctccaagcgctggaacttccccagccctttctaccgcctgcacttcaagatcccacagaccaatgtgtctgtggccatttttatgctggacacagtgacactatgtggcaactcagatgacttcctcagccagcagcctgagaggccccgagacgtgaagctggcccgcacacagctgtcctggctcaagaaacagctggcggcggccagggaggactacgtgctggtggctggccactaccccgtgtggtccatagccgagcacgggcctacccactgcctggtcaagcagctacggccactgctggccacatacggggtcactgcctacctgtgcggccacgatcacaatctgcagtacctgcaagatgagaatggcgtgggctacgtgctgagtggggctgggaatttcatggacccctcaaagcggcaccagcgcaaggtccccaacggctatctgcgcttccactatgggactgaagactcactgggtggctttgcctatgtggagatcagctccaaagagatgactgtcacttacatcgaggcctcgggcaagtccctctttaagaccaggctgccgaggcgagccaggccctgaactcccatgactgcccagctctgaggcccgatctccactgttgggtgggtgggccctgccgggaccctgctcacaggcaggcttttcctccaacctgtggcgctgcagcagggcaggaaggggaaacacagctgatgaactgtggtgccacatgacccttgtggcacagatgcccacgtatgtgaaacacacatggacatgtgtcccagccacagtgttatgctctgtggctggctcacctttgctgagttccggggtgcaatgggggagggagggagggaaagcttcctcctaaatcaagcatctttctgttactgatgttcaataaaagaatagttgccaaggctgaaccagt

SEQ ID NO: 5640 - DNA, 1623 bp, Homo sapiens
ctgggtcagccctgagccctcgagcagggcggatcggccgctgcctgcttaaagctggggccgccaggagtgcgatcgcctgcggatctgcagctgggcaccggccgcaacgcccgccccgcgacggcagggactgaagggactcctgaatgtccgcgggacgtgtcgcggcggcgcccagcacggaggaggcaggcagggagggaataaaggctcagggaccggcagttctactctagagcccaccagcctctcagagcctccggtgactggcctgtgtctccccctggatggacatgtggacggcgctgctcatcctgcaagccttgttgctaccctccctggctgatggtgccacccctgccctgcgctttgtagccgtgggtgactggggaggggtccccaatgccccattccacacggcccgggaaatggccaatgccaaggagatcgctcggactgtgcagatcctgggtgcagacttcatcctgtctctaggggacaatttttacttcactggtgtgcaagacatcaatgacaagaggttccaggagacctttgaggacgtattctctgaccgctcccttcgcaaagtgccctggtacgtgctagccggaaaccatgaccaccttggcaatgtctctrcccagattgcatactctaagatctccaagcgctggaacttccccagccctttctaccgcctgcacttcaagatcccacagaccaatgtgtctgtggccatttttatgctggacacagtgacactatgtggcaactcagatgacttcctcagccagcagcctgagaggccccgagacgtgaagctggcccgcacacagctgtcctggctcaagaaacagctggcggcggccagggaggactacgtgctggtggctggccactaccccgtgtggtccatagccgagcacgggcctacccactgcctggtcaagcagctacggccactgctggccacatacggggtcactgcctacctgtgcggccacgatcacaatctgcagtacctgcaagatgagaatggcgtgggctacgtgctgagtggggctgggaatttcatggacccctcaaagcggcaccagcgcaaggtccccaacggctatctgcgcttccactatgggactgaagactcactgggtggctttgcctatgtggagatcagctccaaagagatgactgtcacttacatcgaggcctcgggcaagtccctctttaagaccaggctgccgaggcgagccaggccctgaactcccatgactgcccagctctgaggcccgatctccactgttgggtgggtgggccctgccgggaccctgctcacaggcaggcttttcctccaacctgtggcgctgcagcagggcaggaaggggaaacacagctgatgaactgtggtgccacatgacccttgtggcacagatgcccacgtatgtgaaacacacatggacatgtgtcccagccacagtgttatgctctgtggctggctcacctttgctgagttccggggtgcaatgggggagggagggagggaaagcttcctcctaaatcaagcatctttctgttactgatgttcaataaaagaatagttgccaaggctgaaccagt

SEQ ID NO: 5641 - DNA, 3236 bp, Homo sapiens
ggcctcggcctgcacggcggctgcggcggcggtagcggcagcggcggcggcggcggcggcggcggcggcggcggcggcggcggcggcggcagcggcggcggcctgggcccgggcgcagcggcggcggcggcggggcctggagccggatctaagatggcagcggcggcggcggcggtggggccgggcgcgggcggcgcggggtcggcggtcccgggcggcgcggggccctgcgctaccgtgtcggtgttccccggcgcccgcctcctcaccatcggcgacgcgaacggcgagatccagcggcacgcggagcagcaggcgctgcgcctcgaggtgcgcgccggcccggactcggcgggcatcgccctctacagccatgaagatgtgtgtgtctttaagtgctcagtgtcccgagagacagagtgcagccgtgtgggcaagcagtccttcatcatcaccctgggctgcaacagcgtcctcatccagttcgccacacccaacgatttctgttccttctacaacatcctgaaaacctgccggggccacaccctggagcggtctgtgttcagcgagcggacggaggagtcttctgccgtgcagtacttccagttttatggctacctgtcccagcagcagaacatgatgcaggactacgtgcggacaggcacctaccagcgcgccatcctgcaaaaccacaccgacttcaaggacaagatcgttcttgatgttggctgtggctctgggatcctgtcgttttttgccgcccaagctggagcacggaaaatctacgcggtggaggccagcaccatggcccagcacgctgaggtcttggtgaagagtaacaacctgacggaccgcatcgtggtcatcccgggcaaggtggaggaggtgtcactccccgagcaggtggacatcatcatctcggagcccatgggctacatgctcttcaacgagcgcawgctggagagctacctccacgccaagaagtacctgaagcccagcggaaacatgtttcctaccattggtgacgtccaccttgcacccttcacggatgaacagctctacatggagcagttcaccaaggccaacttctggtaccagccatctttccatggagtggacctgtcggccctccgaggtgccgcggtggatgagtatttccggcagcctgtggtggacacatttgacatccggatcctgatggccaagtctgtcaagtacacggtgaacttcttagaagccaaagaaggagatttgcacaggatagaaatcccattcaaattccacatgctgcattcagggctggtccacggcctggctttctggtttgacgttgctttcatcggctccataatgaccgtgtggctgtccacagccccgacagagcccctgacccactggtaccaggtgcggtgcctgttccagtcaccactgttcgccaaggcaggggacacgctctcagggacatgtctgcttattgccaacaaaagacagagctacgacatcagtattgtggcccaggtggaccagaccggctccaagtccagtaacctcctggatctgaaaaaccccttctttagatacacgggcacaacgccctcacccccacccggctcccactacacatctccctcggaaaacatgtggaacacgggcagcacctacaacctcagcagcgggatggccgtggcagggatgccgaccgcctatgacttgagcagtgttattgccagtggctccagcgtgggccacaacaacctgattcctttagccaacacggggattgtcaatcacacccactcccggatgggctccataatgagcacggggattgtccaagggtcctccggcgcccagggcagtggtggtggcagcacgagtgcccactatgcagtcaacagccagttcaccatgggcggccccgccatctccatggcgtcgcccatgtccatcccgaccaacaccatgcactacgggagctaggggcccgccccgcggactgacagcaccaggaaaccaaatgatgtccctgcccgccgcccccgccgggcggctttcccccttgtactggagaagctcgaacacccggtcacagctctctttgctatgggaactgggacacttttttacacgatgttgccgccgtccccaccctaacccccacctcccggccctgagcgtgtgtcgctgccatattttacacaaaatcatgttgtgggagccctcgtcccccctcctgcccgctctaccctgacctgggcttgtcatctgctggaacaggcgccatggggcctgccagccctgcctgccaggtcccttagcacctgtccccctgcctgtctccagtgggaaggtagcctggccaggcggggcctccccttcgacgaccaggcctcggtcacaacggacgtgacatgctgctttttttaattttatttttttatgaaaagaaccagtgtcaatccgcagaccctctgtgaagccaggccggccgggccgagccagcagcccctctccctagactcagaggcgccgcggggaggggtggccccgccgaggcttcaggggccccctccccaccaaagggttcacctcacacttgaatgtacaacccaccccactgtcgggaaggcctccgtcctcggcccctgcctcttgctgctgtcctgtccccgagcccctgcaggtccccccccgcccccccactcaagagttagagcaggtggctgcaggccttgggcccggagggaaggccactgccggccacttggggcagacacagacacctcaaggatctgtcacggaaggcgtcctttttccttgtagctaacgttaggcctgagtagctcccctccatccttgtagacgctccagtccctactactgtgacggcatttccatccctcccctgcccgggaagggaccttgcagggacctctccctccaaaaaaagaaaaaaagaaaaagaaagaaaaaataaatgaggaaacgtgttgcagcacaggcagttttcttctccttctgctcccctgtttctcatacccccaaactcagatgctggagctcaggcccgccgtgtgtgcacccaggcaggagcgggcgctgtccaggctgggccgcccccttggctctccctcctgttccaggggagccataggagggaaagcaggtggcccgggggggatatgggggccccagccctgtcccaaagctccctgctcggctgcccctcgcccgcc

SEQ ID NO: 5642 - DNA, 2687 bp, Homo sapiens
ctcggagtctgcgcggcgcggccaggcccggccgaccgcgtctcggtctycgcgtctgccagcctggctggcagtccgtctgtccatcccgccgcgccggggcagtctaggcggagcgggggctcaggcggcggcggcctcgacgcgagtgagtgtcgtggttggggtgctggacccagagtgcctaccctcgcctgcctgggcctcagtttccacatctgcacaatgggggtgaccatccctgccctgctggctgccaggagcggctgtgagtcttcaggcgtggatgcagcctgggggaagccatagggcgctttcacaggcctggccttcaccatggcgggagggagaccgcatctgaagaggagtttctccatcatcccctgctttgtcttcgtggagtcggtgctgctgggcattgtgatcctgcttgcttaccgcctggagttcacggacaccttccctgtgcacacccagggattcttctgctatgacagtacctacgccaagccctacccagggcctgaggctgccagccgagtgcctcctgctcttgtctacgcactggtcactgccgggcccaccctcacgatcctgctgggagagctggcgcgtgcctttttccctgcaccaccttcagccgtcccagtcatcggggagagcaccatcgtgtctggggcctgctgccgcttcagccccccagtgcggaggctggtccgcttcctgggggtctactccttcggcctcttcaccacgaccatcttcgccaacgcggggcaggtggtgaccggcaatcccacgccacacttcctgtccgtgtgccgccccaactacacggccctgggctgcctgccaccttctccggatcggccaggtcccgaccgctttgtcactgaccagggtgcctgcgctggcagtcccagcctcgtggccgccgcgcgccgcgccttcccctgcaaggatgcggccctctgcgcctacgcggtcacctacacagcgatgtacgtgactctcgtgttccgcgtgaagggctcccgcctggtcaaaccctcgctctgcctggccttgctgtgcccggccttcctggtgggcgtggtccgcgtggccgagtaccgaaaccactggtcggacgtgctggctggcttcctgacaggggcggccatcgccasctttttggtcacctgcgttgtgcataactttcagagccggccaccctctggccgaaggctctctccctgggaggacctgggccaagcccccaccatggatagccccctcgaaaagaacccgaggtctgcaggccgcattcgacaccggcacggctcaccccatccaagtcgcagaactgcgcccgccgtggccacctgatccccagctgtgtctcctccagggccccagccatgtgttcgtcgccccgtgtgccccgtcctcgattgaggtctgagccgacgcccttgcccctgcccctacccctgccagcgcccacccccagccagggcccctcgccttcctcccctggacctggggggccaggcgggggtggtggacgtggccggaagctgctgctgcccacgcccctgctgcgggacctgtacaccctgagtggactctatccctcccccttccaccgggacaacttcagcccttacctgtttgccagccgtgaccacctgctgtgaggcccgaccacccacccagaatctgcccagtccccacttcttccctgccacgcgtgtgtgtgcgtgtgccacgtgagtgccaaagtcccctgccccccaagccagccagacccagacattagaagatggctagaaggacatttaggagacatctgcctctctggccctctgagatatcccgatgggcacaaatggaaggtgcgcacttgcccctactattgcccttttaagggccaaagcttgaccccattggccattgcctggctaatgagaacccctggttctcagaattttaaccaaaaggagttggctccaaccaatgggagccttcccctcacttcttagaatcctcctgcaagagggcaactccagccagtgttcagcgactgaacagccaataggagcccttggtttccagaatttctagagtgggtgggcatgattccagtcaatgggggaccgcccgtgtctaagcatgtgcaaaggagaggagggagatgaggtcattgtttgtcattgagtcttctctcagaatcagcgagcccagctgtagggtggggggcaggctcccccatggcagggtccttggggtaccccttttcctctcagcccctccctgtgtgcggcctctccacctctcacccactctctcctaatcccctacttaagtagggcttgccccacttcagaggttttggggttcagggtgctgtgtctccccttgcctgtgcccaggtcatcccaaacccttctgttatttattagggctgtgggaagggtttttcttctttttcttggaacctgcccctgttyttcacactgccccccatgcctcagcctcatacagatgtgccatcatggggggcatgggtggagcagaggggctccctcaccccgggcaggcaaaggcagtgggtagaggaggcactgcccccctttcctgccccctcctcatctttaataaagacctggcttctcatctttaataaagacctgtttgtaacagaa

SEQ ID NO: 5643 - DNA, 2328 bp, Homo sapiens
ctcggagtctgcgcggcgcggccaggcccggccgaccgcgtctcggtctycgcgtctgccagcctggctggcagtccgtctgtccatcccgccgcgccggggcagtctaggcggagcgggggctcaggcggcggcggcctcgacgcgagtgagtgtcgtggttggggtgctggacccagagtgcctaccctcgcctgcctgggcctcagtttccacatctgcacaatgggggtgaccatccctgccctgctggctgccaggagcggctgtgagtcttcaggcgtggatgcagcctgggggaagccatagggcgctttcacaggcacaccccctgggactcccactccctccccacctctgcaggcctggccttcaccatggcgggagggagaccgcatctgaagaggagtttctccatcatcccctgctttgtcttcgtggagtcggtgctgctgggcattgtgatcctgcttgcttaccgcctggagttcacggacaccttccctgtgcacacccagggattcttctgctatgacagtacctacgccaagccctacccagggcctgaggctgccagccgagtgcctcctgctcttgtctacgcactggtcactgccgggcccaccctcacgatcctgctgggagagctggcgcgtgcctttttccctgcaccaccttcagccgtcccagtcatcggggagagcaccatcgtgtctggggcctgctgccgcttcagccccccagtgcggaggctggtccgcttcctgggggtctactccttcggcctcttcaccacgaccatcttcgccaacgcggggcaggtggtgaccggcaatcccacgccacacttcctgtccgtgtgccgccccaactacacggccctgggctgcctgccaccttctccggatcggccaggtcccgaccgctttgtcactgaccagggtgcctgcgctggcagtcccagcctcgtggccgccgcgcgccgcgccttcccctgcaaggatgcggccctctgcgcctacgcggtcacctacacagcgatgtacgtgactctcgtgttccgcgtgaagggctcccgcctggtcaaaccctcgctctgcctggccttgctgtgcccggccttcctggtgggcgtggtccgcgtggccgagtaccgaaaccactggtcggacgtgctggctggcttcctgacaggggcggccatcgccasctttttggtcacctgcgttgtgcataactttcagagccggccaccctctggccgaaggctctctccctgggaggacctgggccaagcccccaccatggatagccccctcgaaaagaacccgaggtctgcaggccgcattcgacaccggcacggctcaccccatccaagtcgcagaactgcgcccgccgtggccacctgatccccagctgtgtctcctccagggccccagccatgtgttcgtcgccccgtgtgccccgtcctcgattgaggtctgagccgacgcccttgcccctgcccctacccctgccagcgcccacccccagccagggcccctcgccttcctcccctggacctggggggccaggcgggggtggtggacgtggccggaagctgctgctgcccacgcccctgctgcgggacctgtacaccctgagtggactctatccctcccccttccaccgggacaacttcagcccttacctgtttgccagccgtgaccacctgctgtgaggcccgaccacccacccagaatctgcccagtccccacttcttccctgccacgcgtgtgtgtgcgtgtgccacgtgagtgccaaagtcccctgccccccaagccagccagacccagacattagaagatggctagaaggacatttaggagacatctgcctctctggccctctgagatatcccgatgggcacaaatggaaggtgcgcacttgcccctactattgcccttttaagggccaaagcttgaccccattggccattgcctggctaatgagaacccctggttctcagaattttaaccaaaaggagttggctccaaccaatgggagccttcccctcacttcttagaatcctcctgcaagagggcaactccagccagtgttcagcgactgaacagccaataggagcccttggtttccagaatttctagagtgggtgggcatgattccagtcaatgggggaccgcccgtgtctaagcatgtgcaaaggagaggagggagatgaggtcattgtttgtcattgagtcttctctcagaatcagcgagcccagtcctcatctttaataaagacctggcttctcatctttaataaagacctgtttgtaacagaag

SEQ ID NO: 5644 - DNA, 2728 bp, Homo sapiens
ctcggagtctgcgcggcgcggccaggcccggccgaccgcgtctcggtctycgcgtctgccagcctggctggcagtccgtctgtccatcccgccgcgccggggcagtctaggcggagcgggggctcaggcggcggcggcctcgacgcgagtgagtgtcgtggttggggtgctggacccagagtgcctaccctcgcctgcctgggcctcagtttccacatctgcacaatgggggtgaccatccctgccctgctggctgccaggagcggctgtgagtcttcaggcgtggatgcagcctgggggaagccatagggcgctttcacaggcacaccccctgggactcccactccctccccacctctgcaggcctggccttcaccatggcgggagggagaccgcatctgaagaggagtttctccatcatcccctgctttgtcttcgtggagtcggtgctgctgggcattgtgatcctgcttgcttaccgcctggagttcacggacaccttccctgtgcacacccagggattcttctgctatgacagtacctacgccaagccctacccagggcctgaggctgccagccgagtgcctcctgctcttgtctacgcactggtcactgccgggcccaccctcacgatcctgctgggagagctggcgcgtgcctttttccctgcaccaccttcagccgtcccagtcatcggggagagcaccatcgtgtctggggcctgctgccgcttcagccccccagtgcggaggctggtccgcttcctgggggtctactccttcggcctcttcaccacgaccatcttcgccaacgcggggcaggtggtgaccggcaatcccacgccacacttcctgtccgtgtgccgccccaactacacggccctgggctgcctgccaccttctccggatcggccaggtcccgaccgctttgtcactgaccagggtgcctgcgctggcagtcccagcctcgtggccgccgcgcgccgcgccttcccctgcaaggatgcggccctctgcgcctacgcggtcacctacacagcgatgtacgtgactctcgtgttccgcgtgaagggctcccgcctggtcaaaccctcgctctgcctggccttgctgtgcccggccttcctggtgggcgtggtccgcgtggccgagtaccgaaaccactggtcggacgtgctggctggcttcctgacaggggcggccatcgccasctttttggtcacctgcgttgtgcataactttcagagccggccaccctctggccgaaggctctctccctgggaggacctgggccaagcccccaccatggatagccccctcgaaaagaacccgaggtctgcaggccgcattcgacaccggcacggctcaccccatccaagtcgcagaactgcgcccgccgtggccacctgatccccagctgtgtctcctccagggccccagccatgtgttcgtcgccccgtgtgccccgtcctcgattgaggtctgagccgacgcccttgcccctgcccctacccctgccagcgcccacccccagccagggcccctcgccttcctcccctggacctggggggccaggcgggggtggtggacgtggccggaagctgctgctgcccacgcccctgctgcgggacctgtacaccctgagtggactctatccctcccccttccaccgggacaacttcagcccttacctgtttgccagccgtgaccacctgctgtgaggcccgaccacccacccagaatctgcccagtccccacttcttccctgccacgcgtgtgtgtgcgtgtgccacgtgagtgccaaagtcccctgccccccaagccagccagacccagacattagaagatggctagaaggacatttaggagacatctgcctctctggccctctgagatatcccgatgggcacaaatggaaggtgcgcacttgcccctactattgcccttttaagggccaaagcttgaccccattggccattgcctggctaatgagaacccctggttctcagaattttaaccaaaaggagttggctccaaccaatgggagccttcccctcacttcttagaatcctcctgcaagagggcaactccagccagtgttcagcgactgaacagccaataggagcccttggtttccagaatttctagagtgggtgggcatgattccagtcaatgggggaccgcccgtgtctaagcatgtgcaaaggagaggagggagatgaggtcattgtttgtcattgagtcttctctcagaatcagcgagcccagctgtagggtggggggcaggctcccccatggcagggtccttggggtaccccttttcctctcagcccctccctgtgtgcggcctctccacctctcacccactctctcctaatcccctacttaagtagggcttgccccacttcagaggttttggggttcagggtgctgtgtctccccttgcctgtgcccaggtcatcccaaacccttctgttatttattagggctgtgggaagggtttttcttctttttcttggaacctgcccctgttyttcacactgccccccatgcctcagcctcatacagatgtgccatcatggggggcatgggtggagcagaggggctccctcaccccgggcaggcaaaggcagtgggtagaggaggcactgcccccctttcctgccccctcctcatctttaataaagacctggcttctcatctttaataaagacctgtttgtaacagaa

SEQ ID NO: 5645 - DNA, 3003 bp, Homo sapiens
aggggcggggcatcatatgggcggggctgaggcgaggccccggcggccatcttgagccccgccttttacttcggcccgcttcttctrgtcactccgccaccgtagaatcgcctaccatttggtgcaagcaaaaagcaatcagcaattggacaggaaaagaatggcattgaagcagatttccagcaacaagtgctttgggggattgcagaaagtttttgaacatgacagtgttgaactaaactgcaaaatgaaatttgctgtctacttaccaccaaaggcagaaacaggaaagtgccctgcactgtattggctctcaggtttaacttgcacagagcaaaattttatatcaaaatctggttatcatcagtctgcttcagaacatggtcttgttgtcattgctccagataccagccctcgtggctgcaatattaaaggtgaagatgagagctgggactttggcactggtgctggattttatgttgatgccactgaagatccttggaaaacyaactacagaatgtactcttatgtcacagaggagcttccccaactcataaatgccaattttccagtggatccccaaaggatgtctatttttggccactccatgggaggtcatggagctctgatctgtgctttgaaaaatcctggaaaatacaaatctgtgtcagcatttgctccaatttgcaaccctgtactctgtccctggggcaaaaaagcctttagtgratatttgggaacagatcaaagtaaatggaaggcttatgatgctacccaccttgtgaaatcctatccaggatctcagctggacatactaattgatcaagggaaagatgaccagtttcttttagatggacagttactccctgataacttcatagctgcctgtacagaaaagaaaatccccgttgtttttcgattgcaagaggcaagtattaggaaactttagcttgatctagataatgtaactatgaaaaattaggattctgtgatattttcttaactttattttagaatataaaatgctacttctagtaagtttttaattatattcagacacttgaagtgaaaacctgcctataaaattaattatatctaacactaaatttgatagarataggaaagcttttggcagtgaaaaatattgttttccatcaaaccagtaaataacaagatttttaatgcttgaatgatgattaatcttcagcattagcagatacttctttctttacacatggacctttgctgcagtagaataaaaaggacaaacttctacctaaattactccttattttatgtatatattttagcctcagaagttaagtattatttatcacacatgtgctttatattatttgactttcatattaatctattcattgtgctacttgatatttctagttgtttaagaataattactgaatcccaatgggcttgcaagttttttttaactaaaatatttttgaccgtccactactcacctaactctatatatgctaccatagtcctaattaaggaagttctgcttttatttttaagaaaaattcataagcttcagaatataatttaaaatattttagagtgaaaaatgagcactgaaaattatacatggtcatgatttttaaataaatttttatccatgtttaaggataatgtgtcaggcacattgatctaaaatgtaattacgatggtaaatgttcaaatctagatcagtgtgtaatgtggtacattagtttgtaaaatgctttcacagcattaactcattgttaattcttataccgccaaatgagatatcatttctttcctatccatctgttttacaaatgaggagacaggctcagagaagtaacctacttatctaaggccacatagctagtaastggtggaaccagaactggaactaaggccatttaactgcaaatactgacctcctgtcatttatcaagccattttcagacggcatgatattctcctgaggagcaaaggaatggaattagagctagcacaaggagaaattgtgcatagcttgctgcctaygtaacttatgcagaagatctgagcagtcttcctgtttttagggatattttgcacatgtgaactatatagtgagaaaatgtcaaaaactaatacatgatatactgtttgtctcttagtgtccatccttgagtaatagaattttgttttagatttatttgaacatttaccatcacaattaaattttaggtcaacaaccagccttgagaaatccaaataccaatttgactataaatatagtaatacgtttaactgcaataactatagctataagtgcgtaccaaaccatgttttttccaaatgaccttaatttcttggcactacccatgttggatacctcatttgcttccccaaagactgkgcccaaaatttctgttgtttctacaatgattctgcctgccaacaaagtctgaaaatctcaagtttgttataaaaacagcacagttagaacatgatgacattcctggagggaaaaataagtccacttatttgtttctaaaatgcctgtatcccaagcaactagaacacatagttggctatacttaatgaggagtcaagacaaaccattcaattcttctaaaaaagtaagaaagtattcaaagcaccagagtcacaatgttgagctcaggtgcaattttctattcactttacttccagcatggtcgggttaagagtggactacatagcttgaagcggatttcgttgagattcgttgtaattgaatcaacaactgaatgagcatgcctaagtagtggctccagagagtctgctttcagattttcttgccagctttgacccaagattaccctgggtctgcgagttttatcacctgctttatcatttgattacaagtatagtataactgtatttccttgtgggatagaagctgtaaaaaataagctgaaaataataggggatatatataaataaacgatctgagaaagaataaagaaaataattacaatcatg

SEQ ID NO: 5646 - DNA, 1186 bp, Homo sapiens
aggggcggggcatcatatgggcggggctgaggcgaggccccggcggccatcttgagccccgccttttacttcggcccgcttcttctrgtcactccgccaccgtagaatcgcctaccatttggtgcaagcaaaaagcaatcagcaattggacaggaaaagaatggcattgaagcagatttccagcaacaagtgctttgggggattgcagaaagtttttgaacatgacagtgttgaactaaactgcaaaatgaaatttgctgtctacttaccaccaaaggcagaaacaggaaagtgccctgcactgtattggctctcaggtttaacttgcacagagcaaaattttatatcaaaatctggttatcatcagtctgcttcagaacatggtcttgttgtcattgctccagataccagccctcgtggctgcaatattaaaggtgaagatgagagctgggactttggcactggtgctggattttatgttgatgccactgaagatccttggaaaacyaactacagaatgtactcttatgtcacagaggagcttccccaactcataaatgccaattttccagtggatccccaaaggatgtctatttttggccactccatgggaggtcatggagctctgatctgtgctttgaaaaatcctggaaaatacaaatctgtgtcagcatttgctccaatttgcaaccctgtactctgtccctggggcaaaaaagcctttagtgratatttgggaacagatcaaagtaaatggaaggcttatgatgctacccaccttgtgaaatcctatccaggatctcagctggacatactaattgatcaagggaaagatgaccagtttcttttagatggacagttactccctgataacttcatagctgcctgtacagaaaagaaaatccccgttgtttttcgattgcaagagggttatgatcatagctactacttcattgcaacctttattactgaccacatcagacatcatgctaaatacctgaatgcatgaaaaaactccaaataagagaatctcttcaggattataaaagttgtaaaatgcaactgtattgctgagcaaaaaaaaaaaaaattcaaaacattggattttatagtgctaaaagggctttattctatagttgaatcacctctgaataaagatataaaacctacttctgattttaaaagt

SEQ ID NO: 5647 - DNA, 1159 bp, Homo sapiens
aggggcggggcatcatatgggcggggctgaggcgaggccccggcggccatcttgagccccgccttttacttcggcccgcttcttctrgtcactccgccaccgtagaatcgcctaccatttggtgcaagcaaaaagcaatcagcaattggacaggaaaagaatggcattgaagcagatttccagcaacaagtgctttgggggattgcagaaagtttttgaacatgacagtgttgaactaaactgcaaaatgaaatttgctgtctacttaccaccaaaggcagaaacaggaaagtgccctgcactgtattggctctcaggtttaacttgcacagagcaaaattttatatcaaaatctggttatcatcagtctgcttcagaacatggtcttgttgtcattgctccagataccagccctcgtggctgcaatattaaaggtgaagatgagagctgggactttggcactggtgctggattttatgttgatgccactgaagatccttggaaaacyaactacagaatgtactcttatgtcacagaggagcttccccaactcataaatgccaattttccagtggatccccaaaggatgtctatttttggccactccatgggaggtcatggagctctgatctgtgctttgaaaaatcctggaaaatacaaatctgtgtcagcatttgctccaatttgcaaccctgtactctgtccctggggcaaaaaagcctttagtgratatttgggaacagatcaaagtaaatggaaggcttatgatgctacccaccttgtgaaatcctatccaggatctcagctggacatactaattgatcaagggaaagatgaccagtttcttttagatggacagttactccctgataacttcatagctgcctgtacagaaaagaaaatccccgttgtttttcgattgcaagaggcaaggttatgatcatagctactacttcattgcaacctttattactgaccacatcagacatcatgctaaatacctgaatgcatgaaaaaactccaaataagagaatctcttcaggattataaaagttgtaaaatgcaactgtattgctgagcaaaaaaaaaaaaaattcaaaacattggattttatagtgctaaaagggctttattctatagttgaatcacctctgaataa

SEQ ID NO: 5648 - DNA, 1200 bp, Homo sapiens
agggcgagggctgcgggagcaagtacggagccgggggtgtgggggacgattgccgctgcagccgccgccccactcacctccrgtgtgtctgcagcccggacactaagggagatggatgaatgggtggggaggatgcggcgcacatggccccgggcggctcggcggtcagstgccgcccccacagcggaccggtcggggcgggggtcgggcggtagaaaaaagggccgcgaggcgagcggggcactgggcggaccgcggcggcagcatgagcggcgcagaccgtagccccaatgcgggcgcagcccctgactcggccccgggccaggcggcggtggcttcggcctaccagcgcttcgagccgcgcgcctacctccgcaacaactacgcrccccctcgcggggacctgtgcaacccgaacggcgtcgggccgtggaagctgcgctgcttggcgcagaccttcgccaccggtgaagtgtccggacgcaccctcatcgacattggttcaggccccaccgtgtaccagctgctcagtgcctgcagccactttgaggacatcaccatgacagatttcctggaggtcaaccgccaggagctggggcgctggctgcaggaggagccgggggccttcaactggagcatgtacagccaacatgcctgcctcattgagggcaagggggaatgctggcaggataaggagcgccagctgcgagccagggtgaarcgggtcctgcccatcgacgtgcaccagccccagcccctgggtgctgggagcccagctcccctgcctrctgacgccctggtctctgccttctgcttggaggctgtgwgcccagatcttgccagctttcagcgggccctggaccacatcaccacgctgctgaggcctggggggcaccwcctcctcatcggggcccwggaggagtcgtggtacctggctggggaggccaggctgacggtggtgccagtgtctgaggaggaggtgagggaggccctggtgcgtagtggctacaaggtccgggacctccrcacctatatcatgcctgcccaccttcagacaggcgtagatgatgtcaagggcgtcttcttygccwgggctcagaaggttgggctgtgagggctgtacctggtgccctgtggcccccacccacctggattccctgttctttgaagtggcacctaataaagaaataataccctgcy

SEQ ID NO: 5649 - DNA, 976 bp, Homo sapiens
  misc_feature (1)...(976): n = A,T,C or G
atgctgggtggtgtccctaccctttgcgggactgggaacgagacatggactctccttgctctagrccaggccattgctcngcgtctgaaaccattcggtgtccagagatttctgtacacagggcgccagcccaggcctgaggaagcagcrgaattccaggcagagtttgtgtctacccctgagctggctgcccaatctgatttcatcgtcgtggcctgctccttaacacctgcaaccgagggactctgcaacaaggacttcttccagaagatgaaggaaacagctgtgttcatcaacatcagcaggtatcctarggccaccttacccagcaagcctggagaggagccatccccactgctgccatctggagattttcttccccgtgggttgttggtgagaycccaggctgagcttgctggtttccataaaccaaacaaccaactcagaaattcgtgggaatacacgagacctccgtacagggaagaagagccgtcagagtgggcctggcctgtctgcttctcagcagtggcccccacccggcggggcctggcacacagcagcgtggcttcagggagtgttcccagggagcctctgcaggcccattatcctycaccacaaagggctggacttgaggatctgaagggccctctggaggccgcctcccacactgctgagcctggctttgtctggctgtggttcartgatactttgaaccttatgctcctgggcggacagaccctaaaactcacgtggtcgtagctcctcacactgtccctaggggtgccttcaggccactgggcatgtatggaggtcagaccttccttctctgccactccaagcccttcctagctggtgccccttgagcctgtttacatcagtttaggggaagggggattgggtgaggtcatcctgaggactcgtccaccccaaaggtacctgtaattaccaacatttagctacaaaacaggtgacctgg

SEQ ID NO: 5650 - DNA, 929 bp, Homo sapiens
  misc_feature (1)...(929): n = A,T,C or G
tccsgggccagcttctgtactgccaggtccgggtcggcggctgcactgcggatgagaccggtgcgactcatgaaggtgttcgtcacccgcaggatacccgccgagggtagggtcgcgctcgcccgggcggcagatggtggctggacctcgtggaagcccctctggctgtgtggctatggactcacgcagagcactgtcggcatcatcgggctggggcgcatagrccaggccattgctcngcgtctgaaaccattcggtgtccagagatttctgtacacagggcgccagcccaggcctgaggaagcagcrgaattccaggcagagtttgtgtctacccctgagctggctgcccaatctgatttcatcgtcgtggcctgctccttaacacctgcaaccgagggactctgcaacaaggacttcttccagaagatgaaggaaacagctgtgttcatcaacatcagcaggggcgacgtcgtaaaccaggacgacctgtaccaggccttggccagtggtaagattgcagctgctggactggatgtgacgagcccagaaccactgcctacaaaccaccctctcctgaccctgaagaactgtgtgattctgccccacattggcagtgccacccacagaacccgcaacaccatgtccttgttggcagctaacaacttgctggctggcctgagaggggagccgakgcctagtgaactcaagctgtagccaaacagtagagatggagggccgggaagcaaaccgtgccctggtattgtcagacacacccaggcttgatttggatccacaggcagagccaagggaaggtgtgattctctgaggaaagagtgattytgatatatgtacttgtcacrttggtgttggacacatttgcgccaaaagtatggtaattctattattaaataattctctgagagacc

SEQ ID NO: 5651 - DNA, 1342 bp, Homo sapiens
  misc_feature (1)...(1342): n = A,T,C or G
cacagtcaccgctcagccgcaacccggcgctccctctcgcgaagccacaccccctgcgcacgccgcgcgcgacgtctctyccgcccactccagcctggmcccgccccggcccagctacattccsgggccagcttctgtactgccaggtccgggtcggcggctgcactgcggatgagaccggtgcgactcatgaaggtgttcgtcacccgcaggatacccgccgaggctgtgaggtggagcagtgggactcggatgagcccatccctgccaaggagctagagcgaggtgtggcgggggcccacggcctgctctgcctcctctccgaccacgtggacaagaggatcctggatgctgcaggggccaatctcaaagtcatcagcaccatgtctgtgggcatcgaccacttggctttggatgaaatcaagaagcgtgggatcygagttggctrcaccccagatgtcctgacagataccaccgccgaactcgcagtctccctgctacttaccacctgccgccggttgccggaggccatcgaggaagtgaagaatggtggctggacctcgtggaagcccctctggctgtgtggctatggactcacgcagagcactgtcggcatcatcgggctggggcgcatagrccaggccattgctcngcgtctgaaaccattcggtgtccagagatttctgtacacagggcgccagcccaggcctgaggaagcagcrgaattccaggcagagtttgtgtctacccctgagctggctgcccaatctgatttcatcgtcgtggcctgctccttaacacctgcaaccgagggactctgcaacaaggacttcttccagaagatgaaggaaacagctgtgttcatcaacatcagcaggggcgacgtcgtaaaccaggacgacctgtaccaggccttggccagtggtaagattgcagctgctggactggatgtgacgagcccagaaccactgcctacaaaccaccctctcctgaccctgaagaactgtgtgattctgccccacattggcagtgccacccacagaacccgcaacaccatgtccttgttggcagctaacaacttgctggctggcctgagaggggagccgakgcctagtgaactcaagctgtagccaaacagtagagatggagggccgggaagcaaaccgtgccctggtattgtcagacacacccaggcttgatttggatccacaggcagagccaagggaaggtgtgattctctgaggaaagagtgattytgatatatgtacttgtcacrttggtgttggacacatttgcgccaaaagtatggtaattctattattaaataattctctgagagacc

SEQ ID NO: 5652 - DNA, 1431 bp, Homo sapiens
  misc_feature (1)...(1431): n = A,T,C or G
ccccycacacacacacaaggacactgtgtagggtcactgttactgtcactccccgagcacgcacagtcaccgctcagccgcaacccggcgctccctctcgcgaagccacaccccctgcgcacgccgcgcgcgacgtctctyccgcccactccagcctggmcccgccccggcccagctacattccsgggccagcttctgtactgccaggtccgggtcggcggctgcactgcggatgagaccggtgcgactcatgaaggtgttcgtcacccgcaggatacccgccgagggtagggtcgcgctcgcccgggcggcagactgtgaggtggagcagtgggactcggatgagcccatccctgccaaggagctagagcgaggtgtggcgggggcccacggcctgctctgcctcctctccgaccacgtggacaagaggatcctggatgctgcaggggccaatctcaaagtcatcagcaccatgtctgtgggcatcgaccacttggctttggatgaaatcaagaagcgtgggatcygagttggctrcaccccagatgtcctgacagataccaccgccgaactcgcagtctccctgctacttaccacctgccgccggttgccggaggccatcgaggaagtgaagaatggtggctggacctcgtggaagcccctctggctgtgtggctatggactcacgcagagcactgtcggcatcatcgggctggggcgcatagrccaggccattgctcngcgtctgaaaccattcggtgtccagagatttctgtacacagggcgccagcccaggcctgaggaagcagcrgaattccaggcagagtttgtgtctacccctgagctggctgcccaatctgatttcatcgtcgtggcctgctccttaacacctgcaaccgagggactctgcaacaaggacttcttccagaagatgaaggaaacagctgtgttcatcaacatcagcaggggcgacgtcgtaaaccaggacgacctgtaccaggccttggccagtggtaagattgcagctgctggactggatgtgacgagcccagaaccactgcctacaaaccaccctctcctgaccctgaagaactgtgtgattctgccccacattggcagtgccacccacagaacccgcaacaccatgtccttgttggcagctaacaacttgctggctggcctgagaggggagccgakgcctagtgaactcaagctgtagccaaacagtagagatggagggccgggaagcaaaccgtgccctggtattgtcagacacacccaggcttgatttggatccacaggcagagccaagggaaggtgtgattctctgaggaaagagtgattytgatatatgtacttgtcacrttggtgttggacacatttgcgccaaaagtatggtaattctattattaaataattctctgagagacc

SEQ ID NO: 5653 - DNA, 2363 bp, Homo sapiens
gtgyaaagagaagaaatatgattatgataatttgcccaggacatctgttatcatagcattttataatgaagcctggtcaactctccttcggacagtttacagtgtccttgagacatccccggatatcctgctagaagaagtgatccttgtagatgactacagtgatagagagcacctgaaggagcgcttggccaatgagctttcgggactgcccaaggtgcgcctgatccgcgccaacaagagagagggcctggtgcgagcccggctgctgggggcgtctgcggcgaggggcgatgttctgaccttcctggactgtcactgtgagtgccacgaagggtggctggagccgctgctgcagaggatccatgaagaggagtcggcagtggtgtgcccggtgattgatgtgatcgactggaacaccttcgaatacctggggaactccggggagccccagatcggcggtttcgactggaggctggtgttcacgtggcacacagttcctgagagggagaggatacggatgcartcccccgtcgatgtcatcaggtctccaacaatggctggtgggctgtttgctgtgagtaagaaatattttgaatatctggggtcttatgatacaggaatggaagtttggggaggagaaaacctcgaattttcctttaggatctggcagtgtggtggggttctggaaacacacccatgttcccatgttggccatgttttccccaagcaagctccctactcccgcaacaaggctctggccaacagtgttcgtgcagctgaagtatggatggatgaatttaaagagctctactaccatcgcaacccccgtgcccgcttggaaccttttggggatgtgacagagaggaagcagctccgggacaagctccagtgtaaagacttcaagtggttcttggagactgtgtatcyagaactgcatgtgcctgaggacaggcctggcttcttcgggatgctccagaacaaaggactaacagactactgctttgactataaccctccsgatgaaaaccagattgtgggacaccaggtcattctgtacctctgtcatgggatgggccagaatcagtttttcgagtacacgtcccagaaagaaatacgctataayacccaccagcctgagggctgcattgctgtggaagcaggaatggatacccttatcatgcatctctgcgaagaaactgccccagagaatcagaagttcatcttgcaggaggatggatctttatttcacgaacagtccaagaaatgtgtccaggctgcgaggaaggagtcgagtgacagtttcgttccactcttacgagactgcaccaactcsgatcatcagaaatggttcttcaaagagcgcatgttatgaagcctcgtgtatcaaggagcccatcgaaggagactgtggagccaggactctgcccaacaaagacttwgctaagcagtgaccagaacccaccaaaaactaggctgcattgctttgaagaggcaatcattttgccatttgtgaaagttgtgttggatttagtaaaaatgtgartaagctttgtacttattttgagaactttttaaatgttccaaaataccctattttcaaagggtaatcgtaagatgttaacccttggtatttagaaaattaaaaccttataatatttttctatcaagatgtatattttacagtcgtgccttttactctcattagcaaaaaagataaagattttattttggtatttacaagaattcccaggtacgaagatatctgcatgggtggaaatcaggttcaagcaacrtactttgcattaactgataatacctcagctgcggggttaaagttttcccagtatagagagactgtcactaggaacattgtattgatttattsaggtcattgagatcttctagatgtattttaaaaagaatgctttttggttatgtgttgctaccacagttaacactccataatgttcatgtcagccaaagaggactaaccaaagctgaaatctcagagaacaatttgctttactaagctgagtcaacttgagagcgaacttctaacaatgccgcactgtagtgtggctggttctaccactatgactttaaaacatgtttatatcatttttaatttttatgatacggtagtgtcagggagaaatgtaatgttctatatgaaattcctttttcaagtttgttcattaataacagttattaatttaaatcagcgttagagtttgtgctgctgcaactgctgtgaaaatttctctgagtaattctgatttgtgaatgatcccagaccaaccctgagattttgtcaacctgattaagtcaatatgaatgattaaaaagatgtgagaacactg

SEQ ID NO: 5654 - DNA, 2537 bp, Homo sapiens
gcggccgccggtgccggcgaacgcgctgggcgcgcggggcgaggcggtgcggctgcagctgcagggcgaggagctgcggctgcaggaggagagcgtgcggctgcaccagattaacatctacctcagcgaccgcatctcactgcaccgccgcctgcccgagcgctggaacccgctgtgyaaagagaagaaatatgattatgataatttgcccaggacatctgttatcatagcattttataatgaagcctggtcaactctccttcggacagtttacagtgtccttgagacatccccggatatcctgctagaagaagtgatccttgtagatgactacagtgatagagagcacctgaaggagcgcttggccaatgagctttcgggactgcccaaggtgcgcctgatccgcgccaacaagagagagggcctggtgcgagcccggctgctgggggcgtctgcggcgaggggcgatgttctgaccttcctggactgtcactgtgagtgccacgaagggtggctggagccgctgctgcagaggatccatgaagaggagtcggcagtggtgtgcccggtgattgatgtgatcgactggaacaccttcgaatacctggggaactccggggagccccagatcggcggtttcgactggaggctggtgttcacgtggcacacagttcctgagagggagaggatacggatgcartcccccgtcgatgtcatcaggtctccaacaatggctggtgggctgtttgctgtgagtaagaaatattttgaatatctggggtcttatgatacaggaatggaagtttggggaggagaaaacctcgaattttcctttaggatctggcagtgtggtggggttctggaaacacacccatgttcccatgttggccatgttttccccaagcaagctccctactcccgcaacaaggctctggccaacagtgttcgtgcagctgaagtatggatggatgaatttaaagagctctactaccatcgcaacccccgtgcccgcttggaaccttttggggatgtgacagagaggaagcagctccgggacaagctccagtgtaaagacttcaagtggttcttggagactgtgtatcyagaactgcatgtgcctgaggacaggcctggcttcttcgggatgctccagaacaaaggactaacagactactgctttgactataaccctccsgatgaaaaccagattgtgggacaccaggtcattctgtacctctgtcatgggatgggccagaatcagtttttcgagtacacgtcccagaaagaaatacgctataayacccaccagcctgagggctgcattgctgtggaagcaggaatggatacccttatcatgcatctctgcgaagaaactgccccagagaatcagaagttcatcttgcaggaggatggatctttatttcacgaacagtccaagaaatgtgtccaggctgcgaggaaggagtcgagtgacagtttcgttccactcttacgagactgcaccaactcsgatcatcagaaatggttcttcaaagagcgcatgttatgaagcctcgtgtatcaaggagcccatcgaaggagactgtggagccaggactctgcccaacaaagacttwgctaagcagtgaccagaacccaccaaaaactaggctgcattgctttgaagaggcaatcattttgccatttgtgaaagttgtgttggatttagtaaaaatgtgartaagctttgtacttattttgagaactttttaaatgttccaaaataccctattttcaaagggtaatcgtaagatgttaacccttggtatttagaaaattaaaaccttataatatttttctatcaagatgtatattttacagtcgtgccttttactctcattagcaaaaaagataaagattttattttggtatttacaagaattcccaggtacgaagatatctgcatgggtggaaatcaggttcaagcaacrtactttgcattaactgataatacctcagctgcggggttaaagttttcccagtatagagagactgtcactaggaacattgtattgatttattsaggtcattgagatcttctagatgtattttaaaaagaatgctttttggttatgtgttgctaccacagttaacactccataatgttcatgtcagccaaagaggactaaccaaagctgaaatctcagagaacaatttgctttactaagctgagtcaacttgagagcgaacttctaacaatgccgcactgtagtgtggctggttctaccactatgactttaaaacatgtttatatcatttttaatttttatgatacggtagtgtcagggagaaatgtaatgttctatatgaaattcctttttcaagtttgttcattaataacagttattaatttaaatcagcgttagagtttgtgctgctgcaactgctgtgaaaatttctctgagtaattctgatttgtgaatgatcccagaccaaccctgagattttgtcaacctgattaagtcaatatgaatgattaaaaagatgtgagaacactg

SEQ ID NO: 5655 - DNA, 2668 bp, Homo sapiens
gtgctcctggcgctactggcgttggccgggctgggctcggtgctgcgggcgcagcgtggggccggggccggggctgccgagccgggacccccgcgcaccccgcgccccgggcggcgcgagccggtcatgccgcggccgccggtgccggcgaacgcgctgggcgcgcggggcgaggcggtgcggctgcagctgcagggcgaggagctgcggctgcaggaggagagcgtgcggctgcaccagattaacatctacctcagcgaccgcatctcactgcaccgccgcctgcccgagcgctggaacccgctgtgyaaagagaagaaatatgattatgataatttgcccaggacatctgttatcatagcattttataatgaagcctggtcaactctccttcggacagtttacagtgtccttgagacatccccggatatcctgctagaagaagtgatccttgtagatgactacagtgatagagagcacctgaaggagcgcttggccaatgagctttcgggactgcccaaggtgcgcctgatccgcgccaacaagagagagggcctggtgcgagcccggctgctgggggcgtctgcggcgaggggcgatgttctgaccttcctggactgtcactgtgagtgccacgaagggtggctggagccgctgctgcagaggatccatgaagaggagtcggcagtggtgtgcccggtgattgatgtgatcgactggaacaccttcgaatacctggggaactccggggagccccagatcggcggtttcgactggaggctggtgttcacgtggcacacagttcctgagagggagaggatacggatgcartcccccgtcgatgtcatcaggtctccaacaatggctggtgggctgtttgctgtgagtaagaaatattttgaatatctggggtcttatgatacaggaatggaagtttggggaggagaaaacctcgaattttcctttaggatctggcagtgtggtggggttctggaaacacacccatgttcccatgttggccatgttttccccaagcaagctccctactcccgcaacaaggctctggccaacagtgttcgtgcagctgaagtatggatggatgaatttaaagagctctactaccatcgcaacccccgtgcccgcttggaaccttttggggatgtgacagagaggaagcagctccgggacaagctccagtgtaaagacttcaagtggttcttggagactgtgtatcyagaactgcatgtgcctgaggacaggcctggcttcttcgggatgctccagaacaaaggactaacagactactgctttgactataaccctccsgatgaaaaccagattgtgggacaccaggtcattctgtacctctgtcatgggatgggccagaatcagtttttcgagtacacgtcccagaaagaaatacgctataayacccaccagcctgagggctgcattgctgtggaagcaggaatggatacccttatcatgcatctctgcgaagaaactgccccagagaatcagaagttcatcttgcaggaggatggatctttatttcacgaacagtccaagaaatgtgtccaggctgcgaggaaggagtcgagtgacagtttcgttccactcttacgagactgcaccaactcsgatcatcagaaatggttcttcaaagagcgcatgttatgaagcctcgtgtatcaaggagcccatcgaaggagactgtggagccaggactctgcccaacaaagacttwgctaagcagtgaccagaacccaccaaaaactaggctgcattgctttgaagaggcaatcattttgccatttgtgaaagttgtgttggatttagtaaaaatgtgartaagctttgtacttattttgagaactttttaaatgttccaaaataccctattttcaaagggtaatcgtaagatgttaacccttggtatttagaaaattaaaaccttataatatttttctatcaagatgtatattttacagtcgtgccttttactctcattagcaaaaaagataaagattttattttggtatttacaagaattcccaggtacgaagatatctgcatgggtggaaatcaggttcaagcaacrtactttgcattaactgataatacctcagctgcggggttaaagttttcccagtatagagagactgtcactaggaacattgtattgatttattsaggtcattgagatcttctagatgtattttaaaaagaatgctttttggttatgtgttgctaccacagttaacactccataatgttcatgtcagccaaagaggactaaccaaagctgaaatctcagagaacaatttgctttactaagctgagtcaacttgagagcgaacttctaacaatgccgcactgtagtgtggctggttctaccactatgactttaaaacatgtttatatcatttttaatttttatgatacggtagtgtcagggagaaatgtaatgttctatatgaaattcctttttcaagtttgttcattaataacagttattaatttaaatcagcgttagagtttgtgctgctgcaactgctgtgaaaatttctctgagtaattctgatttgtgaatgatcccagaccaaccctgagattttgtcaacctgattaagtcaatatgaatgattaaaaagatgtgagaacactg

SEQ ID NO: 5656 - DNA, 2544 bp, Homo sapiens
agtctgctacagacaacttagttacctgctgtatgggaagtagagacctccggcctccttcctttggatcacaacgtccttcagaaagtccaatccctacsgaaggaaaaatataaccggggtcagacaagatattttctcaggcagttactagaccctcacagatttgcgctgatgtggcctaactgacgcacgtacggcagggcggggtcggcccgcagtggccagctgggagctacgagcgcggagcttgcgcagaagacccccatcagggtgcggggtgcagttgcggctccagggccatggcggaggagcagggccgggaacgggacycggttcccaagccgtcggtgctgttcctccacccagacctgggcgtgggcggsgctgagcggctggtgttggacgcggcgctggcgctgcaggcgcgsgggtgtagcgtgaagatctggacagcgcactacgacccgggccactgtttcgccgagagccgcgagctaccggtgcgctgtgccggggactggctgccgcgaggcctgggctggggcggccgcggcgccgccgtctgcgcctacgtgcgcatggttttcctggcgctctacgtgctgttcctcgccgacgaggagttcgacgtggtagtgtgcgaccaggtgtctgcctgtatcccagtgttcaggctggctagacggcggaagaagatcctattttactgtcacttcccagatctgcttctcaccaagagagattcttttcttaaacgactatacagggccccaattgactggatagaggaatacaccacaggcatggcagactgcatcttagtcaacagccagttcacagctgctgtttttaaggaaacattcaagtccctgtctcacatagaccctgatgtcctctatccatctctaaatgtcaccagctttgactcagttgttcctgaaaagctggatgacctagtccccaaggggaaaaaattcctgctgctctccatcaacagatacgaaaggaagaaaaatctgactttggcactggaagccctagtacagctgcgtggaagattgacatcccaagattgggagagggttcatctgatcgtggcaggtggttatgacgagagagtcctggagaatgtggaacattatcaggaattgaagaaaatggtccaacagtccgaccttggccagtatgtgaccttcttgaggtctttctcagacaaacagaaaatctccctcctccacagctgcacgtgtgtgctttacacaccaagcaatgagcacttyggcattgtccctctggaagccatgtacatgcagtgcccagtcattgctgttaattcgggtggacccttggagtccattgaccacagtgtcacagggtttctgtgtgagcctgacccggygcacttctcagaagcaatagaaaagttcatccgtgaaccttccttaaaagccaccatgggcctggctggaagagccagagtgaaggaaaaattttcccctgaagcatttacagaacagctctaccgatatgttaccaaactgctggtataatcagattgtttttaagatctccattaatgtcatttttatggattgtagacccagttttgaaaccaaaaaagaaacctagaatctaatgcagaagagatcttttaaaaaataaacttgagtcttgaatgtgagccactttcctatataccacacctccctgtccacttttcattacaaatgtggtgtcattccatgttcagcagagtattttaattatattttctcgggattattgctcttctgtctataaattttgaatgatactgtgccttaattggttttcatagtttaagtgtgtatcattatcaaagttgattaatttggcttcatagtataatgagagcagggctattgtagttcccagattcaatccaccgaagtgttcactgtcatctgttagggaatttttgtttgtcctgtctttgcctggatccatagcgagagtgctctgtattttttttaagataatttgtatttttgcacactgagatataataaaaggtgtttatcataaaaaagaaacagtattagattttggtctccataatctattttggtattgttacgaacatggatatgacaaccaaactggaaatcagaacactagggtaaagtggatattgaaatgaagcaagaatattgtcacacatgtgttgtgcatcttgtttagggtatatttcttaatgtcatctaggtcattagttttgttaatatttgtgttgtcttgaccaagctcctactaagtataggacacaaatgttttttatcttccaaggcctggctcaaatgccactgctgcaaagctttctttgaccctctggccacctcccaagccagaagttatcttccccctccatgtactctagccttttcatgacactgatattttcgtgacactgacttatagttcactgtttacctgttggtctaacagcaaatcataaacagtagttttcaacatacttctaaggctaaattcatttccagaagt

SEQ ID NO: 5657 - DNA, 2432 bp, Homo sapiens
tccagggccatggcggaggagcagggccgggaacgggacycggttcccaagccgtcggtgctgttcctccacccagacctgggcgtgggcggsgctgagcggctggtgttggacgcggcgctggcgctgcaggcgcgsgggtgtagcgtgaagatctggacagcgcactacgacccgggccactgtttcgccgagagccgcgagctaccggtgcgctgtgccggggactggctgccgcgaggcctgggctggggcggccgcggcgccgccgtctgcgcctacgtgcgcatggttttcctggcgctctacgtgctgttcctcgccgacgaggagttcgacgtggtagtgtgcgaccaggccatttgcatcccactgtccttgtgttcggagccaggccacaccgtcctcagcagtgtcatgtgttaaaaacgccaagctgaatatatcatgcccctattaaaacttgtacatggctccccattggtttttggagaaaagttcaagctttttaccttggtgtctgcctgtatcccagtgttcaggctggctagacggcggaagaagatcctattttactgtcacttcccagatctgcttctcaccaagagagattcttttcttaaacgactatacagggccccaattgactggatagaggaatacaccacaggcatggcagactgcatcttagtcaacagccagttcacagctgctgtttttaaggaaacattcaagtccctgtctcacatagaccctgatgtcctctatccatctctaaatgtcaccagctttgactcagttgttcctgaaaagctggatgacctagtccccaaggggaaaaaattcctgctgctctccatcaacagatacgaaaggaagaaaaatctgactttggcactggaagccctagtacagctgcgtggaagattgacatcccaagattgggagagggttcatctgatcgtggcaggtggttatgacgagagagtcctggagaatgtggaacattatcaggaattgaagaaaatggtccaacagtccgaccttggccagtatgtgaccttcttgaggtctttctcagacaaacagaaaatctccctcctccacagctgcacgtgtgtgctttacacaccaagcaatgagcacttyggcattgtccctctggaagccatgtacatgcagtgcccagtcattgctgttaattcgggtggacccttggagtccattgaccacagtgtcacagggtttctgtgtgagcctgacccggyccgtgaaccttccttaaaagccaccatgggcctggctggaagagccagagtgaaggaaaaattttcccctgaagcatttacagaacagctctaccgatatgttaccaaactgctggtataatcagattgtttttaagatctccattaatgtcatttttatggattgtagacccagttttgaaaccaaaaaagaaacctagaatctaatgcagaagagatcttttaaaaaataaacttgagtcttgaatgtgagccactttcctatataccacacctccctgtccacttttcagaaaaaccatgtcttttatgctataatcattccaaattttgccagtgttaagttacaaatgtggtgtcattccatgttcagcagagtattttaattatattttctcgggattattgctcttctgtctataaattttgaatgatactgtgccttaattggttttcatagtttaagtgtgtatcattatcaaagttgattaatttggcttcatagtataatgagagcagggctattgtagttcccagattcaatccaccgaagtgttcactgtcatctgttagggaatttttgtttgtcctgtctttgcctggatccatagcgagagtgctctgtattttttttaagataatttgtatttttgcacactgagatataataaaaggtgtttatcataaaaaagaaacagtattagattttggtctccataatctattttggtattgttacgaacatggatatgacaaccaaactggaaatcagaacactagggtaaagtggatattgaaatgaagcaagaatattgtcacacatgtgttgtgcatcttgtttagggtatatttcttaatgtcatctaggtcattagttttgttaatatttgtgttgtcttgaccaagctcctactaagtataggacacaaatgttttttatcttccaaggcctggctcaaatgccactgctgcaaagctttctttgaccctctggccacctcccaagccagaagttatcttccccctccatgtactctagccttttcatgacactgatattttcgtgacactgacttatagttcactgtttacctgttggtctaacagcaaatcataaacagtagttttcaacatacttctaaggctaaattcatttccagaagt

SEQ ID NO: 5658 - DNA, 3060 bp, Homo sapiens
agtctgctacagacaacttagttacctgctgtatgggaagtagagacctccggcctccttcctttggatcacaacgtccttcagaaagtccaatccctacsgaaggaaaaatataaccggggtcagacaagatattttctcaggcagttactagaccctcacagatttgcgctgatgtggcctaactgacgcacgtacggcagggcggggtcggcccgcagtggccagctgggagctacgagcgcggagcttgcgcagaagacccccatcagggtgcggggtgcagttgcggctccagggccatggcggaggagcagggccgggaacgggacycggttcccaagccgtcggtgctgttcctccacccagacctgggcgtgggcggsgctgagcggctggtgttggacgcggcgctggcgctgcaggcgcgsgggtgtagcgtgaagatctggacagcgcactacgacccgggccactgtttcgccgagagccgcgagctaccggtgcgctgtgccggggactggctgccgcgaggcctgggctggggcggccgcggcgccgccgtctgcgcctacgtgcgcatggttttcctggcgctctacgtgctgttcctcgccgacgaggagttcgacgtggtagtgtgcgaccaggtgtctgcctgtatcccagtgttcaggctggctagacggcggaagaagatcctattttactgtcacttcccagatctgcttctcaccaagagagattcttttcttaaacgactatacagggccccaattgactggatagaggaatacaccacaggcatggcagactgcatcttagtcaacagccagttcacagctgctgtttttaaggaaacattcaagtccctgtctcacatagaccctgatgtcctctatccatctctaaatgtcaccagctttgactcagttgttcctgaaaagctggatgacctagtccccaaggggaaaaaattcctgctgctctccatcaacagatacgaaaggaagaaaaatctgactttggcactggaagccctagtacagctgcgtggaagattgacatcccaagattgggagagggttcatctgatcgtggcaggtggttatgacgagagagtcctggagaatgtggaacattatcaggaattgaagaaaatggtccaacagtccgaccttggccagtatgtgaccttcttgaggtctttctcagacaaacagaaaatctccctcctccacagctgcacgtgtgtgctttacacaccaagcaatgagcacttyggcattgtccctctggaagccatgtacatgcagtgcccagtcattgctgttaattcgggtggacccttggagtccattgaccacagtgtcacagggtttctgtgtgagcctgacccggygcacttctcagaagcaatagaaaagttcatccgtgaaccttccttaaaagccaccatgggcctggctggaagagccagagtgaaggaaaaattttcccctgaagcatttacagaacagctctaccgatatgttaccaaactgctggtataatcagattgtttttaagatctccattaatgtcatttttatggattgtagacccagttttgaaaccaaaaaagaaacctagaatctaatgcagaagagatcttttaaaaaataaacttgagtcttgaatgtgagccactttcctatataccacacctccctgtccacttttcagaaaaaccatgtcttttatgctataatcattccaaattttgccagtgttaagttacaaatgtggtgtcattccatgttcagcagagtattttaattatattttctcgggattattgctcttctgtctataaattttgaatgatactgtgccttaattggttttcatagtttaagtgtgtatcattatcaaagttgattaatttggcttcatagtataatgagagcagggctattgtagttcccagattcaatccaccgaagtgttcactgtcatctgttagggaatttttgtttgtcctgtctttgcctggatccatagcgagagtgctctgtattttttttaagataatttgtatttttgcacactgagatataataaaaggtgtttatcataaaaaagaaacagtattagattttggtctccataatctattttggtattgttacgaacatggatatgacaaccaaactggaaatcagaacactagggtaaagtggatattgaaatgaagcaagaatattgtcacacatgtgttgtgcatcttgtttagggtatatttcttaatgtcatctaggtcattagttttgttaatatttgtgttgtcttgaccaagctcctactaagtataggacacaaatgttttttatcttccaaggcctggctcaaatgccactgctgcaaagctttctttgaccctctggccacctcccaagccagaagttatcttccccctccatgtactctagccttttcatgacactgatattttcgtgacactgacttatagttcactgtttacctgttggtctaacagcaaatcataaacagtagttttcaacatacttctaaggctaaattcatttccagaagtagcaaagcttactagccaaaggctccacatttatcaactcttaagagctagacttgagagcctaacagcctatatgattttgtgtaaattgatctctatacctcagcttcttcatctgcaaagtgagataattgtactattctactttcctcatagtgcggttataacagattatgataatattacaaagtacttaatacttggcatatagtatatatattagctattagtattttgcaatttggggatattgaaaattagaaattgcatgttagttcatgctgcactaccatattgttcttttggggctcttcaatgggtgaaattccattttacagtttatcatgtgcatctgtatcacaggagtattttggcaaaatgattctgtaccaaaaaggagtactataaaatgagggtgccaaatatattgagtcttttatgggattaaaagttctgttgcattc

SEQ ID NO: 5659 - DNA, 3730 bp, Homo sapiens
ggaaccgcgcagcgcacgggaacgcgtcccgctgcttgggtcaggttcgccggtcgcgggagccccgccgtgcagtcggagagggtgtcactctgagtggtgcttcctcagcccctgtcaaaaagcagtttccaccatcctggagtgtggaacacgtggccatcagtaatcatgagcaacccattcgcacaccttgctgagccattggatcctgtacaaccaggaaagaaattcttcaatttgaataaattggaggattcaagatatgggcgcttaccattttcgatcagagttcttctggaagcagccattcggaattgtgatgagtttttggtgaagaaacaggatattgaaaatattctacattggaatgtcacgcagcacaagaacatagaagtgccatttaagcctgctcgtgtcatcctgcaggactttacgggtgtgcccgctgtggttgactttgctgcaatgcgtgatgctgtgaaaaagttaggaggagatccagagaaaataaaccctgtctgccctgctgatcttgtaatagatcattccatccaggttgatttcaacagaagggcagacagtttacagaagaatcaagacctggaatttgaaagaaatagagagcgatttgaatttttaaagtggggttcccaggcttttcacaacatgcggattattccccctggctcaggaatcatccaccaggtgaatttggaatatttggcaagagtggtatttgatcaggatggatattattacccagacagcctcgtgggcacagactcgcacactaccatgattgatggcttgggcattcttggttggggtgtcggtggtattgaagcagaagctgtcatgctgggtcagccaatcagtatggtgcttcctcaggtgattggctacaggctgatggggaagccccaccctctggtaacatccactgacatcgtgctcaccattaccaagcacctccgccaggttggggtagtgggcaaatttgtcgagttcttcgggcctggagtagcccagttgtccattgctgaccgagctacgattgctaacatgtgtccagagtacggagcaactgctgcctttttcccagttgatgaagttagtatcacgtacctggtgcaaacaggtcgtgatgaagaaaaattaaagtatattaaaaaatatcttcaggctgtaggaatgtttcgagatttcaatgacccttctcaagacccagacttcacccaggttgtggaattagatttgaaaacagtagtgccttgctgtagtggacccaaaaggcctcaggacaaagttgctgtgtccgacatgaaaaaggactttgagagctgccttggagmcaagcaaggatttaaaggattccaagttgctcctgaacatcataatgaccataagacctttatctaygataacactgarttcacccttgctcatggttctgtggtcattgctgccattactagctgcacaaacaccagtaatccgtctgtgatgttaggggcaggattgttagcaaagaaagctgtggatgctggcctgaacgtgatgccttacatcaaaactagcctgtctcctgggagtggcgtggtcacctactacctrcaagaaagcrgagtcatgccttatctgtctcagcttgggtttgacgtggtgggctatggctgcatgacctgcattggcaacagtgggcctttacctgaacctgtggtagaagccatcacacagggagaccttgtagctgttggagtactatctggaaacaggaattttgaaggtcgagttcaccccaacacccgggccaactatttagcctctccccccttagtaatagcatatgcaattgctggaaccatcagaatcgactttgagaaagagccattgggagtaaatgcaaagggacagcaggtatttctgaaagatatctggccgactagagacgagatccaggcagtggagcgtcagtatgtcatcccggggatgtttaaggaagtctatcagaaaatagagactgtgaatgaaagctggaatgccttagcaaccccatcagataagctgtttttctggaattccaaatctacgtatatcaaatcaccaccattctttgaaaacctgactttggatcttcagccccctaaatctatagtggatgcctatgtgctgctaaatttgggagattcggtaacaactgaccacatctccccagctggaaatattgcaagaaacagtcctgctgctcgctacttaactaacagaggcctaactccacgagaattcaactcctatggctcccgccgaggtaatgacgccgtcatggcacggggaacatttgccaacattcgcttgttaaacagatttttgaacaagcaggcaccacagactatccatctgccttctggggaaatccttgatgtgtttgatgctgctgagcggtaccagcaggcaggccttcccctgatcgttctggctggcaaagagtacggtgcaggcagctcccgagactgggcagctaagggccctttcctgctgggaatcaaagccgtcctggccgagagctacgagcgcattcaccgcagtaacctggttgggatgggtgtgatcccacttgaatatctccctggtgagaatgcagatgccctggggctcacagggcaagaacgatacactatcattattccagaaaacctcaaaccacaaatgaaagtccaggtcaagctggatactggcaagaccttccaggctgtcatgaggtttgacactgaygtggagctcacttatttcctcaacgggggcatcctcaactacatgatccgcaagatggccaagtaggagacgtgcacttggtgctgcgcccagggaggaagccgcaccaccagccagcgcaggccctggtggagaggcctcccyggctgcctctgggaggggtgctgccttgtagatggagcaagtgagcactgagggtctggtgccaatcctgtaggcacaaaaccagaagtttctacattctctatttttgttaatcatcttctctttttccagaatttggaagctagaatggtgggaatgtcagtagtgccagaaagagagaaccaagcttgtctttaaagttactgatcacaggacgttgctttttcactgtttcctattaatcttcagctgaacacaagcaaaccttctcaggaggtgtctcctaccctcttattgttcctcttamgctctgctcaatgaaaccttcctcttgagggtcattttcctttctgtattaattataccagtgttaagtgacatagataagaactttgcacacttcaaatcagagcagtgattctctcttctctccccttttccttcagagtgaatcatccagactcctcatggataggtcgggtgttaaagttgttttgattatgtaccttttgatagatccacataaaaagaaatgtgaagttttcttttactatcttttcatttatcaagcagagacctttgttgggaggcggtttgggagaacacatttctaatttgaatgaaatgaaatctattttcagtgaaaacttgttgactttgagttttgctgtgtttgtggctagagttttgggatatttagtacagagtgaatctcacaccatatcattgggaagcctgaataaccttcatattctcccatttttacaactctatcagaactgtacgggtataacggaaatgtttaggaacc

SEQ ID NO: 5660 - DNA, 3683 bp, Homo sapiens
cggagcgtggaggcggcagctggaaccgcgcagcgcacgggaacgcgtcccgctgcttgggtcaggttcgccggtcgcgggagccccgccgtgcagtcggaggaacacgtggccatcagtaatcatgagcaacccattcgcacaccttgctgagccattggatcctgtacaaccaggaaagaaattcttcaatttgaataaattggaggattcaagatatgggcgcttaccattttcgatcagagttcttctggaagcagccattcggaattgtgatgagtttttggtgaagaaacaggatattgaaaatattctacattggaatgtcacgcagcacaagaacatagaagtgccatttaagcctgctcgtgtcatcctgcaggactttacgggtgtgcccgctgtggttgactttgctgcaatgcgtgatgctgtgaaaaagttaggaggagatccagagaaaataaaccctgtctgccctgctgatcttgtaatagatcattccatccaggttgatttcaacagaagggcagacagtttacagaagaatcaagacctggaatttgaaagaaatagagagcgatttgaatttttaaagtggggttcccaggcttttcacaacatgcggattattccccctggctcaggaatcatccaccaggtgaatttggaatatttggcaagagtggtatttgatcaggatggatattattacccagacagcctcgtgggcacagactcgcacactaccatgattgatggcttgggcattcttggttggggtgtcggtggtattgaagcagaagctgtcatgctgggtcagccaatcagtatggtgcttcctcaggtgattggctacaggctgatggggaagccccaccctctggtaacatccactgacatcgtgctcaccattaccaagcacctccgccaggttggggtagtgggcaaatttgtcgagttcttcgggcctggagtagcccagttgtccattgctgaccgagctacgattgctaacatgtgtccagagtacggagcaactgctgcctttttcccagttgatgaagttagtatcacgtacctggtgcaaacaggtcgtgatgaagaaaaattaaagtatattaaaaaatatcttcaggctgtaggaatgtttcgagatttcaatgacccttctcaagacccagacttcacccaggttgtggaattagatttgaaaacagtagtgccttgctgtagtggacccaaaaggcctcaggacaaagttgctgtgtccgacatgaaaaaggactttgagagctgccttggagmcaagcaaggatttaaaggattccaagttgctcctgaacatcataatgaccataagacctttatctaygataacactgarttcacccttgctcatggttctgtggtcattgctgccattactagctgcacaaacaccagtaatccgtctgtgatgttaggggcaggattgttagcaaagaaagctgtggatgctggcctgaacgtgatgccttacatcaaaactagcctgtctcctgggagtggcgtggtcacctactacctrcaagaaagcrgagtcatgccttatctgtctcagcttgggtttgacgtggtgggctatggctgcatgacctgcattggcaacagtgggcctttacctgaacctgtggtagaagccatcacacagggagaccttgtagctgttggagtactatctggaaacaggaattttgaaggtcgagttcaccccaacacccgggccaactatttagcctctccccccttagtaatagcatatgcaattgctggaaccatcagaatcgactttgagaaagagccattgggagtaaatgcaaagggacagcaggtatttctgaaagatatctggccgactagagacgagatccaggcagtggagcgtcagtatgtcatcccggggatgtttaaggaagtctatcagaaaatagagactgtgaatgaaagctggaatgccttagcaaccccatcagataagctgtttttctggaattccaaatctacgtatatcaaatcaccaccattctttgaaaacctgactttggatcttcagccccctaaatctatagtggatgcctatgtgctgctaaatttgggagattcggtaacaactgaccacatctccccagctggaaatattgcaagaaacagtcctgctgctcgctacttaactaacagaggcctaactccacgagaattcaactcctatggctcccgccgaggtaatgacgccgtcatggcacggggaacatttgccaacattcgcttgttaaacagatttttgaacaagcaggcaccacagactatccatctgccttctggggaaatccttgatgtgtttgatgctgctgagcggtaccagcaggcaggccttcccctgatcgttctggctggcaaagagtacggtgcaggcagctcccgagactgggcagctaagggccctttcctgctgggaatcaaagccgtcctggccgagagctacgagcgcattcaccgcagtaacctggttgggatgggtgtgatcccacttgaatatctccctggtgagaatgcagatgccctggggctcacagggcaagaacgatacactatcattattccagaaaacctcaaaccacaaatgaaagtccaggtcaagctggatactggcaagaccttccaggctgtcatgaggtttgacactgaygtggagctcacttatttcctcaacgggggcatcctcaactacatgatccgcaagatggccaagtaggagacgtgcacttggtgctgcgcccagggaggaagccgcaccaccagccagcgcaggccctggtggagaggcctcccyggctgcctctgggaggggtgctgccttgtagatggagcaagtgagcactgagggtctggtgccaatcctgtaggcacaaaaccagaagtttctacattctctatttttgttaatcatcttctctttttccagaatttggaagctagaatggtgggaatgtcagtagtgccagaaagagagaaccaagcttgtctttaaagttactgatcacaggacgttgctttttcactgtttcctattaatcttcagctgaacacaagcaaaccttctcaggaggtgtctcctaccctcttattgttcctcttamgctctgctcaatgaaaccttcctcttgagggtcattttcctttctgtattaattataccagtgttaagtgacatagataagaactttgcacacttcaaatcagagcagtgattctctcttctctccccttttccttcagagtgaatcatccagactcctcatggataggtcgggtgttaaagttgttttgattatgtaccttttgatagatccacataaaaagaaatgtgaagttttcttttactatcttttcatttatcaagcagagacctttgttgggaggcggtttgggagaacacatttctaatttgaatgaaatgaaatctattttcagtgaaaacttgttgactttgagttttgctgtgtttgtggctagagttttgggatatttagtacagagtgaatctcacaccatatcattgggaagcctgaataaccttcatattctcccatttttacaactctatcagaactgtacgggtataacggaaatgtttaggaacc

SEQ ID NO: 5661 - DNA, 1650 bp, Homo sapiens
gggacccacgtgggagcctgggagcgggtggtcgtagctcggtagtccagttgtgggtaatcggggctgtttgttcctgtccgagagagctcggcggagacggctgtcgagtacccttcacctcggtgttgggagcctgggagcgaactgcggcgcgggttaccgctcccggggacgcagcaaggggcatcgagtccctggcgggagctgcgccatggcattgctctcgaccgtccggggcgcgacctggggtcgcctcgtcacccgtcatttctcccatgcagcgcggcatggggagcggcctggtggggaggagctaagccgcttgctgctggatgacctggtgccgacctctcggctggagcttctgtttggcatgaccccgtgtctcctggctctgcaggccgcccgccgctctgtggcccggctcctgctccaggcgggtaaagctgggctgcaggggaagcgggccgagctgctccggatggccgaggcgcgggacattccagttctgcggcccagacggcagaaactggacacaatgtgccgctaccaggtccaccagggtgtctgcatggagctgcccgctcactccagtagtcagcaagtccagcgcgggggctatggaggtgatggacgtgttctccactgatgacctcaccggatttttacagaccaaagcccagcagggctggctcgtggccggcacggtgggctgcccaagcacagaggatccccagtcctccgagatccccatcatgagttgcttggagttcctctgggaacggcctactctccttgtgctggggaatgagggctcaggtctatcccaggaggtgcaggcctcctgccagcttctcctcaccatcctgccccggcgccagctgcctcctggacttgagtccttgaacgtctctgtggctgcaggaattcttcttcactccatttgcagccagaggaagggtttccccacagagggggagagaaggcagcttctccaagacccccaagaaccctcagccaggtctgaagggctcagcatggctcagcacccagggctgtcttcaggcccagagaaagagaggcaaaatgagggctgacgtggactgtccacagtgttcatgtgctggagtcagggacggccgcacctgcctccgccggctccagtgtgcggggagcctctgcctgagtgtgcaccaggcccatgtttattgaccacagtctgrgggggggggaaggggactgcggtggacaccagaggaagctgtttcctgttgtgatgttggacctgtagtaggacatggtgatttgttaatttccatgggaagccatgatggcctagcatggagggaatctgttcccaggccctgcctggaagttgagggaaagtttagacatctgcagagaggcaggcagcccagcccaggkgacccgttcctcttgaaccagtcattgcctgtggcaaatgtgtgtatgagaatgtggggggtggagggcggggccctgatgtggagtagacagtgcgcacctcaggcccacacacggccccgccctggggccttgagcgcaggcctcatctttctgtgccgcgggactcygcacctacctcacagggttgttgtgaggctcaaataaaacatcactcagcac

SEQ ID NO: 5662 - DNA, 1827 bp, Homo sapiens
agggacccacgtgggagcctgggagcgggtggtcgtagctcggtagtccagttgtgggtaatcggggctgtttgttcctgtccgagagagctcggcggagacggctgtcgagtacccttcacctcggtgttgggagcctgggagcgaactgcggcgcgggttaccgctcccggggacgcagcaaggggcatcgagtccctggcgggagctgcgccatggcattgctctcgaccgtccggggcgcgacctggggtcgcctcgtcacccgtcatttctcccatgcagcgcggcatggggagcggcctggtggggaggagctaagccgcttgctgctggatgacctggtgccgacctctcggctggagcttctgtttggcatgaccccgtgtctcctggctctgcaggccgcccgccgctctgtggcccggctcctgctccaggcgggtaaagctgggctgcaggggaagcgggccgagctgctccggatggccgaggcgcgggacattccagttctgcggcccagacggcagaaactggacacaatgtgccgctaccaggtccaccagggtgtctgcatggaggtgagcccgctgcggccccggccttggagagaggccggggaggcgagcccaggcgacgacccccagcagttgtggctcgtcctcgatgggatccaggatccccggaattttggggctgtgctgcgttccgcacacttcctcggagtggataaggtcatcaccagccggagaaacagctgcccgctcactccagtagtcagcaagtccagcgcgggggctatggaggtgatggacgtgttctccactgatgacctcaccggatttttacagaccaaagcccagcagggctggctcgtggccggcacggtgggctgcccaagcacagaggatccccagtcctccgagatccccatcatgagttgcttggagttcctctgggaacggcctactctccttgtgctggggaatgagggctcaggtctatcccaggaggtgcaggcctcctgccagcttctcctcaccatcctgccccggcgccagctgcctcctggacttgagtccttgaacgtctctgtggctgcaggaattcttcttcactccatttgcagccagaggaagggtttccccacagagggggagagaaggcagcttctccaagacccccaagaaccctcagccaggtctgaagggctcagcatggctcagcacccagggctgtcttcaggcccagagaaagagaggcaaaatgagggctgacgtggactgtccacagtgttcatgtgctggagtcagggacggccgcacctgcctccgccggctccagtgtgcggggagcctctgcctgagtgtgcaccaggcccatgtttattgaccacagtctgrgggggggggaaggggactgcggtggacaccagaggaagctgtttcctgttgtgatgttggacctgtagtaggacatggtgatttgttaatttccatgggaagccatgatggcctagcatggagggaatctgttcccaggccctgcctggaagttgagggaaagtttagacatctgcagagaggcaggcagcccagcccaggkgacccgttcctcttgaaccagtcattgcctgtggcaaatgtgtgtatgagaatgtggggggtggagggcggggccctgatgtggagtagacagtgcgcacctcaggcccacacacggccccgccctggggccttgagcgcaggcctcatctttctgtgccgcgggactcygcacctacctcacagggttgttgtgaggctcaaataaaacatcactcagcac

SEQ ID NO: 5663 - DNA, 9492 bp, Homo sapiens
cctctcagagacaacgtgaagacggataagcaggcatcaggagcagagtggcctctcaggtctttytggaagtggatatctactcagacagtaagaattataagagctgtaagagctcattttggaggaataatggatgaaccatctcccttggcccaacctctggagctgaaccagcactctcgattcataataggttctgtgtctgaagataactcagaggatgagatcagcaacctggtgaagttggacctactggaggagaaggagggctccttgtcacctgcttctgttggctcagatacactctctgatttggggatctctagcctacwggatggcttggccttgcacataaggtccagcatgtctggcttgcacctagtaaagcagggccgagacagaaagaaaatagattctcaacgagatttcactgtggcttctccagcagaatttgttactcgctttgggggaaataaagtgattgagaaggttcttattgctaacaatggcattgcagcagtgaaatgcatgcggtctatccgtaggtggtcttatgaaatgtttcgaaatgaacgtgcaattagattcgttgtcatggtcacacctgaagaccttaaagccaatgcagaatacattaagatggcagatcactatgtgccagtgcctggaggaccaaacaacaacaactatgcaaatgtggaattaattcttgatattgctaaaaggatcccagtacaagcagtgtgggctggctggggtcatgcttctgagaatcccaaactaccsgaacttctcttgaaaaatggcattgccttcatgggtcctccaagccaggccatgtgggctttaggggataagattgcatcttccatagtggctcaaactgcaggtatcccaactcttccctggagcggcagtggtcttcgtgtggactggcaggaaaatgatttttcaaaacgtatcttaaatgttccccaggagctatatgaaaaaggttatgtgaaagatgtggatgatgggctacaggcagctgaggaagttggatatccagtaatgatcaaggcctcagagggaggaggagggaagggaattagaaaagtcaacaatgcagatgacttccctaatctcttcagacaggttcaagctgaagttcctggatctcccatatttgtgatgagactagccaaacaatctcgtcatctggaggtgcagatcttagcggaccaatatggcaatgctatctctttgtttggtcgtgattgctctgtacaacgcaggcatcagaagattattgaagaagcacctgctactattgctactccagcagtatttgaacacatggaacagtgtgcggtgaaacttgccaaaatggtgggttatgtgagtgctgggactgtggaatacctgtacagccaggatggcagcttctactttctggaattgaatcctcggctgcaggtagagcacccttgtacagagatggtggctgatgtcaatctccctgcagcacagctccagattgccatggggattcctctatatagaatcaaggatatccgtatgatgtatggggtatctccctggggtgattctcccattgattttgaagattctgcacacgttccttgtccaaggggccatgttattgctgctcggatcactagtgaaaatccagatgagggttttaagcccagctcaggaacagttcaggagctaaatttccgcagcaataagaatgtttggggatatttcagtgttgctgctgcagggggacttcatgaatttgctgattctcagtttggtcactgcttttcttggggagaaaacagagaagaggcaatttcaaacatggtggtggctttgaaggagctgtctattcggggtgactttcgaactacagttgaatacctgatcaaattgttagagactgaaagctttcaratgaacagaattgatactggctggctggacagactgatagcagaaaaagtacaggctgagcgacctgacaccatgttgggggttgtgtgtggtgccctccacgtggcagatgtgagcctgcggaatagcgtctctaacttccttcactccttagaaaggggtcaagtccttcctgctcatacacttctgaatacagtagatgttgaacttatctatgagggagtcaagtatgtacttaaggtgactcgacagtcccccaactcctatgtggtgatcatgaatggctcatgtgtagaagtagatgtacatcggctgagtgacggtggactgctcttgtcctatgatggcagcagttatactacgtatatgaaagaggaagtggatagatatcgcatcacaattggcaataaaacctgtgtgtttgagaaggaaaatgacccatcggtgatgcgctcaccttctgctgggaagttaatccagtacattgtagaagatggaggtcatgtgtttgccggccagtgctatgctgagattgaggtaatgaagatggtaatgaccttaacagctgtggagtctggctgtatccattacgtcaagcgacctggagcagctcttgaccctggctgtgtactagccaaaatgcaactggacaaccccagcaaggttcagcaggctgaacttcacacaggtagtctgccayggatccagagcacggcactcagaggcgagaaactccatcgagtgttccattatgtcctggataatctggtcaatgtaatgaatggatactgccttccagatcctttctttagcagcaaggtaaaagactgggtagagcgattgatgaaaaccctcagagatcyctccctgcctctcctagaattgcaagatattatgaccagtgtgtctggccgcattccccccaatgtggagaagtctatcaagaaggaaatggctcagtatgctagcaacatcacatcagtcctctgtcagtttcccagccagcagattgcaaacatcctagatagccatgcagctacattgaaccggaaatctgaacgggaagtcttctttatgaatactcagagcattgttcagctggtacagaggtaccgaagtggcatccgaggccacatgaaggctgtggtgatggatctgctccggcagtacctgcgagtagagacacaattccagaatggtcactatgacaaatgtgtattcgccctccgagaagagaataaaagtgacatgaacactgtactgaactacatcttctctcacgctcaagtcaccaagaagaatcttctggtcacaatgcttattgatcagttgtgtggccgggaccctactctcactgatgagctgctgaatattctcacagagctaactcaactcagtaagaccaccaatgccaaagtagcacttcgagcacgccaggttcttattgcctcccatttgccatcatatgagcttcgccataaccaagtagagtctatcttcctatcagctattgacatgtatggacatcaattttgcattgagaacctgcagaaactcatcctatcagaaacatctatttttgatgtcctaccaaacttcttctatcacagcaaccaagtagtgaggatggcagctctggaggtgtatgttcgaagggcttatattgcctatgaacttaacagcgtacaacaccgccagcttaaggacaacacctgtgtggtggaattccagttcatgctgcccacatctcatccaaacagagggaacatccctacgctaaacagaatgtccttctcctccaacctcaaccactatggcatgacccatgtagctagtgtcagcgatgtactgttggacaactcattcactccaccttgtcagcggatgggcggaatggtctcttttcggacttttgaagattttgtcaggatctttgatgaagtgatgggctgcttctctgactccccaccccagagtcccacattccctgaggcaggtcacacgtctctttatgatgaggataaggttcccagggatgaaccaattcacattctcaatgtggctatcaagactgactgtgatattgaggatgacaggctggcagctatgttcagagaatttacccagcaaaataaagctaccctggttgaccatgggatccggcgccttactttcctggttgcacaaaaggatttcagaaagcaggtcaactatgaggtggatcggagatttcatagagaattccctaaattttttacattccgagcaagggataagtttgaggaggatcgtatctatcgtcatctggagcctgctctggctttccagttagagctgaaccggatgagaaattttgacctcactgccattccatgtgctaatcacaagatgcacctgtatctyggggcagccaaggtggaagtgggcacagaagtgacagactacaggttctttgttcgtgcaatcatcaggcattctgatctggtcaccaaggaagcttcttttgaatatctgcaaaatgaaggggagcggctactcctggaagccatggatgagttggaagttgcttttaacaatacaaatgtccgcactgactgtaaccacatcttcctcaactttgtgcccacggttatcatggacccatcaaagattgaggaatccgtgcggagcatggtaatgcggtatggaagtcgcctgtggaaattgcgcgtcctccaggcagaactgaaaatcaacattcgcctgacgccaactggaaaagcaattcccatccgcctcttcctgacaaacgagtctggctattacttggatatcagcctatacaaggaagtgactgactccaggacagcacagatcatgtttcaggcatatggagacaaacagggaccactgcatggaatgttaatcaatactccatatgtgaccaaagacctgctgcaatcaaagaggttccaggcacaatccttagggacaacatacatatatgatatcccagagatgtttcggcagtccctgatcaaactctgggagtctatgtccactcaagcatttcttccatctccccctctgccttctgacatgctgacttacactgaactggtactggatgatcaaggtcagctggtccacatgaacaggcttccaggaggaaatgaggcaacttggaaaatgacctttaaaagtcctgaatatccagaaggccgagatatcattgttattggcaatgacatcacataccgaattgggtcctttgggcctcaagaggatttgttatttctcagagcttccgaacttgctagggcagaaggtattccacgcatctatgtatcagccaacagtggagcaagaatcggactggcagaagaaattcgccatatgtttcatgtggcctgggtagatcctgaggatccttacaagggatacaggtatttatatctgactcctcaagattataagagagtcagtgctctcaactctgtccattgtgaacacgtggaagatgaaggagaatccaggtacaagataacagatattattgggaaagaagagggaattggacccgagaaccttcgaggttctggaatgattgctggagaatcctcattggcctataatgagatcattaccatcagcctggtgacgtgccgggccattgggattggggcttaccttgtccggctgggacagagaaccatccaggttgagaattctcacttaattctaacaggagctggagccctcaacaaagtcctcgggcgggaagtgtacacctccaataaccagctggggggcatccagattatgcacaacaatggggtgacccactgcactgtgtgtgatgactttgaaggggttttcactgtcctgcactggctgtcttacatgcccaagagcgtgcacagttcagttcctcttctgaactcaaaggatcctatagacagaatcatcgagtttgttcccacaaagaccccatacgatcctcgatggatgctagcaggccgtcctcacccaacccaaaaaggtcagtggttgagtggcttttttgactatggatctttctcagagattatgcagccctgggcacagactgtggtggttggtagagccaggctaggaggaatacctgtgggagttgttgctgtagaaacccgaacagtagaactaagtatcccagctgatccagcaaacctggattctgaagccaagataatccagcaggctggccaggtttggttcccagattctgcgtttaagacrtatcaggccatcaaggacttcaaccgggaagggctgcctctgatggtctttgccaactggagaggcttctctggtggaatgaaagatatgtacgaccaagtgctgaagtttggtgcttacattgtggatggcttgagggagtgctgccagcctgtgctggtttacattcctccccaggctgagctgcggggtggctcctgggtggtgattgactcctccatcaacccccggcacatggagatgtatgctgaccgmgaaagcaggggatctgttctggagccagaagggacagtagaaatcaaattccgcagaaaggatctggtgaaaaccatgcgtcgggtggacccagtctacatccacttggctgagcgattggggaccccagagctaagcacagctgagcggaaggagttggagaacaagttgaaggagcgggaggaattcctaattcccatttaccatcaggtagccgtgcagtttgctgacttgcacgacacaccaggccggatgcaggagaagggtgttattagcgatatcctggattggaaaacatcccgtaccttcttctactggcggctgaggcgtcttctgctggaggacctggtcaagaagaaaatccacaatgccaaccctgagctgactgatggccagattcaagccatgttaaggcgctggtttgtggaagtggaaggaacagtgaaggcttatgtttgggacaataataaggatctggcggagtggctagagaaacagctgacagaggaggatggtgttcactcggtaatagaggaaaacatcaaatgcatcagcagagactacgtcctcaagcaaatccgcagcttggtccaggccaatccagaggttgccatggattccatcatccatatgacgcagcacatatcacccactcagcgagcagaagtcatamggatcctctccacwatggaytccccttccacgtaggaagagcttcctgcctgtccctgccctgtctctggagaaaagggctagagctgccttttacaactgtaaccactgtaatragaaggcacaggagacccagcactggagtcaaatggcattttacttcctctcgtttcaggttatgcatgacatcctgggatgtaagatcacagaatccccctccagcccaccagtcacacctaccccattcagtatttattaccctggccaggcctagtcctccactccctgcacaggactgagaaggcaatgaaaggtacaaacatgtaccatgaggtcttactaaccaaagtagggctgcccctcctgtcctgacagccccttggcctcccagcatggggaagcgtgaggagttgcccagcagtgagcagcccccctcactcctggccccatgagccgcagccacaggcagcagaggagggctaaggagaggaggaagcctcaagtccattgtttattaccccgactcttagcccagcacacagtaggcactggagaggaatgattcccagtttaaccacactacggtaccttttatgaagaaaaattagagcataaaatctactacaagctccataggaactcaaagatgagggcaaaactgtgagccaagaagcagagaaagaaaatagaaccagttattcttgatttaggggacctcaaccttgggttcagtctctgaggacaaaggraaaggtagttgttggcctgcctctcgcctgcacgtcactgctggactagctgtcgcatgtggctgggagctgcaaggccagtgcttgaggggccccagcagttccacaggtggtgaagcctgagttggcagaggaggagccagaagagaactgccctttctgcactggtggaaactagttatttatgccatgtggagagccagtragatagatagatagtctgtttgttttgaggacttggaaagttgttcctatgaagcctggagcttggatggttttgagaggttaatggtgcctccacactcactcttccctagttccaggattactgtcctagcagctaacggttctactctcttccccagagtgtagacaggcagcaggtctccccacagctctgaaaggaccctggtgacagctacaccctcagcaccaggagctggccttcctgatgagggaggcttccaggaaacacagaatccacatgaccttaagattatttacaactcagtcatggtgctgctgtcctccaggcttactggcccctcctgactggcatcaggggcttcctcaggtggtggagagagtttactttcaacaactagtttattcaagaaaagaacttactgattcctctgttcctaaagcaagagtggcaggtgatcagggctggtgtagcatccggttcctttagtgcagctaactgcatttgtcactgatgaccaaggaggaaatcactaagacatttgagaagcagtggtatgaacgttcttggacaagccacagttctgagccttaaccctgtagtttgcacacaagaacgagctccacctccccttcttcaggaggaatctgtgcggatagattggctggacttttcaatggttctgggttgcaggtgggcactgtatggctgggtatggagcggacagcccccaggagtcagagcctcagcccggctgccctggtggaaggtacaggtgttcagcaccttcagaaaagggcataaagtggtgggggacaattctcagtccaggaaaatgcattgaccattgctggctatttgcttacctagtaagaattggattcatttttgaccagattattcttctatgcttttttgcaataaatcaaatcccacatatctacaagtggtatgaagtcctgcaccccccaggaggcctgtccaggcatgtcttcagaggcagggtgggttacactcatttacctcccctctccccaccaaattatgacacaaacgagtatgtttcctctctagaaccctgtaatgcctcctcccccatccccagagctccttactgtaggtcttaccctggacaaggattttttcaagttggaggcacagaacatgagcaatctgacattcccacagcccctcaaacatgcaaggctactaaggcaggaggagtataaatgatggatattgaccaagacctgcttggacggagaccgccatattatctgttctcttcgttcacaaaacagccttcacttgtctcagaatttgatggacacatactgtgatgagcaggagcttcagatgcactctttacacattttgttgaaataaacctctacatttgtagaagagtta

SEQ ID NO: 5664 - DNA, 9395 bp, Homo sapiens
ctgtaagagctcattttggaggaataatggatgaaccatctcccttggcccaacctctggagctgaaccagcactctcgattcataataggttctgtgtctgaagataactcagaggatgagatcagcaacctggtgaagttggacctactggaggagaaggagggctccttgtcacctgcttctgttggctcagatacactctctgatttggggatctctagcctacwggatggcttggccttgcacataaggtccagcatgtctggcttgcacctagtaaagcagggccgagacagaaagaaaatagattctcaacgagatttcactgtggcttctccagcagaatttgttactcgctttgggggaaataaagtgattgagaaggttcttattgctaacaatggcattgcagcagtgaaatgcatgcggtctatccgtaggtggtcttatgaaatgtttcgaaatgaacgtgcaattagattcgttgtcatggtcacacctgaagaccttaaagccaatgcagaatacattaagatggcagatcactatgtgccagtgcctggaggaccaaacaacaacaactatgcaaatgtggaattaattcttgatattgctaaaaggatcccagtacaagcagtgtgggctggctggggtcatgcttctgagaatcccaaactaccsgaacttctcttgaaaaatggcattgccttcatgggtcctccaagccaggccatgtgggctttaggggataagattgcatcttccatagtggctcaaactgcaggtatcccaactcttccctggagcggcagtggtcttcgtgtggactggcaggaaaatgatttttcaaaacgtatcttaaatgttccccaggagctatatgaaaaaggttatgtgaaagatgtggatgatgggctacaggcagctgaggaagttggatatccagtaatgatcaaggcctcagagggaggaggagggaagggaattagaaaagtcaacaatgcagatgacttccctaatctcttcagacaggttcaagctgaagttcctggatctcccatatttgtgatgagactagccaaacaatctcgtcatctggaggtgcagatcttagcggaccaatatggcaatgctatctctttgtttggtcgtgattgctctgtacaacgcaggcatcagaagattattgaagaagcacctgctactattgctactccagcagtatttgaacacatggaacagtgtgcggtgaaacttgccaaaatggtgggttatgtgagtgctgggactgtggaatacctgtacagccaggatggcagcttctactttctggaattgaatcctcggctgcaggtagagcacccttgtacagagatggtggctgatgtcaatctccctgcagcacagctccagattgccatggggattcctctatatagaatcaaggatatccgtatgatgtatggggtatctccctggggtgattctcccattgattttgaagattctgcacacgttccttgtccaaggggccatgttattgctgctcggatcactagtgaaaatccagatgagggttttaagcccagctcaggaacagttcaggagctaaatttccgcagcaataagaatgtttggggatatttcagtgttgctgctgcagggggacttcatgaatttgctgattctcagtttggtcactgcttttcttggggagaaaacagagaagaggcaatttcaaacatggtggtggctttgaaggagctgtctattcggggtgactttcgaactacagttgaatacctgatcaaattgttagagactgaaagctttcaratgaacagaattgatactggctggctggacagactgatagcagaaaaagtacaggctgagcgacctgacaccatgttgggggttgtgtgtggtgccctccacgtggcagatgtgagcctgcggaatagcgtctctaacttccttcactccttagaaaggggtcaagtccttcctgctcatacacttctgaatacagtagatgttgaacttatctatgagggagtcaagtatgtacttaaggtgactcgacagtcccccaactcctatgtggtgatcatgaatggctcatgtgtagaagtagatgtacatcggctgagtgacggtggactgctcttgtcctatgatggcagcagttatactacgtatatgaaagaggaagtggatagatatcgcatcacaattggcaataaaacctgtgtgtttgagaaggaaaatgacccatcggtgatgcgctcaccttctgctgggaagttaatccagtacattgtagaagatggaggtcatgtgtttgccggccagtgctatgctgagattgaggtaatgaagatggtaatgaccttaacagctgtggagtctggctgtatccattacgtcaagcgacctggagcagctcttgaccctggctgtgtactagccaaaatgcaactggacaaccccagcaaggttcagcaggctgaacttcacacaggtagtctgccayggatccagagcacggcactcagaggcgagaaactccatcgagtgttccattatgtcctggataatctggtcaatgtaatgaatggatactgccttccagatcctttctttagcagcaaggtaaaagactgggtagagcgattgatgaaaaccctcagagatcyctccctgcctctcctagaattgcaagatattatgaccagtgtgtctggccgcattccccccaatgtggagaagtctatcaagaaggaaatggctcagtatgctagcaacatcacatcagtcctctgtcagtttcccagccagcagattgcaaacatcctagatagccatgcagctacattgaaccggaaatctgaacgggaagtcttctttatgaatactcagagcattgttcagctggtacagaggtaccgaagtggcatccgaggccacatgaaggctgtggtgatggatctgctccggcagtacctgcgagtagagacacaattccagaatggtcactatgacaaatgtgtattcgccctccgagaagagaataaaagtgacatgaacactgtactgaactacatcttctctcacgctcaagtcaccaagaagaatcttctggtcacaatgcttattgatcagttgtgtggccgggaccctactctcactgatgagctgctgaatattctcacagagctaactcaactcagtaagaccaccaatgccaaagtagcacttcgagcacgccaggttcttattgcctcccatttgccatcatatgagcttcgccataaccaagtagagtctatcttcctatcagctattgacatgtatggacatcaattttgcattgagaacctgcagaaactcatcctatcagaaacatctatttttgatgtcctaccaaacttcttctatcacagcaaccaagtagtgaggatggcagctctggaggtgtatgttcgaagggcttatattgcctatgaacttaacagcgtacaacaccgccagcttaaggacaacacctgtgtggtggaattccagttcatgctgcccacatctcatccaaacagagggaacatccctacgctaaacagaatgtccttctcctccaacctcaaccactatggcatgacccatgtagctagtgtcagcgatgtactgttggacaactcattcactccaccttgtcagcggatgggcggaatggtctcttttcggacttttgaagattttgtcaggatctttgatgaagtgatgggctgcttctctgactccccaccccagagtcccacattccctgaggcaggtcacacgtctctttatgatgaggataaggttcccagggatgaaccaattcacattctcaatgtggctatcaagactgactgtgatattgaggatgacaggctggcagctatgttcagagaatttacccagcaaaataaagctaccctggttgaccatgggatccggcgccttactttcctggttgcacaaaaggatttcagaaagcaggtcaactatgaggtggatcggagatttcatagagaattccctaaattttttacattccgagcaagggataagtttgaggaggatcgtatctatcgtcatctggagcctgctctggctttccagttagagctgaaccggatgagaaattttgacctcactgccattccatgtgctaatcacaagatgcacctgtatctyggggcagccaaggtggaagtgggcacagaagtgacagactacaggttctttgttcgtgcaatcatcaggcattctgatctggtcaccaaggaagcttcttttgaatatctgcaaaatgaaggggagcggctactcctggaagccatggatgagttggaagttgcttttaacaatacaaatgtccgcactgactgtaaccacatcttcctcaactttgtgcccacggttatcatggacccatcaaagattgaggaatccgtgcggagcatggtaatgcggtatggaagtcgcctgtggaaattgcgcgtcctccaggcagaactgaaaatcaacattcgcctgacgccaactggaaaagcaattcccatccgcctcttcctgacaaacgagtctggctattacttggatatcagcctatacaaggaagtgactgactccaggacagcacagatcatgtttcaggcatatggagacaaacagggaccactgcatggaatgttaatcaatactccatatgtgaccaaagacctgctgcaatcaaagaggttccaggcacaatccttagggacaacatacatatatgatatcccagagatgtttcggcagtccctgatcaaactctgggagtctatgtccactcaagcatttcttccatctccccctctgccttctgacatgctgacttacactgaactggtactggatgatcaaggtcagctggtccacatgaacaggcttccaggaggaaatgagattggcatggtagcttggaaaatgacctttaaaagtcctgaatatccagaaggccgagatatcattgttattggcaatgacatcacataccgaattgggtcctttgggcctcaagaggatttgttatttctcagagcttccgaacttgctagggcagaaggtattccacgcatctatgtatcagccaacagtggagcaagaatcggactggcagaagaaattcgccatatgtttcatgtggcctgggtagatcctgaggatccttacaagggatacaggtatttatatctgactcctcaagattataagagagtcagtgctctcaactctgtccattgtgaacacgtggaagatgaaggagaatccaggtacaagataacagatattattgggaaagaagagggaattggacccgagaaccttcgaggttctggaatgattgctggagaatcctcattggcctataatgagatcattaccatcagcctggtgacgtgccgggccattgggattggggcttaccttgtccggctgggacagagaaccatccaggttgagaattctcacttaattctaacaggagctggagccctcaacaaagtcctcgggcgggaagtgtacacctccaataaccagctggggggcatccagattatgcacaacaatggggtgacccactgcactgtgtgtgatgactttgaaggggttttcactgtcctgcactggctgtcttacatgcccaagagcgtgcacagttcagttcctcttctgaactcaaaggatcctatagacagaatcatcgagtttgttcccacaaagaccccatacgatcctcgatggatgctagcaggccgtcctcacccaacccaaaaaggtcagtggttgagtggcttttttgactatggatctttctcagagattatgcagccctgggcacagactgtggtggttggtagagccaggctaggaggaatacctgtgggagttgttgctgtagaaacccgaacagtagaactaagtatcccagctgatccagcaaacctggattctgaagccaagataatccagcaggctggccaggtttggttcccagattctgcgtttaagacrtatcaggccatcaaggacttcaaccgggaagggctgcctctgatggtctttgccaactggagaggcttctctggtggaatgaaagatatgtacgaccaagtgctgaagtttggtgcttacattgtggatggcttgagggagtgctgccagcctgtgctggtttacattcctccccaggctgagctgcggggtggctcctgggtggtgattgactcctccatcaacccccggcacatggagatgtatgctgaccgmgaaagcaggggatctgttctggagccagaagggacagtagaaatcaaattccgcagaaaggatctggtgaaaaccatgcgtcgggtggacccagtctacatccacttggctgagcgattggggaccccagagctaagcacagctgagcggaaggagttggagaacaagttgaaggagcgggaggaattcctaattcccatttaccatcaggtagccgtgcagtttgctgacttgcacgacacaccaggccggatgcaggagaagggtgttattagcgatatcctggattggaaaacatcccgtaccttcttctactggcggctgaggcgtcttctgctggaggacctggtcaagaagaaaatccacaatgccaaccctgagctgactgatggccagattcaagccatgttaaggcgctggtttgtggaagtggaaggaacagtgaaggcttatgtttgggacaataataaggatctggcggagtggctagagaaacagctgacagaggaggatggtgttcactcggtaatagaggaaaacatcaaatgcatcagcagagactacgtcctcaagcaaatccgcagcttggtccaggccaatccagaggttgccatggattccatcatccatatgacgcagcacatatcacccactcagcgagcagaagtcatamggatcctctccacwatggaytccccttccacgtaggaagagcttcctgcctgtccctgccctgtctctggagaaaagggctagagctgccttttacaactgtaaccactgtaatragaaggcacaggagacccagcactggagtcaaatggcattttacttcctctcgtttcaggttatgcatgacatcctgggatgtaagatcacagaatccccctccagcccaccagtcacacctaccccattcagtatttattaccctggccaggcctagtcctccactccctgcacaggactgagaaggcaatgaaaggtacaaacatgtaccatgaggtcttactaaccaaagtagggctgcccctcctgtcctgacagccccttggcctcccagcatggggaagcgtgaggagttgcccagcagtgagcagcccccctcactcctggccccatgagccgcagccacaggcagcagaggagggctaaggagaggaggaagcctcaagtccattgtttattaccccgactcttagcccagcacacagtaggcactggagaggaatgattcccagtttaaccacactacggtaccttttatgaagaaaaattagagcataaaatctactacaagctccataggaactcaaagatgagggcaaaactgtgagccaagaagcagagaaagaaaatagaaccagttattcttgatttaggggacctcaaccttgggttcagtctctgaggacaaaggraaaggtagttgttggcctgcctctcgcctgcacgtcactgctggactagctgtcgcatgtggctgggagctgcaaggccagtgcttgaggggccccagcagttccacaggtggtgaagcctgagttggcagaggaggagccagaagagaactgccctttctgcactggtggaaactagttatttatgccatgtggagagccagtragatagatagatagtctgtttgttttgaggacttggaaagttgttcctatgaagcctggagcttggatggttttgagaggttaatggtgcctccacactcactcttccctagttccaggattactgtcctagcagctaacggttctactctcttccccagagtgtagacaggcagcaggtctccccacagctctgaaaggaccctggtgacagctacaccctcagcaccaggagctggccttcctgatgagggaggcttccaggaaacacagaatccacatgaccttaagattatttacaactcagtcatggtgctgctgtcctccaggcttactggcccctcctgactggcatcaggggcttcctcaggtggtggagagagtttactttcaacaactagtttattcaagaaaagaacttactgattcctctgttcctaaagcaagagtggcaggtgatcagggctggtgtagcatccggttcctttagtgcagctaactgcatttgtcactgatgaccaaggaggaaatcactaagacatttgagaagcagtggtatgaacgttcttggacaagccacagttctgagccttaaccctgtagtttgcacacaagaacgagctccacctccccttcttcaggaggaatctgtgcggatagattggctggacttttcaatggttctgggttgcaggtgggcactgtatggctgggtatggagcggacagcccccaggagtcagagcctcagcccggctgccctggtggaaggtacaggtgttcagcaccttcagaaaagggcataaagtggtgggggacaattctcagtccaggaaaatgcattgaccattgctggctatttgcttacctagtaagaattggattcatttttgaccagattattcttctatgcttttttgcaataaatcaaatcccacatatctacaagtggtatgaagtcctgcaccccccaggaggcctgtccaggcatgtcttcagaggcagggtgggttacactcatttacctcccctctccccaccaaattatgacacaaacgagtatgtttcctctctagaaccctgtaatgcctcctcccccatccccagagctccttactgtaggtcttaccctggacaaggattttttcaagttggaggcacagaacatgagcaatctgacattcccacagcccctcaaacatgcaaggctactaaggcaggaggagtataaatgatggatattgaccaagacctgcttggacggagaccgccatattatctgttctcttcgttcacaaaacagccttcacttgtctcagaatttgatggacacatactgtgatgagcaggagcttcagatgcactctttacacattttgttgaaataaacctctacatttgtagaagagtta

SEQ ID NO: 5665 - DNA, 563 bp, Homo sapiens
atggatgaaccatctcccttggcccaacctctggagctgaaccagcactctcgattcataataggttctgtgtctgaagataactcagaggatgagatcagcaacctggtgaagttggacctactggaggagaaggagggctccttgtcacctgcttctgttggctcagatacactctctgatttggggatctctagcctacwggatggcttggccttgcacataagttcttggattaaaaggtctggatcagtggttcttggttctcactgttcatcagaatcacctcggggagccttgggagataagccccatccccagagatttcgattcatttgatactggcttggtgtggaactggggcttttttttaaggtatccaggtgattgttgtgtacagccagcattcagattataggtgtaccctagataacataagttagggtggctgttgttgctgttactatcttggcacctttattattaatgggtcataaaataattcagctctattttatacactaaatatatcaactctataataaaatcctgtatgagatctg

SEQ ID NO: 5666 - DNA, 9501 bp, Homo sapiens
cctctcagagacaacgtgaagacggataagcaggcatcaggagcagagtggcctctcaggtctttytggaagtggatatctactcagacagtaagaattataagagctgtaagagctcattttggaggaataatggatgaaccatctcccttggcccaacctctggagctgaaccagcactctcgattcataataggttctgtgtctgaagataactcagaggatgagatcagcaacctggtgaagttggacctactggaggagaaggagggctccttgtcacctgcttctgttggctcagatacactctctgatttggggatctctagcctacwggatggcttggccttgcacataaggtccagcatgtctggcttgcacctagtaaagcagggccgagacagaaagaaaatagattctcaacgagatttcactgtggcttctccagcagaatttgttactcgctttgggggaaataaagtgattgagaaggttcttattgctaacaatggcattgcagcagtgaaatgcatgcggtctatccgtaggtggtcttatgaaatgtttcgaaatgaacgtgcaattagattcgttgtcatggtcacacctgaagaccttaaagccaatgcagaatacattaagatggcagatcactatgtgccagtgcctggaggaccaaacaacaacaactatgcaaatgtggaattaattcttgatattgctaaaaggatcccagtacaagcagtgtgggctggctggggtcatgcttctgagaatcccaaactaccsgaacttctcttgaaaaatggcattgccttcatgggtcctccaagccaggccatgtgggctttaggggataagattgcatcttccatagtggctcaaactgcaggtatcccaactcttccctggagcggcagtggtcttcgtgtggactggcaggaaaatgatttttcaaaacgtatcttaaatgttccccaggagctatatgaaaaaggttatgtgaaagatgtggatgatgggctacaggcagctgaggaagttggatatccagtaatgatcaaggcctcagagggaggaggagggaagggaattagaaaagtcaacaatgcagatgacttccctaatctcttcagacaggttcaagctgaagttcctggatctcccatatttgtgatgagactagccaaacaatctcgtcatctggaggtgcagatcttagcggaccaatatggcaatgctatctctttgtttggtcgtgattgctctgtacaacgcaggcatcagaagattattgaagaagcacctgctactattgctactccagcagtatttgaacacatggaacagtgtgcggtgaaacttgccaaaatggtgggttatgtgagtgctgggactgtggaatacctgtacagccaggatggcagcttctactttctggaattgaatcctcggctgcaggtagagcacccttgtacagagatggtggctgatgtcaatctccctgcagcacagctccagattgccatggggattcctctatatagaatcaaggatatccgtatgatgtatggggtatctccctggggtgattctcccattgattttgaagattctgcacacgttccttgtccaaggggccatgttattgctgctcggatcactagtgaaaatccagatgagggttttaagcccagctcaggaacagttcaggagctaaatttccgcagcaataagaatgtttggggatatttcagtgttgctgctgcagggggacttcatgaatttgctgattctcagtttggtcactgcttttcttggggagaaaacagagaagaggcaatttcaaacatggtggtggctttgaaggagctgtctattcggggtgactttcgaactacagttgaatacctgatcaaattgttagagactgaaagctttcaratgaacagaattgatactggctggctggacagactgatagcagaaaaagtacaggctgagcgacctgacaccatgttgggggttgtgtgtggtgccctccacgtggcagatgtgagcctgcggaatagcgtctctaacttccttcactccttagaaaggggtcaagtccttcctgctcatacacttctgaatacagtagatgttgaacttatctatgagggagtcaagtatgtacttaaggtgactcgacagtcccccaactcctatgtggtgatcatgaatggctcatgtgtagaagtagatgtacatcggctgagtgacggtggactgctcttgtcctatgatggcagcagttatactacgtatatgaaagaggaagtggatagatatcgcatcacaattggcaataaaacctgtgtgtttgagaaggaaaatgacccatcggtgatgcgctcaccttctgctgggaagttaatccagtacattgtagaagatggaggtcatgtgtttgccggccagtgctatgctgagattgaggtaatgaagatggtaatgaccttaacagctgtggagtctggctgtatccattacgtcaagcgacctggagcagctcttgaccctggctgtgtactagccaaaatgcaactggacaaccccagcaaggttcagcaggctgaacttcacacaggtagtctgccayggatccagagcacggcactcagaggcgagaaactccatcgagtgttccattatgtcctggataatctggtcaatgtaatgaatggatactgccttccagatcctttctttagcagcaaggtaaaagactgggtagagcgattgatgaaaaccctcagagatcyctccctgcctctcctagaattgcaagatattatgaccagtgtgtctggccgcattccccccaatgtggagaagtctatcaagaaggaaatggctcagtatgctagcaacatcacatcagtcctctgtcagtttcccagccagcagattgcaaacatcctagatagccatgcagctacattgaaccggaaatctgaacgggaagtcttctttatgaatactcagagcattgttcagctggtacagaggtaccgaagtggcatccgaggccacatgaaggctgtggtgatggatctgctccggcagtacctgcgagtagagacacaattccagaatggtcactatgacaaatgtgtattcgccctccgagaagagaataaaagtgacatgaacactgtactgaactacatcttctctcacgctcaagtcaccaagaagaatcttctggtcacaatgcttattgatcagttgtgtggccgggaccctactctcactgatgagctgctgaatattctcacagagctaactcaactcagtaagaccaccaatgccaaagtagcacttcgagcacgccaggttcttattgcctcccatttgccatcatatgagcttcgccataaccaagtagagtctatcttcctatcagctattgacatgtatggacatcaattttgcattgagaacctgcagaaactcatcctatcagaaacatctatttttgatgtcctaccaaacttcttctatcacagcaaccaagtagtgaggatggcagctctggaggtgtatgttcgaagggcttatattgcctatgaacttaacagcgtacaacaccgccagcttaaggacaacacctgtgtggtggaattccagttcatgctgcccacatctcatccaaacagagggaacatccctacgctaaacagaatgtccttctcctccaacctcaaccactatggcatgacccatgtagctagtgtcagcgatgtactgttggacaactcattcactccaccttgtcagcggatgggcggaatggtctcttttcggacttttgaagattttgtcaggatctttgatgaagtgatgggctgcttctctgactccccaccccagagtcccacattccctgaggcaggtcacacgtctctttatgatgaggataaggttcccagggatgaaccaattcacattctcaatgtggctatcaagactgactgtgatattgaggatgacaggctggcagctatgttcagagaatttacccagcaaaataaagctaccctggttgaccatgggatccggcgccttactttcctggttgcacaaaaggatttcagaaagcaggtcaactatgaggtggatcggagatttcatagagaattccctaaattttttacattccgagcaagggataagtttgaggaggatcgtatctatcgtcatctggagcctgctctggctttccagttagagctgaaccggatgagaaattttgacctcactgccattccatgtgctaatcacaagatgcacctgtatctyggggcagccaaggtggaagtgggcacagaagtgacagactacaggttctttgttcgtgcaatcatcaggcattctgatctggtcaccaaggaagcttcttttgaatatctgcaaaatgaaggggagcggctactcctggaagccatggatgagttggaagttgcttttaacaatacaaatgtccgcactgactgtaaccacatcttcctcaactttgtgcccacggttatcatggacccatcaaagattgaggaatccgtgcggagcatggtaatgcggtatggaagtcgcctgtggaaattgcgcgtcctccaggcagaactgaaaatcaacattcgcctgacgccaactggaaaagcaattcccatccgcctcttcctgacaaacgagtctggctattacttggatatcagcctatacaaggaagtgactgactccaggacagcacagatcatgtttcaggcatatggagacaaacagggaccactgcatggaatgttaatcaatactccatatgtgaccaaagacctgctgcaatcaaagaggttccaggcacaatccttagggacaacatacatatatgatatcccagagatgtttcggcagtccctgatcaaactctgggagtctatgtccactcaagcatttcttccatctccccctctgccttctgacatgctgacttacactgaactggtactggatgatcaaggtcagctggtccacatgaacaggcttccaggaggaaatgagattggcatggtagcttggaaaatgacctttaaaagtcctgaatatccagaaggccgagatatcattgttattggcaatgacatcacataccgaattgggtcctttgggcctcaagaggatttgttatttctcagagcttccgaacttgctagggcagaaggtattccacgcatctatgtatcagccaacagtggagcaagaatcggactggcagaagaaattcgccatatgtttcatgtggcctgggtagatcctgaggatccttacaagggatacaggtatttatatctgactcctcaagattataagagagtcagtgctctcaactctgtccattgtgaacacgtggaagatgaaggagaatccaggtacaagataacagatattattgggaaagaagagggaattggacccgagaaccttcgaggttctggaatgattgctggagaatcctcattggcctataatgagatcattaccatcagcctggtgacgtgccgggccattgggattggggcttaccttgtccggctgggacagagaaccatccaggttgagaattctcacttaattctaacaggagctggagccctcaacaaagtcctcgggcgggaagtgtacacctccaataaccagctggggggcatccagattatgcacaacaatggggtgacccactgcactgtgtgtgatgactttgaaggggttttcactgtcctgcactggctgtcttacatgcccaagagcgtgcacagttcagttcctcttctgaactcaaaggatcctatagacagaatcatcgagtttgttcccacaaagaccccatacgatcctcgatggatgctagcaggccgtcctcacccaacccaaaaaggtcagtggttgagtggcttttttgactatggatctttctcagagattatgcagccctgggcacagactgtggtggttggtagagccaggctaggaggaatacctgtgggagttgttgctgtagaaacccgaacagtagaactaagtatcccagctgatccagcaaacctggattctgaagccaagataatccagcaggctggccaggtttggttcccagattctgcgtttaagacrtatcaggccatcaaggacttcaaccgggaagggctgcctctgatggtctttgccaactggagaggcttctctggtggaatgaaagatatgtacgaccaagtgctgaagtttggtgcttacattgtggatggcttgagggagtgctgccagcctgtgctggtttacattcctccccaggctgagctgcggggtggctcctgggtggtgattgactcctccatcaacccccggcacatggagatgtatgctgaccgmgaaagcaggggatctgttctggagccagaagggacagtagaaatcaaattccgcagaaaggatctggtgaaaaccatgcgtcgggtggacccagtctacatccacttggctgagcgattggggaccccagagctaagcacagctgagcggaaggagttggagaacaagttgaaggagcgggaggaattcctaattcccatttaccatcaggtagccgtgcagtttgctgacttgcacgacacaccaggccggatgcaggagaagggtgttattagcgatatcctggattggaaaacatcccgtaccttcttctactggcggctgaggcgtcttctgctggaggacctggtcaagaagaaaatccacaatgccaaccctgagctgactgatggccagattcaagccatgttaaggcgctggtttgtggaagtggaaggaacagtgaaggcttatgtttgggacaataataaggatctggcggagtggctagagaaacagctgacagaggaggatggtgttcactcggtaatagaggaaaacatcaaatgcatcagcagagactacgtcctcaagcaaatccgcagcttggtccaggccaatccagaggttgccatggattccatcatccatatgacgcagcacatatcacccactcagcgagcagaagtcatamggatcctctccacwatggaytccccttccacgtaggaagagcttcctgcctgtccctgccctgtctctggagaaaagggctagagctgccttttacaactgtaaccactgtaatragaaggcacaggagacccagcactggagtcaaatggcattttacttcctctcgtttcaggttatgcatgacatcctgggatgtaagatcacagaatccccctccagcccaccagtcacacctaccccattcagtatttattaccctggccaggcctagtcctccactccctgcacaggactgagaaggcaatgaaaggtacaaacatgtaccatgaggtcttactaaccaaagtagggctgcccctcctgtcctgacagccccttggcctcccagcatggggaagcgtgaggagttgcccagcagtgagcagcccccctcactcctggccccatgagccgcagccacaggcagcagaggagggctaaggagaggaggaagcctcaagtccattgtttattaccccgactcttagcccagcacacagtaggcactggagaggaatgattcccagtttaaccacactacggtaccttttatgaagaaaaattagagcataaaatctactacaagctccataggaactcaaagatgagggcaaaactgtgagccaagaagcagagaaagaaaatagaaccagttattcttgatttaggggacctcaaccttgggttcagtctctgaggacaaaggraaaggtagttgttggcctgcctctcgcctgcacgtcactgctggactagctgtcgcatgtggctgggagctgcaaggccagtgcttgaggggccccagcagttccacaggtggtgaagcctgagttggcagaggaggagccagaagagaactgccctttctgcactggtggaaactagttatttatgccatgtggagagccagtragatagatagatagtctgtttgttttgaggacttggaaagttgttcctatgaagcctggagcttggatggttttgagaggttaatggtgcctccacactcactcttccctagttccaggattactgtcctagcagctaacggttctactctcttccccagagtgtagacaggcagcaggtctccccacagctctgaaaggaccctggtgacagctacaccctcagcaccaggagctggccttcctgatgagggaggcttccaggaaacacagaatccacatgaccttaagattatttacaactcagtcatggtgctgctgtcctccaggcttactggcccctcctgactggcatcaggggcttcctcaggtggtggagagagtttactttcaacaactagtttattcaagaaaagaacttactgattcctctgttcctaaagcaagagtggcaggtgatcagggctggtgtagcatccggttcctttagtgcagctaactgcatttgtcactgatgaccaaggaggaaatcactaagacatttgagaagcagtggtatgaacgttcttggacaagccacagttctgagccttaaccctgtagtttgcacacaagaacgagctccacctccccttcttcaggaggaatctgtgcggatagattggctggacttttcaatggttctgggttgcaggtgggcactgtatggctgggtatggagcggacagcccccaggagtcagagcctcagcccggctgccctggtggaaggtacaggtgttcagcaccttcagaaaagggcataaagtggtgggggacaattctcagtccaggaaaatgcattgaccattgctggctatttgcttacctagtaagaattggattcatttttgaccagattattcttctatgcttttttgcaataaatcaaatcccacatatctacaagtggtatgaagtcctgcaccccccaggaggcctgtccaggcatgtcttcagaggcagggtgggttacactcatttacctcccctctccccaccaaattatgacacaaacgagtatgtttcctctctagaaccctgtaatgcctcctcccccatccccagagctccttactgtaggtcttaccctggacaaggattttttcaagttggaggcacagaacatgagcaatctgacattcccacagcccctcaaacatgcaaggctactaaggcaggaggagtataaatgatggatattgaccaagacctgcttggacggagaccgccatattatctgttctcttcgttcacaaaacagccttcacttgtctcagaatttgatggacacatactgtgatgagcaggagcttcagatgcactctttacacattttgttgaaataaacctctacatttgtagaagagtta

SEQ ID NO: 5667 - DNA, 6955 bp, Homo sapiens
cctctcagagacaacgtgaagacggataagcaggcatcaggagcagagtggcctctcaggtctttytggaagtggatatctactcagacagtaagaattataagagctgtaagagctcattttggaggaataatggatgaaccatctcccttggcccaacctctggagctgaaccagcactctcgattcataataggttctgtgtctgaagataactcagaggatgagatcagcaacctggtgaagttggacctactggaggagaaggagggctccttgtcacctgcttctgttggctcagatacactctctgatttggggatctctagcctacwggatggcttggccttgcacataaggtccagcatgtctggcttgcacctagtaaagcagggccgagacagaaagaaaatagattctcaacgagatttcactgtggcttctccagcagaatttgttactcgctttgggggaaataaagtgattgagaaggttcttattgctaacaatggcattgcagcagtgaaatgcatgcggtctatccgtaggtggtcttatgaaatgtttcgaaatgaacgtgcaattagattcgttgtcatggtcacacctgaagaccttaaagccaatgcagaatacattaagatggcagatcactatgtgccagtgcctggaggaccaaacaacaacaactatgcaaatgtggaattaattcttgatattgctaaaaggatcccagtacaagcagtgtgggctggctggggtcatgcttctgagaatcccaaactaccsgaacttctcttgaaaaatggcattgccttcatgggtcctccaagccaggccatgtgggctttaggggataagattgcatcttccatagtggctcaaactgcaggtatcccaactcttccctggagcggcagtggtcttcgtgtggactggcaggaaaatgatttttcaaaacgtatcttaaatgttccccaggagctatatgaaaaaggttatgtgaaagatgtggatgatgggctacaggcagctgaggaagttggatatccagtaatgatcaaggcctcagagggaggaggagggaagggaattagaaaagtcaacaatgcagatgacttccctaatctcttcagacaggttcaagctgaagttcctggatctcccatatttgtgatgagactagccaaacaatctcgtcatctggaggtgcagatcttagcggaccaatatggcaatgctatctctttgtttggtcgtgattgctctgtacaacgcaggcatcagaagattattgaagaagcacctgctactattgctactccagcagtatttgaacacatggaacagtgtgcggtgaaacttgccaaaatggtgggttatgtgagtgctgggactgtggaatacctgtacagccaggatggcagcttctactttctggaattgaatcctcggctgcaggtagagcacccttgtacagagatggtggctgatgtcaatctccctgcagcacagctccagattgccatggggattcctctatatagaatcaaggatatccgtatgatgtatggggtatctccctggggtgattctcccattgattttgaagattctgcacacgttccttgtccaaggggccatgttattgctgctcggatcactagtgaaaatccagatgagggttttaagcccagctcaggaacagttcaggagctaaatttccgcagcaataagaatgtttggggatatttcagtgttgctgctgcagggggacttcatgaatttgctgattctcagtttggtcactgcttttcttggggagaaaacagagaagaggcaatttcaaacatggtggtggctttgaaggagctgtctattcggggtgactttcgaactacagttgaatacctgatcaaattgttagagactgaaagctttcaratgaacagaattgatactggctggctggacagactgatagcagaaaaagtacaggctgagcgacctgacaccatgttgggggttgtgtgtggtgccctccacgtggcagatgtgagcctgcggaatagcgtctctaacttccttcactccttagaaaggggtcaagtccttcctgctcatacacttctgaatacagtagatgttgaacttatctatgagggagtcaagtatgtacttaaggtgactcgacagtcccccaactcctatgtggtgatcatgaatggctcatgtgtagaagtagatgtacatcggctgagtgacggtggactgctcttgtcctatgatggcagcagttatactacgtatatgaaagaggaagtggatagatatcgcatcacaattggcaataaaacctgtgtgtttgagaaggaaaatgacccatcggtgatgcgctcaccttctgctgggaagttaatccagtacattgtagaagatggaggtcatgtgtttgccggccagtgctatgctgagattgaggtaatgaagatggtaatgaccttaacagctgtggagtctggctgtatccattacgtcaagcgacctggagcagctcttgaccctggctgtgtactagccaaaatgcaactggacaaccccagcaaggttcagcaggctgaacttcacacaggtagtctgccayggatccagagcacggcactcagaggcgagaaactccatcgagtgttccattatgtcctggataatctggtcaatgtaatgaatggatactgccttccagatcctttctttagcagcaaggtaaaagactgggtagagcgattgatgaaaaccctcagagatcyctccctgcctctcctagaattgcaagatattatgaccagtgtgtctggccgcattccccccaatgtggagaagtctatcaagaaggaaatggctcagtatgctagcaacatcacatcagtcctctgtcagtttcccagccagcagattgcaaacatcctagatagccatgcagctacattgaaccggaaatctgaacgggaagtcttctttatgaatactcagagcattgttcagctggtacagaggtaccgaagtggcatccgaggccacatgaaggctgtggtgatggatctgctccggcagtacctgcgagtagagacacaattccagaatggtcactatgacaaatgtgtattcgccctccgagaagagaataaaagtgacatgaacactgtactgaactacatcttctctcacgctcaagtcaccaagaagaatcttctggtcacaatgcttattgatcagttgtgtggccgggaccctactctcactgatgagctgctgaatattctcacagagctaactcaactcagtaagaccaccaatgccaaagtagcacttcgagcacgccagctgctccctgccagacctgattcccaattaacagctagtcatgcagtccctaggaccagcagctttgcaatggttcttattgcctcccatttgccatcatatgagcttcgccataaccaagtagagtctatcttcctatcagctattgacatgtatggacatcaattttgcattgagaacctgcagaaactcatcctatcagaaacatctatttttgatgtcctaccaaacttcttctatcacagcaaccaagtagtgaggatggcagctctggaggtgtatgttcgaagggcttatattgcctatgaacttaacagcgtacaacaccgccagcttaaggacaacacctgtgtggtggaattccagttcatgctgcccacatctcatccaaacagaatgtccttctcctccaacctcaaccactatggcatgacccatgtagctagtgtcagcgatgtactgttggacaactcattcactccaccttgtcagcggatgggcggaatggtctcttttcggacttttgaagattttgtcaggatctttgatgaagtgatgggctgcttctctgactccccaccccagagtcccacattccctgaggcaggtcacacgtctctttatgatgaggataaggttcccagggatgaaccaattcacattctcaatgtggctatcaagactgactgtgatattgaggatgacaggctggcagctatgttcagagaatttacccagcaaaataaagctaccctggttgaccatgggatccggcgccttactttcctggttgcacaaaagagagaattccctaaattttttacattccgagcaagggataagtttgaggaggatcgtatctatcgtcatctggagcctgctctggctttccagttagagctgaaccggatgagaaattttgacctcactgccattccatgtgctaatcacaagatgcacctgtatctyggggcagccaaggtggaagtgggcacagaagtgacagactacaggttctttgttcgtgcaatcatcaggcattctgatctggtcaccaaggaagcttcttttgaatatctgcaaaatgaaggggagcggctactcctggaagccatggatgagttggaagttgcttttaacaatacaaatgtccgcactgactgtaaccacatcttcctcaactttgtgcccacggttatcatggacccatcaaagattgaggaatccgtgcggagcatggtaatgcggtatggaagtcgcctgtggaaattgcgcgtcctccaggcagaactgaaaatcaacattcgcctgacgccaactggaaaagcaattcccatccgcctcttcctgacaaacgagtctggctattacttggatatcagcctatacaaggaagtgactgactccaggacagcacagatcatgtttcaggcatatggagacaaacagggaccactgcatggaatgttaatcaatactccatatgtgaccaaagacctgctgcaatcaaagaggttccaggcacaatccttagggacaacatacatatatgatatcccagagatgtttcggcagtccctgatcaaactctgggagtctatgtccactcaagcatttcttccatctccccctctgccttctgacatgctgacttacactgaactggtactggatgatcaaggtcagctggtccacatgaacaggcttccaggaggaaatgaggcaacttggaaaatgacctttaaaagtcctgaatatccagaaggccgagatatcattgttattggcaatgacatcacataccgaattgggtcctttgggcctcaagaggatttgttatttctcagagcttccgaacttgctagggcagaaggtattccacgcatctatgtatcagccaacagtggagcaagaatcggactggcagaagaaattcgccatatgtttcatgtggcctgggtagatcctgaggatccttacaagggatacaggtatttatatctgactcctcaagattataagagagtcagtgctctcaactctgtccattgtgaacacgtggaagatgaaggagaatccaggtacaagataacagatattattgggaaagaagagggaattggacccgagaaccttcgaggttctggaatgattgctggagaatcctcattggcctataatgagatcattaccatcagcctggtgacgtgccgggccattgggattggggcttaccttgtccggctgggacagagaaccatccaggttgagaattctcacttaattctaacaggagctggagccctcaacaaagtcctcgggcgggaagtgtacacctccaataaccagctggggggcatccagattatgcacaacaatggggtgacccactgcactgtgtgtgatgactttgaaggggttttcactgtcctgcactggctgtcttacatgcccaagagcgtgcacagttcagttcctcttctgaactcaaaggatcctatagacagaatcatcgagtttgttcccacaaagaccccatacgatcctcgatggatgctagcaggccgtcctcacccaacccaaaaaggtcagtggttgagtggcttttttgactatggatctttctcagagattatgcagccctgggcacagactgtggtggttggtagagccaggctaggaggaatacctgtgggagttgttgctgtagaaacccgaacagtagaactaagtatcccagctgatccagcaaacctggattctgaagccaagataatccagcaggctggccaggtttggttcccagattctgcgtttaagacrtatcaggccatcaaggacttcaaccgggaagggctgcctctgatggtctttgccaactggagaggcttctctggtggaatgaaagatatgtacgaccaagtgctgaagtttggtgcttacattgtggatggcttgagggagtgctgccagcctgtgctggtttacattcctccccaggctgagctgcggggtggctcctgggtggtgattgactcctccatcaacccccggcacatggagatgtatgctgaccgmgaaagcaggggatctgttctggagccagaagggacagtagaaatcaaattccgcagaaaggatctggtgaaaaccatgcgtcgggtggacccagtctacatccacttggctgagcgattggggaccccagagctaagcacagctgagcggaaggagttggagaacaagttgaaggagcgggaggaattcctaattcccatttaccatcaggtagccgtgcagtttgctgacttgcacgacacaccaggccggatgcaggagaagggtgttattagcgatatcctggattggaaaacatcccgtaccttcttctactggcggctgaggcgtcttctgctggaggacctggtcaagaagaaaatccacaatgccaaccctgagctgactgatggccagattcaagccatgttaaggcgctggtttgtggaagtggaaggaacagtgaaggtaggtttgggacaataataaggatctggcggagtggctagagaaacag

SEQ ID NO: 5668 - DNA, 9330 bp, Homo sapiens
cctctcagagacaacgtgaagacggataagcaggcatcaggagcagagtggcctctcaggtctttytggaagtggatatctactcagacagtaagaattataagagctgtaagagctcattttggaggaataatggatgaaccatctcccttggcccaacctctggagctgaaccagcactctcgattcataataggttctgtgtctgaagataactcagaggatgagatcagcaacctggtgaagttggacctactggaggagaaggagggctccttgtcacctgcttctgttggctcagatacactctctgatttggggatctctagcctacwggatggcttggccttgcacataaggtccagcatgtctggcttgcacctagtaaagcagggccgagacagaaagaaaatagattctcaacgagatttcactgtggcttctccagcagaatttgttactcgctttgggggaaataaagtgattgagaaggttcttattgctaacaatggcattgcagcagtgaaatgcatgcggtctatccgtaggtggtcttatgaaatgtttcgaaatgaacgtgcaattagattcgttgtcatggtcacacctgaagaccttaaagccaatgcagaatacattaagatggcagatcactatgtgccagtgcctggaggaccaaacaacaacaactatgcaaatgtggaattaattcttgatattgctaaaaggatcccagtacaagcagtgtgggctggctggggtcatgcttctgagaatcccaaactaccsgaacttctcttgaaaaatggcattgccttcatgggtcctccaagccaggccatgtgggctttaggggataagattgcatcttccatagtggctcaaactgcaggtatcccaactcttccctggagcggcagtggtcttcgtgtggactggcaggaaaatgatttttcaaaacgtatcttaaatgttccccaggagctatatgaaaaaggttatgtgaaagatgtggatgatgggctacaggtagctgaggaagttggatatccagtaatgatcaaggcctcagagggaggaggagggaagggaattagaaaagtcaacaatgcagatgacttccctaatctcttcagacaggttcaagctgaagttcctggatctcccatatttgtgatgagactagccaaacaatctcgtcatctggaggtgcagatcttagcggaccaatatggcaatgctatctctttgtttggtcgtgattgctctgtacaacgcaggcatcagaagattattgaagaagcacctgctactattgctactccagcagtatttgaacacatggaacagtgtgcggtgaaacttgccaaaatggtgggttatgtgagtgctgggactgtggaatacctgtacagccaggatggcagcttctactttctggaattgaatcctcggctgcaggtagagcacccttgtacagagatggtggctgatgtcaatctccctgcagcacagctccagattgccatggggattcctctatatagaatcaaggatatccgtatgatgtatggggtatctccctggggtgattctcccattgattttgaagattctgcacacgttccttgtccaaggggccatgttattgctgctcggatcactagtgaaaatccagatgagggttttaagcccagctcaggaacagttcaggagctaaatttccgcagcaataagaatgtttggggatatttcagtgttgctgctgcagggggacttcatgaatttgctgattctcagtttggtcactgcttttcttggggagaaaacagagaagaggcaatttcaaacatggtggtggctttgaaggagctgtctattcggggtgactttcgaactacagttgaatacctgatcaaattgttagagactgaaagctttcaratgaacagaattgatactggctggctggacagactgatagcagaaaaagtacaggctgagcgacctgacaccatgttgggggttgtgtgtggtgccctccacgtggcagatgtgagcctgcggaatagcgtctctaacttccttcactccttagaaaggggtcaagtccttcctgctcatacacttctgaatacagtagatgttgaacttatctatgagggagtcaagtatgtacttaaggtgactcgacagtcccccaactcctatgtggtgatcatgaatggctcatgtgtagaagtagatgtacatcggctgagtgacggtggactgctcttgtcctatgatggcagcagttatactacgtatatgaaagaggaagtggatagatatcgcatcacaattggcaataaaacctgtgtgtttgagaaggaaaatgacccatcggtgatgcgctcaccttctgctgggaagttaatccagtacattgtagaagatggaggtcatgtgtttgccggccagtgctatgctgagattgaggtaatgaagatggtaatgaccttaacagctgtggagtctggctgtatccattacgtcaagcgacctggagcagctcttgaccctggctgtgtactagccaaaatgcaactggacaaccccagcaaggttcagcaggctgaacttcacacaggtagtctgccayggatccagagcacggcactcagaggcgagaaactccatcgagtgttccattatgtcctggataatctggtcaatgtaatgaatggatactgccttccagatcctttctttagcagcaaggtaaaagactgggtagagcgattgatgaaaaccctcagagatcyctccctgcctctcctagaattgcaagatattatgaccagtgtgtctggccgcattccccccaatgtggagaagtctatcaagaaggaaatggctcagtatgctagcaacatcacatcagtcctctgtcagtttcccagccagcagattgcaaacatcctagatagccatgcagctacattgaaccggaaatctgaacgggaagtcttctttatgaatactcagagcattgttcagctggtacagaggtaccgaagtggcatccgaggccacatgaaggctgtggtgatggatctgctccggcagtacctgcgagtagagacacaattccagaatggtcactatgacaaatgtgtattcgccctccgagaagagaataaaagtgacatgaacactgtactgaactacatcttctctcacgctcaagtcaccaagaagaatcttctggtcacaatgcttattgatcagttgtgtggccgggaccctactctcactgatgagctgctgaatattctcacagagctaactcaactcagtaagaccaccaatgccaaagtagcacttcgagcacgccaggttcttattgcctcccatttgccatcatatgagcttcgccataaccaagtagagtctatcttcctatcagctattgacatgtatggacatcaattttgcattgagaacctgcagaaactcatcctatcagaaacatctatttttgatgtcctaccaaacttcttctatcacagcaaccaagtagtgaggatggcagctctggaggtgtatgttcgaagggcttatattgcctatgaacttaacagcgtacaacaccgccagcttaaggacaacacctgtgtggtggaattccagttcatgctgcccacatctcatccaaacagagggaacatccctacgctaaacagaatgtccttctcctccaacctcaaccactatggcatgacccatgtagctagtgtcagcgatgtactgttggacaactcattcactccaccttgtcagcggatgggcggaatggtctcttttcggacttttgaagattttgtcaggatctttgatgaagtgatgggctgcttctctgactccccaccccagagtcccacattccctgaggcaggtcacacgtctctttatgatgaggataaggttcccagggatgaaccaattcacattctcaatgtggctatcaagactgactgtgatattgaggatgacaggctggcagctatgttcagagaatttacccagcaaaataaagctaccctggttgaccatgggatccggcgccttactttcctggttgcacaaaaggatttcagaaagcaggtcaactatgaggtggatcggagatttcatagagaattccctaaattttttacattccgagcaagggataagtttgaggaggatcgtatctatcgtcatctggagcctgctctggctttccagttagagctgaaccggatgagaaattttgacctcactgccattccatgtgctaatcacaagatgcacctgtatctyggggcagccaaggtggaagtgggcacagaagtgacagactacaggttctttgttcgtgcaatcatcaggcattctgatctggtcaccaaggaagcttcttttgaatatctgcaaaatgaaggggagcggctactcctggaagccatggatgagttggaagttgcttttaacaatacaaatgtccgcactgactgtaaccacatcttcctcaactttgtgcccacggttatcatggacccatcaaagattgaggaatccgtgcggagcatggtaatgcggtatggaagtcgcctgtggaaattgcgcgtcctccaggcagaactgaaaatcaacattcgcctgacgccaactggaaaagcaattcccatccgcctcttcctgacaaacgagtctggctattacttggatatcagcctatacaaggaagtgactgactccaggacagcacagatcatgtttcaggcatatggagacaaacagggaccactgcatggaatgttaatcaatactccatatgtgaccaaagacctgctgcaatcaaagaggttccaggcacaatccttagggacaacatacatatatgatatcccagagatgtttcggcagtccctgatcaaactctgggagtctatgtccactcaagcatttcttccatctccccctctgccttctgacatgctgacttacactgaactggtactggatgatcaaggtcagctggtccacatgaacaggcttccaggaggaaatgaggcaaattggcatggtagcttggaaaatgacctttaaaagtcctgaatatccagaaggccgagatatcattgttattggcaatgacatcacataccgaattgggtcctttgggcctcaagaggatttgttatttctcagagcttccgaacttgctagggcagaaggtattccacgcatctatgtatcagccaacagtggagcaagaatcggactggcagaagaaattcgccatatgtttcatgtggcctgggtagatcctgaggatccttacaagggatacaggtatttatatctgactcctcaagattataagagagtcagtgctctcaactctgtccattgtgaacacgtggaagatgaaggagaatccaggtacaagataacagatattattgggaaagaagagggaattggacccgagaaccttcgaggttctggaatgattgctggagaatcctcattggcctataatgagatcattaccatcagcctggtgacgtgccgggccattgggattggggcttaccttgtccggctgggacagagaaccatccaggttgagaattctcacttaattctaacaggagctggagccctcaacaaagtcctcgggcgggaagtgtacacctccaataaccagctggggggcatccagattatgcacaacaatggggtgacccactgcactgtgtgtgatgactttgaaggggttttcactgtcctgcactggctgtcttacatgcccaagagcgtgcacagttcagttcctcttctgaactcaaaggatcctatagacagaatcatcgagtttgttcccacaaagaccccatacgatcctcgatggatgctagcaggccgtcctcacccaacccaaaaaggtcagtggttgagtggcttttttgactatggatctttctcagagattatgcagccctgggcacagactgtggtggttggtagagccaggctaggaggaatacctgtgggagttgttgctgtagaaacccgaacagtagaactaagtatcccagctgatccagcaaacctggattctgaagccaagataatccagcaggctggccaggtttggttcccagattctgcgtttaagacrtatcaggccatcaaggacttcaaccgggaagggctgcctctgatggtctttgccaactggagaggcttctctggtggaatgaaagatatgtacgaccaagtgctgaagtttggtgcttacattgtggatggcttgagggagtgctgccagcctgtgctggtttacattcctccccaggctgagctgcggggtggctcctgggtggtgattgactcctccatcaacccccggcacatggagatgtatgctgaccgmgaaagcaggggatctgttctggagccagaagggacagtagaaatcaaattccgcagaaaggatctggtgaaaaccatgcgtcgggtggacccagtctacatccacttggctgagcgattggggaccccagagctaagcacagctgagcggaaggagttggagaacaagttgaaggagcgggaggaattcctaattcccatttaccatcaggtagccgtgcagtttgctgacttgcacgacacaccaggccggatgcaggagaagggtgttattagcgatatcctggattggaaaacatcccgtaccttcttctactggcggctgaggcgtcttctgctggaggacctggtcaagaagaaaatccacaatgccaaccctgagctgactgatggccagattcaagccatgttaaggcgctggtttgtggaagtggaaggaacagtgaaggcttatgtttgggacaataataaggatctggcggagtggctagagaaacagctgacagaggaggatggtgttcactcggtaatagaggaaaacatcaaatgcatcagcagagactacgtcctcaagcaaatccgcagcttggtccaggccaatccagaggttgccatggattccatcatccatatgacgcagcacatatcacccactcagcgagcagaagtcatamggatcctctccacwatggaytccccttccacgtaggaagagcttcctgcctgtccctgccctgtctctggagaaaagggctagagctgccttttacaactgtaaccactgtaatragaaggcacaggagacccagcactggagtcaaatggcattttacttcctctcgtttcaggttatgcatgacatcctgggatgtaagatcacagaatccccctccagcccaccagtcacacctaccccattcagtatttattaccctggccaggcctagtcctccactccctgcacaggactgagaaggcaatgaaaggtacaaacatgtaccatgaggtcttactaaccaaagtagggctgcccctcctgtcctgacagccccttggcctcccagcatggggaagcgtgaggagttgcccagcagtgagcagcccccctcactcctggccccatgagccgcagccacaggcagcagaggagggctaaggagaggaggaagcctcaagtccattgtttattaccccgactcttagcccagcacacagtaggcactggagaggaatgattcccagtttaaccacactacggtaccttttatgaagaaaaattagagcataaaatctactacaagctccataggaactcaaagatgagggcaaaactgtgagccaagaagcagagaaagaaaatagaaccagttattcttgatttaggggacctcaaccttgggttcagtctctgaggacaaaggraaaggtagttgttggcctgcctctcgcctgcacgtcactgctggactagctgtcgcatgtggctgggagctgcaaggccagtgcttgaggggccccagcagttccacaggtggtgaagcctgagttggcagaggaggagccagaagagaactgccctttctgcactggtggaaactagttatttatgccatgtggagagccagtragatagatagatagtctgtttgttttgaggacttggaaagttgttcctatgaagcctggagcttggatggttttgagaggttaatggtgcctccacactcactcttccctagttccaggattactgtcctagcagctaacggttctactctcttccccagagtgtagacaggcagcaggtctccccacagctctgaaaggaccctggtgacagctacaccctcagcaccaggagctggccttcctgatgagggaggcttccaggaaacacagaatccacatgaccttaagattatttacaactcagtcatggtgctgctgtcctccaggcttactggcccctcctgactggcatcaggggcttcctcaggtggtggagagagtttactttcaacaactagtttattcaagaaaagaacttactgattcctctgttcctaaagcaagagtggcaggtgatcagggctggtgtagcatccggttcctttagtgcagctaactgcatttgtcactgatgaccaaggaggaaatcactaagacatttgagaagcagtggtatgaacgttcttggacaagccacagttctgagccttaaccctgtagtttgcacacaagaacgagctccacctccccttcttcaggaggaatctgtgcggatagattggctggacttttcaatggttctgggttgcaggtgggcactgtatggctgggtatggagcggacagcccccaggagtcagagcctcagcccggctgccctggtggaaggtacaggtgttcagcaccttcagaaaagggcataaagtggtgggggacaattctcagtccagttttgaccagattattcttctatgcttttttgcaataaatcaaatcccacatatctacaagtggtatgaagtcctgcaccccccaggaggcctgtccaggcatgtcttcagaggcagggtgggttacactcatttacctcccctctccccaccaaaacatgagcaatctgacattcccacagcccctcaaacatgcaaggctactaaggcaggaggagtataaatgatggatattgaccaagacctgcttggacggagaccgccatattatctgttctcttcgttcacaaaacagccttcacttgtctcagaatttgatggacacatactgtgatgagcaggagcttcagatgcactctttacacattttgttgaaataaacctctacatttgtagaagagtta

SEQ ID NO: 5669 - DNA, 747 bp, Homo sapiens
aggccccacaactacgagtactccttgtccccacccggtcctaatttggtcgggtatagcggaggtgggcgtagagagaactggaggtggagacctttgtgcatgcccacacactgctttcctcgcgaggaatstggggcccttgcagaggcggaaccaggatgtgacgtaataaccgcgcgcggcgctcggcgttcccgcaasgtcgctttgcagagcgggagcgcgcttaagtaactagtccgtagttcgagggtgcgccgtgtccttttgcgttggtaccagcggcgacatgacggggtacactccggatgagaaactgcggctgcagcagctgcgagagctgagaaggcgatggctgaaggaccaggagctgagccctcgggagccggtgctgcccccacagaagatggggcctatggagaaattctggaataaatttttggagaataaatccccttggaggaaaatggtccatggggtatacaaaaagagtatctttgttttcactcatgtacttgtacctgtctggattattcattattacatgaagtatcatgtttctgaaaaaccatatggcatagttgaaaagaagtccagaatattccctgtaagtcttaacacttctgatttttcttttgtttattgtttttctctttccttttcctccctttccaagcaattattagattaaaatgttctttccttctcactttcggwttaagtccctgttttgtgtattcttgt

SEQ ID NO: 5670 - DNA, 1563 bp, Homo sapiens
aggccccacaactacgagtactccttgtccccacccggtcctaatttggtcgggtatagcggaggtgggcgtagagagaactggaggtggagacctttgtgcatgcccacacactgctttcctcgcgaggaatstggggcccttgcagaggcggaaccaggatgtgacgtaataaccgcgcgcggcgctcggcgttcccgcaasgtcgctttgcagagcgggagcgcgcttaagtaactagtccgtagttcgagggtgcgccgtgtccttttgcgttggtaccagcggcgacatgacggggtacactccggatgagaaactgcggctgcagcagctgcgagagctgagaaggcgatggctgaaggaccaggagctgagccctcgggagccggtgctgcccccacagaagatggggcctatggagaaattctggaataaatttttggagaataaatccccttggaggaaaatggtccatggggtatacaaaaagagtatctttgttttcactcatgtacttgtacctgtctggattattcattattacatgaagtatcatgtttctgaaaaaccatatggcatagttgaaaagaagtccagaatattccctggtgatacaattctggagactggagaagtaattccaccaatgaaagaatttcctgatcaacatcattaaagattatgtaaaaagttaaaaggcttatgagcctaagtttgttcctatattaccatatttactgaattttctggaaaagtaactttaataaagtttaatctcagaaattgtcatatctgttttcaagcattgtacaatttgagactgagtaatttaacaataagtaaaaagtggacatgctaaacaaatatgagagactacctactttttctggtcattcttgacttggaaaacggtatggaaaagtatttagttacatgtttgtttgtttttttcttacacagtacttacactaatttggtatcagggtatgcaacagtgaaatatcacaataaacaaatgtaagaacagcaattccatgcacttttgttttaaggaaatctttccggccaggcgcagtggctcatgcctgtaatcccagcactttgggaggccgaggcgggcagatcacgaagtcaggagatcgagaccatcatggctaacacagtgaaaccccgtccctactaaaaatacaaaaaaattagccgggcgtggtggcgggctcctgtagtcccagctactgcggaggctgaggcacgagattggtgtgaacccagaaggcggagcttgcagtaagccgagatagtgccactgagcctgggcgacagagcaagactccgtctcaaaaaaaaaaaaagctttccgaatcatttttgaagaattyagaaacttgattgaaaagcttattccaactatgatctgacactcaagactgtcagatttaggttgctgttaattttgtcatgagaatgtaaaatactaaaatctctaagtgaaaaatttgcatactagtgcttrttataaaggataatgcaaaaataaacttgggaactttgcattatgaa

SEQ ID NO: 5671 - DNA, 3137 bp, Homo sapiens
ctctgacgtcatcccgcagcgccggaagcggtgaggcacagatgagtaacgtgaatttgtccgtctccgacttctggagagtgatgatgcgggtgtgctggttggtgagacaggacagccggcaccagcgaatcagacttccacatttggaagcagttgtgattgggcgtggcccagagaccaagatcactgataagaaatgttctcgacagcaagttgaaagcagagtgtaacaagggatatgtcaaggtaaagcaggtaggagtcaatcccaccagcattgactcagtcgtaattgggaaggaccaagaggtgaagctgcagcctggccaggttctccacatggtgaatgaactttatccatatattgtagagtttgaggaagaggcaaagaaccctggcctggaaacacacaggaagagaaagagatcaggcaacagtgattctatagaaagggatgctgctcaggaagctgaggctgggacagggctggaacctgggagcaactmtggccaatgctctgtgcccctaaagragggaaaagatgcacctatcaaaaaggaatccctgggccactggagtcaaggcttgaagatttctatgcaggaccccaaaatgcaggtttacaaagatgagcaggtggtggtgataaaggataaatacccaaaggcccgttaccattggctggtcttaccgtggacctccatttccagtctgaaggctgtggccagggaacaccttgaactccttaagcatatgcacactgtgggggaaaaggtgattgtagattttgctgggtccagcaaactccgcttccgattgggctaccacgccattccgagtatgaggtaagccagccatgtacatcttcatgtgatcagccaggattttgattctccttgccttaaaaacaaaaaacattggaattctttcaatacagaatacttcctagaatcacaagctgtgatcgagatggtacaagaggctggtagagtaactgtccgagatgggatgcctgagctcttgaagctgccccttcgttgtcatgagtgccagcagctgctgccttccattcctcagctgaaagaacatctcaggaagcactggacacagtgattctgcagagcctgagctgctgctgtggtgtggcccactggagcaaactgctggcacctattctggttccattcgagtgttctgtggccctccagagacaggcatcctgcaaggccagatttcaagaccaaatttgcttgagtctgagaatgacacacgtgaaggtcattttggaaaagtgggcagatgcaagataaatatacaaaaagcaccaacttctctccgtattagcactccccaccgcagctgcccccacccttcccttcgatgacgacgtttgcagggttcagggcgaccagggaacaaagctggggcctggcagacccactatgctgccagctggagaaaacaagtcacaatgacaaattatcacaattagcacctgtacttgggggaaaaaatctgcaaattggggaagccccagctcctcattgtacaggggtctgtttggcagtgaccttgctctggagatgacattccttcagcctgagggaatcgacgttgatgaacccgtggcatcaatcggctcataatccccctgcacgttcatgctcaccagctcctcgttgtagagagacagtggggactcccgaccgaggatatacacctggcccttgaggacagacacctgcactttcccttccactcattcctgggacttggcattacagtggcggacaaattcacactcagggctatgccagaaaccggtatacaccagctcagcaaatttcaagcycaggccttgtttgattttgcgcacttctcggtacatggtgaaggccttgatgtctaaatgagtgtggtgaaggatggtscctgctggggcctmgcagatacctcaggacttcattccaatgaagcggttctccacgatgtcaatacggcccacgccgtgcttgcctgcaacttcattcaggtacacgaaaagctccaaggaggtctggtgggtggtgccatccttgacgttggtcaccttcacggggaccccttttttgaacttgatctcgagaatgtcaggggtgttgagggctttggctgggtcctgggtcttcatgtagagacctggaggcacttggttcttggggttccaggattccagcctcatagctgatgtgcatgaggttctcgtctatgcttcacgggctctggggagtgactggaatgggaacccgatgttgctttgcctatttcatcaggtcattgcagcccttgaaccggttgtagaactcgggcatcctccagggagcggtgacctttatctggggggccagcaaatagcaggtgagctcaaaccggacctgatcatttccttttcccgtggtgccgtggaacacatacttggcctcctcctgcttggcgatttccacttgtttgccggcgatgccgggcctggccagagaggtgcccaggaggtagcggttctcatacagtgcgctggactggatggccggccagatgaactcctccacaaactccctgctggcatcctcaatgaacacctttttggtcccaagcttcagtgccttcttccaggcttcctcgaagtcttccttctggccagtgttggccaggtaggcaatgatgtcatagccttgttccttcagccacacgaggatgcaagaggtgtccgggctgccactgtaggccagaaccactgagcctttgctggacatagcatctgggattggaggctcgagttcctggcatctgccatctgtcttcatggtgcggtgaaccactcgggctcagggagcggtggcaggcgacagagcagggagtataatttcaaaataccaaaccatccacaaaaacccagagaatagtacccataaccagcttcaacaatcgtcaatattctgcccttcttgtttcatcctgcctctccaccttacctactgtagtactactttaaagcaaatttcagaaatcagaatagtttcaccttgacagtaaaattaataagatataagacctatttaaagttataaaagctcaattaaaattataaatgttatctg

SEQ ID NO: 5672 - DNA, 1521 bp, Homo sapiens
tcttattaattttactgtcaaggtgaaactattctgatttctgaaatttgctttaaagtagtactacagtaggtaaggtggagaggcaggatgaaacaagaagggcagaatattgacgattgttgaagctggttatgggtactattctctgggtttttgtggatggtttggtattttgaaattatactccctgctctgtcgcctgccaccgctccctgagcccgagtggttcaccgcaccatgaagacagatggcagatgccaggaactcgagcctccaatcccagatgctatgtccagcaaaggctcagtggttctggcctacagtggcagcccggacacctcttgcatcctcgtgtggctgaaggaacaaggctatgacatcattgcctacctggccaacactggccagaaggaagacttcgaggaagcctggaagaaggcactgaagcttgggaccaaaaaggtgttcattgaggatgccagcagggagtttgtggaggagttcatctggccggccatccagtccagcgcactgtatgagaaccgctacctcctgggcacctctctggccaggcccggcatcgccggcaaacaagtggaaatcgccaagcaggaggaggccaagtatgtgttccacggcaccacgggaaaaggaaatgatcaggtccggtttgagctcacctgctatttgctggccccccagataaaggtcaccgctccctggaggatgcccgagttctacaaccggttcaagggctgcaatgacctgatgaaataggcaaagcaacatcgggttcccattccagtcactccccagagcccgtgaagcatagacgagaacctcatgcacatcagctatgaggctggaatcctggaaccccaagaaccaagtgcctccaggtctctacatgaagacccaggacccagccaaagccctcaacacccctgacattctcgagatcaagttcaaaaaaggggtccccgtgaaggtgaccaacgtcaaggatggcaccacccaccagacctccttggagcttttcgtgtacctgaatgaagttgcaggcaagcacggcgtgggccgtattgacatcgtggagaaccgcttcattggaatgaagtcctgaggtatctgckaggccccagcaggsaccatccttcaccacactcatttagacatcaaggccttcaccatgtaccgagaagtgcgcaaaatcaaacaaggcctgrgcttgaaatttgctgagctggtgtataccggtttctggcatagccctgagtgtgaatttgtccgccactgtaatgccaagtcccaggaatgagtggaagggaaagtgcaggtgtctgtcctcaagggccaggtgtatatcctcggtcgggagtccccactgtctctctacaacgaggagctggtgagcatgaacgtgcagggggattatgagccgattgatgccacgggttcatcaacgtcgattccctcaggctgaaggaatgtcatctccagagcaaggtcactgccaaa

SEQ ID NO: 5673 - DNA, 1626 bp, Homo sapiens
ccggcgcgagcccccgcccagctgatccgccgctctccgcctcgcttgctcctgccgggcgtgcagggccccgccgccgccatgtcgggctcgttcgagctctcggtgcaggatctcaacgacctgctctcggacggcagcggctgctacagcctcccgagccagccctgcaacgaggtcaccccgcggatctacgtgggcaacgcgtctgtggctcaggacatccccaagctgcagaaactaggcatcacccatgtgctgaacgcggctgagggcaggtccttcatgcacgtcaacaccaatgccaacttctacaaggactccggcatcacatacctgggcatcaaggccaacgacacacaggagttcaacctcagcgcttactttgaaagggctgccgacttcattgaccaggctttggctcaaaagaatggccgggtgctcgtccactgccgggaaggttatagccgctccccaacgctagttatcgcctacctcatgatgcggcagaagatggacgtcaagtctgccctgagcatcgtgaggcagaaccgtgagatcggccccaacgatggcttcctggcccagctctgccagctcaatgacagactagccaaggaggggaagttgaaaccctagggcacccccaccrcctctgctcgagaggctcgtctgtgtccctgccactctgagttatccagaaaccaccacctacaaatgaggggactcatctagaagacctctaaggtccccttttggctctgaggggtctctaataatccccacttggaattcagcaccgcaaggaaattatggaactggtgtcaggaatcactgaagggctaaccgtgatagtccttgcaagtaagtcaaggttttatcctgattggaaatagaagacatttccggttgagagaacagattcgttggaagcttaacttttgttgcctcttaacgccaccaaattttagggtaatttgattatgaaagagtgaatttttctggacagaaaagggagagctaccaaattgtttttttctttttaaaaggaagtttaatgtccgttgtatcacaaatcagtgttaaaacaccagaactttagccaaaataaatgtcttacattacaaaggtattgtttttttgtccttcttatcacagttggtattcttttacgtttttatgcttagctttttttgtttgggcttagcttttatatttgcgatttctaactttttaaaaataatcatctaaaacatagccgttctgagctagttataggttccatgatggcactgtttatgcagtagatattgatgaacacctttccagtaccagaaatgttctggtaggaatattcttaggtagaatggccataatggtcctgaatgaaggaggtaaggtttgtgcttctaagaaagcaggggactagggtgttcatctcaaggtagcctcacgtgatgactgggtgacattttgagatttgagtgatcctgcaaatgaacagtccctaaacatatccccttcccccagatgccttaaattccactattggtgctatgttcctttgaataaaaaaccttagagaaagtagktgccttttcctcccagacagaagtctgggcagag

SEQ ID NO: 5674 - DNA, 4621 bp, Homo sapiens
ccggcgcgagcccccgcccagctgatccgccgctctccgcctcgcttgctcctgccgggcgtgcagggccccgccgccgccatgtcgggctcgttcgagctctcggtgcaggatctcaacgacctgctctcggacggcagcggctgctacagcctcccgagccagccctgcaacgaggtcaccccgcggatctacgtgggcaacgcgtctgtggctcaggacatccccaagctgcagaaactaggcatcacccatgtgctgaacgcggctgagggcaggtccttcatgcacgtcaacaccaatgccaacttctacaaggactccggcatcacatacctgggcatcaaggccaacgacacacaggagttcaacctcagcgcttactttgaaagggctgccgacttcattgaccaggctttggctcaaaagaatggccgggtgctcgtccactgccgggaaggttatagccgctccccaacgctagttatcgcctacctcatgatgcggcagaagatggacgtcaagtctgccctgagcatcgtgaggcagaaccgtgagatcggccccaacgatggcttcctggcccagctctgccagctcaatgacagactagccaaggaggggaagttgaaaccctagggcacccccaccrcctctgctcgagaggtccgtgggggaggccgtgggcaaaggtgtcccgagctgccatgtttaggaaacacactgtaccctgctcccagcatcacaaggcacttgtctacaagtgtgtcccaacacagtcctgggccactttccccaccctggggagcacataaagaagcttgccaaggggggcgtccttgctccccagttgtcctgtttctgtaacttatgatgtcttttccctgagatgggggctcagagggggaaggcctgtggcctgcatgcttcccgatggcccacggcaggaggtgtgtggaagtgtaaggcctaagatgctcacagaggtccctcatgacctcmcttccccaactcccgaatcctctcttgagtgtggacctcaacaccttgagccctagtaaaggaactatgcaaatgcaggccactctccccaccacgtctgtgcccygcactgtccccacagccttccacaccctgtgcataggcagccctctcacgtcttgaggtccgaagctggggtgggggtgtccgtcagttattagtggatggagattcccacagcaaggctgcatttgaatgatttccttaggatgaatggtccctacacaaagaggccttgtgggcaaacctggagaaccctcctaaatccatagagttttcaaaatgtgaatctttggaagccttgagttcagaatctgctgctctggaatatttcccttcgatcttatctcagtcacttcgtttttgagaagagtgatgccttgggcatgcttttttttttttcttttttagaaaacagggagttgaagtccaacctatttaaaaaccccaccatttggagaattacaagggttttgtcctgaattgtagtgttggcaagcccaagccactcgtgctaactgctttttgtctcggttgctattccaagaacagaaggaggaagttggccaattacagcgtgtgtgcatggatgtgtgtggggggcgtgcctctcagaaacgcggccagaagacaagcagggaagtgaaaggtcccaggcacacaccctgcccattgcaggtggctcttacagctctctggtgccagcacgggatccctgaagtgactcagccaggcagacatgagacatggyggagtgtccaaatggatcctttattggtggtagagcaaaaaaacccaaacacgataaacctttcaaaagactttctaaggatgatattggaatgcaccagccctcacatgtgtatgcacatttgccagaatataagagttttgttttaaatacagtcttgttaggattttacgttattgttattatggaaagtgattgtgatgctatttatcttcagggtcactctgggcaaagagaaggtcctcagccatgcccccagcaccttgcacataggtgtctgataaaagtttaagaaaktaaacactttttgagcaccaaatatatatagggcattgttctggtgggtgtgtcacgctcccagaagactgaattyatggtaggatcactcgcaaggccttgtgaaggagtcttacctaaaacraaagaaatatcagggacttttgttgactatttacaactcagttttacatttaaattcaggcagtgttaatatgccaaggtagggaatgtgcctttttcagagttggccaggagctcctggctgggacacggagaggcaggtgtggcgtaaggcctcactcccggctgkgaaggtctctgatcacacagaagcagccctgcccagcctggtcatttgctgtccgcttttctctgtgaccacagcagccctgaacaaccagtatgtgtcttcttctccagatagtgaaaaaggtgtccagataaacccacctaagtgaaatggccatcctctaaactgggtacctcactgcacagcttctaggtagccttccaacttaatctaacttgagcctcacagtaaccctgtaaagttagtagagcttgttcttgtattgtgaccttttttaaaaaaaaggaactgaggttcagaatgattaagggcctggcccccagggttgtccagctccataaggtggagctgggcaagattttgggtttgctgctccctgaagctggattctttcatacgatactctttctcaagaagggggctccctgggatctccaggtgtactgcacttaccctcaatccagccccggagaagcaagtgaaaagggtgggtccctcataggctagaatgtgcagctctttctccaggtgggatgtagcaccccraagtagagctttctgctctgctcctggaaaaggctagggagctggggctggggctcccctcccatgaccaggcagtggtcaccccatgggacaggcacagctacttacgcgaacacagcaggttggtgtggctggctaactaggacctctcgaaagtctctgtgggggcatgagggagaaaaggccattgggagaattactgcctttactttgggactacttttatgctgataacttgggatttcttgatagtccttcacccctgaaaccccgtatttacttaacaagatttagctcttagttcttcaagtaaaattaaagtctcttgtgtaagagccaacacatgcccagctgcggatgggagctgttcctggacagccttctactgcctgggaagtgatggaacaggaactcagggtgcccttacccsctccccagacctgttccctttctttgactgacagagcaccatccaggcaaaattagagcgccaaatggttttcttctcaatcttaaagcagtatacctttccacaggctcgtctgtgtccctgccactctgagttatccagaaaccaccacctacaaatgaggggactcatctagaagacctctaaggtccccttttggctctgaggggtctctaataatccccacttggaattcagcaccgcaaggaaattatgggtatgtgagccataatatgatggscagcaggtggcgctgccttccacccatggtgatggatggtttggaaagggaatgttggtgccttttgtgccacaagttaagatgctactgttttaaaggaaaaaaaaaaaaaaaagtactgatcttcaatatgaagacatgagcttttctcgcaggaaattttctttttcacagaactggtgtcaggaatcactgaagggctaaccgtgatagtccttgcaagtaagtcaaggttttatcctgattggaaatagaagacatttccggttgagagaacagattcgttggaagcttaacttttgttgcctcttaacgccaccaaattttagggtaatttgattatgaaagagtgaatttttctggacagaaaagggagagctaccaaattgtttttttctttttaaaaggaagtttaatgtccgttgtatcacaaatcagtgttaaaacaccagaactttagccaaaataaatgtcttacattacaaaggtattgtttttttgtccttcttatcacagttggtattcttttacgtttttatgcttagctttttttgtttgggcttagcttttatatttgcgatttctaactttttaaaaataatcatctaaaacatagccgttctgagctagttataggttccatgatggcactgtttatgcagtagatattgatgaacacctttccagtaccagaaatgttctggtaggaatattcttaggtagaatggccataatggtcctgaatgaaggaggtaaggtttgtgcttctaagaaagcaggggactagggtgttcatctcaaggtagcctcacgtgatgactgggtgacattttgagatttgagtgatcctgcaaatgaacagtccctaaacatatccccttcccccagatgccttaaattccactattggtgctatgttcctttgaataaaaaaccttagagaaagtagktgccttttcctcccagacagaagtctgggcagag

SEQ ID NO: 5675 - DNA, 3316 bp, Homo sapiens
cttcccagtgggactccagcagggcgtcgtggtctgtgcggtgtctcccaaaccactacctggctgcccccgtaccagctgctgggaaagactacttcctccgagttgtgccggcctccgcgttctcctcacctcccctctcctccggacctccgccccctcgcggagaggccttgccgctttaagagccgggctagcgattgacaagcaataaacgctgagcgcccggctgcgctggagccgcccggagctaggggcttcccgsggcgcaggagagacgtttcagagcccttgcctccttcaccatgccggttgccgccaccaactctgaaactgccatgcagcaagtcctggacaacttgggatccctccccagtgccacgggggctgcagagctggacctgatcttccttcgaggcattatggaaagtcccatagtaagatccctggccaaggcccatgagaggctggaggagacgaagctggaggccgtgagagacaacaacctggagctggtgcaggagatcctgcgggacctggcgcasstggctgagcagagcagcacagccgccgagctggcccacatcctccaggagccccacttccagtccctcctggagacgcacgactctgtggcctcaaagacctatgagacaccaccccccagccctggcctggaccctacrttcagcaaccagcctgtacctcccgatgctgtgcgcatggtgggcatccgcaagacagccggagaacatctgggtgtaacgttccgcgtrgagggcggcgagctggtgatcgcgcgcattctgcatgggggcatggtggctcarcaaggcctgctgcatgtgggtgacatcatcaaggaggtgaacgggcagccagtgggcagtgacccccgcgcactgcaggagctcctgcgcaatgccagtggcagtgtcatcctcaagatcctgcccagctaccaggagccccatctgccccgccaggtatttgtgaaatgtcactttgactatgacccggcccgagacagcctcatcccctgcaaggaagcaggcctgcgcttcaacgccggggacttgctccagatcgtaaaccaggatgatgccaactggtggcaggcatgccatgtcgaagggggcagtgctgggctcattcccagccagctgctggaggagaagcggaaagcatttgtcaagagggacctggagctgacaccaaactcagggaccctatgcggcagcctttcaggaaagaaaaagaagcgaatgatgtatttgaccaccaagaatgcagagtttgaccgtcatgagctgctcatttatgaggaggtggcccgcatgcccccgttccgccggaaaaccctggtactgattggggctcagggcgtgggacggcgcagcctgaagaacaagctcatcatgtgggatccagatcgctatggcaccacggtgccctacacctcccggcggccgaaagactcagagcgggaaggtcagggttacagctttgtgtcccgtggggagatggaggctgacgtccgtgctgggcgctacctggagcatggcgaatacgagggcaacctgtatggcacacgtattgactccatccggggcgtggtcgctgctgggaaggtgtgcgtgctggatgtcaacccccaggcggtgaaggtgctacgaacggccgagtttgtcccttacgtggtgttcatcgaggccccagacttcgagaccctgcgggccatgaacagggctgcgctggagagtggaatatccaccaagcagctcacggaggcggacctgagayggacagtggaggagagcagccgcatccagcggggctacgggcactactttgacctctgcctggtcaatagcaacctggagaggaccttccgcgagctccagacagccatggagaagctacggacagagccccagtgggtgcctgtcagctgggtgtactgagcctgttcacctggtcyttggctcactctgtgttgaaacccagaacctgaayccatccccctcctgacctgtgaccccctgccacaatccttagcccccatatctggctgtccttgggtaacagctcccagcaggccctaagtctggcttcagcacagaggcgtgcactgccagggaggtgggcattcatggggtaccttgtgcccaggtgctgcccactcctgatgcccattggtcaccagatatctctgagggccaagctatgcccaggaatgtgtcagagtcacctccataatggtcagtacagagaagagaaaagctgctttgggaccacatggtcagtaggcacactgccccctgccacccctccccagtcaccagttctcctctggactggccacacccaccccattcctggactcctcccacctctcacccctgtgtcggaggaacaggccttgggctgtttccgtgtgaccaggggaatgtgtggcccgctggcagccaggcaggcccgggtggtggtgccagcctggtgccatcttgaaggctggaggagtcagagtgagagcyagtggccacagctgcagagcactgcagctcccagctcctttggaaagggacagggtcgcagggcagatgctgctcggtccttccctcatccacagcttctcactgccgaagtttctccagatttctccaatgtgtcctgacaggtcagccctgctccccacagggccaggctggcaggggccagtgggctcagcccaggtaggggcaggatggagggctgagccctgtgacaacctgctgytaccaactgaagagccccaagctctccatggcccacagcaggcacaggtctgagctctatgtccttgaccttggtccatttggttttctgtctagccaggtccaggtagcccacttgcatcagggctgctgggttggaggggctaaggaggagtgcagaggggaccttgggagcctgggcttgaaggacagttgccctccaggaggttcctcacacacaactccagaggcgccatttacactgtagtctgtacaacctgtggttccacgtgcatgttcggcacctgtctgtgcctctggcaccaggttgtgtgtgtgtgcccccaccacagctctatgactctgttctccctccctgccattgtggactcttgtatttgagggacctcaagagagtgaggaccctaccatccactgtccatattcagtcccagccccagtgcgcttcctctgttcyctccctcagccatccaattcttgagttttctcactgattggttttctttctttttccttggattaaatgtgaaagcaaaggc

SEQ ID NO: 5676 - DNA, 4404 bp, Homo sapiens
cttcccagtgggactccagcagggcgtcgtggtctgtgcggtgtctcccaaaccactacctggctgcccccgtaccagctgctgggaaagactacttcctccgagttgtgccggcctccgcgttctcctcacctcccctctcctccggacctccgccccctcgcggagaggccttgccgctttaagagccgggctagcgattgacaagcaataaacgctgagcgcccggctgcgctggagccgcccggagctaggggcttcccgsggcgcaggagagacgtttcagagcccttgcctccttcaccatgccggttgccgccaccaactctgaaactgccatgcagcaagtcctggacaacttgggatccctccccagtgccacgggggctgcagagctggacctgatcttccttcgaggcattatggaaagtcccatagtaagatccctggccaaggcccatgagaggctggaggagacgaagctggaggccgtgagagacaacaacctggagctggtgcaggagatcctgcgggacctggcgcasstggctgagcagagcagcacagccgccgagctggcccacatcctccaggagccccacttccagtccctcctggagacgcacgactctgtggcctcaaagacctatgagacaccaccccccagccctggcctggaccctacrttcagcaaccagcctgtacctcccgatgctgtgcgcatggtgggcatccgcaagacagccggagaacatctgggtgtaacgttccgcgtrgagggcggcgagctggtgatcgcgcgcattctgcatgggggcatggtggctcarcaaggcctgctgcatgtgggtgacatcatcaaggaggtgaacgggcagccagtgggcagtgacccccgcgcactgcaggagctcctgcgcaatgccagtggcagtgtcatcctcaagatcctgcccagctaccaggagccccatctgccccgccaggtatttgtgaaatgtcactttgactatgacccggcccgagacagcctcatcccctgcaaggaagcaggcctgcgcttcaacgccggggacttgctccagatcgtaaaccaggatgatgccaactggtggcaggcatgccatgtcgaagggggcagtgctgggctcattcccagccagctgctggaggagaagcggaaagcatttgtcaagagggacctggagctgacaccaaactcagggaccctatgcggcagcctttcaggaaagaaaaagaagcgaatgatgtatttgaccaccaagaatgcagagtttgaccgtcatgagctgctcatttatgaggaggtggcccgcatgcccccgttccgccggaaaaccctggtactgattggggctcagggcgtgggacggcgcagcctgaagaacaagctcatcatgtgggatccagatcgctatggcaccacggtgccctacacctcccggcggccgaaagactcagagcgggaaggtcagggttacagctttgtgtcccgtggggagatggaggctgacgtccgtgctgggcgctacctggagcatggcgaatacgagggcaacctgtatggcacacgtattgactccatccggggcgtggtcgctgctgggaaggtgtgcgtgctggatgtcaacccccaggcggtgaaggtgctacgaacggccgagtttgtcccttacgtggtgttcatcgaggccccagacttcgagaccctgcgggccatgaacagggctgcgctggagagtggaatatccaccaagcagctcacggaggcggacctgagayggacagtggaggagagcagccgcatccagcggggctacgggcactactttgacctctgcctggtcaatagcaacctggagaggaccttccgcgagctccagacagccatggagaagctacggacagagccccagtgggtgcctgtcagctgggtgtactgagcctgttcacctggtcyttggctcactctgtgttgaaacccagaacctgaayccatccccctcctgacctgtgaccccctgccacaatccttagcccccatatctggctgtccttgggtaacagctcccagcaggccctaagtctggcttcagcacagaggcgtgcactgccagggaggtgggcattcatggggtaccttgtgcccaggtgctgcccactcctgatgcccattggtcaccagatatctctgagggccaagctatgcccaggaatgtgtcagagtcacctccataatggtcagtacagagaagagaaaagctgctttgggaccacatggtcagtaggcacactgccccctgccacccctccccagtcaccagttctcctctggactggccacacccaccccattcctggactcctcccacctctcacccctgtgtcggaggaacaggccttgggctgtttccgtgtgaccaggggaatgtgtggcccgctggcagccaggcaggcccgggtggtggtgccagcctggtgccatcttgaaggctggaggagtcagagtgagagcyagtggccacagctgcagagcactgcagctcccagctcctttggaaagggacagggtcgcagggcagatgctgctcggtccttccctcatccacagcttctcactgccgaagtttctccagatttctccaatgtgtcctgacaggtcagccctgctccccacagggccaggctggcaggggccagtgggctcagcccaggtaggggcaggatggagggctgagccctgtgacaacctgctgytaccaactgaagagccccaagctctccatggcccacagcaggcacaggtctgagctctatgtccttgaccttggtccatttggttttctgtctagccaggtccaggtagcccacttgcatcagggctgctgggttggaggggctaaggaggagtgcagaggggaccttgggagcctgggcttgaaggacagttgccctccaggaggttcctcacacacaactccagaggcgccatttacactgtagtctgtacaacctgtggttccacgtgcatgttcggcacctgtctgtgcctctggcaccaggttgtgtgtgtgtgcgtgtgcacgtgcgtgtgtgtgtgtgtgtgtcaggtttartttggggaggaagcaaagggttttgttttggaggtcactctttggggcccctttctgggggttccccatcagccctcatttcttataataccctgatcccagactccaaagccctggtcctttcctgatgtctcctcccttgtcttattgtccccctaccctaaatgcccccctgccataacttggggagggcagttttgtaaaataggagactccctttaagaaagaatgctgtcctagatgtacttgggcatctcatccttcattattctctgcattccttccggggggagcctgtcctcagaggggacaacctgtgacaccctgagtccaaacccttgtgcctcccagttcttccaagtgtctaactagtcttcgctgcagcgtcasscaaagctggcccctgaaccactgtgtgcccatttcctagggaaggggaaggagaataaacagaatatttattacaaatgttagaatatatttcttatactaggaatctcatttgcatttgcatagactatacacatggggtggaaaggccaggcctgcccccatctcgttggtgtggctctgcgtatactacacactcattctcctgctcctcttttcccttagtcagtgtcctttcatcctgattcagctctgccttgcatcaccctcagcctaagggagtgggaaggaaatggggtgttttcttgctgacctgaggctatagggtcacttgccatttcctaccttctctgggggatttgagggtagaggcaggggaagatctgttgttgcagytgcttctgcccccttgatccaaatgaccatcatctctgatggagatgggttgggtacctggccttcatggcaccttcactgctagggatgctcaaggggcaggcctggggcccttccctcctgtctcttctcggtctttcctctctgagcagcctcctacctcccctgcctgagccctcactccacagccctcccaggtacctagcagaggctgtcagtccttggctcacctggaacagggctggggctgggttggaacaggtgtgtgcccccaccacagctctatgactctgttctccctccctgccattgtggactcttgtatttgagggacctcaagagagtgaggaccctaccatccactgtccatattcagtcccagccccagtgcgcttcctctgttcyctccctcagccatccaattcttgagttttctcactgattggttttctttctttttccttggattaaatgtgaaagc

SEQ ID NO: 5677 - DNA, 3388 bp, Homo sapiens
cttcccagtgggactccagcagggcgtcgtggtctgtgcggtgtctcccaaaccactacctggctgcccccgtaccagctgctgggaaagactacttcctccgagttgtgccggcctccgcgttctcctcacctcccctctcctccggacctccgccccctcgcggagaggccttgccgctttaagagccgggctagcgattgacaagcaataaacgctgagcgcccggctgcgctggagccgcccggagctaggggcttcccgsggcgcaggagagacgtttcagagcccttgcctccttcaccatgccggttgccgccaccaactctgaaactgccatgcagcaagtcctggacaacttgggatccctccccagtgccacgggggctgcagagctggacctgatcttccttcgaggcattatggaaagtcccatagtaagatccctggccaaggtgataatggtattgtggtttatgcagcagaatgtctttgttcctatgaaatacatgctgaaatactttggrgcccatgagaggctggaggagacgaagctggaggccgtgagagacaacaacctggagctggtgcaggagatcctgcgggacctggcgcasstggctgagcagagcagcacagccgccgagctggcccacatcctccaggagccccacttccagtccctcctggagacgcacgactctgtggcctcaaagacctatgagacaccaccccccagccctggcctggaccctacrttcagcaaccagcctgtacctcccgatgctgtgcgcatggtgggcatccgcaagacagccggagaacatctgggtgtaacgttccgcgtrgagggcggcgagctggtgatcgcgcgcattctgcatgggggcatggtggctcarcaaggcctgctgcatgtgggtgacatcatcaaggaggtgaacgggcagccagtgggcagtgacccccgcgcactgcaggagctcctgcgcaatgccagtggcagtgtcatcctcaagatcctgcccagctaccaggagccccatctgccccgccaggtatttgtgaaatgtcactttgactatgacccggcccgagacagcctcatcccctgcaaggaagcaggcctgcgcttcaacgccggggacttgctccagatcgtaaaccaggatgatgccaactggtggcaggcatgccatgtcgaagggggcagtgctgggctcattcccagccagctgctggaggagaagcggaaagcatttgtcaagagggacctggagctgacaccaaactcagggaccctatgcggcagcctttcaggaaagaaaaagaagcgaatgatgtatttgaccaccaagaatgcagagtttgaccgtcatgagctgctcatttatgaggaggtggcccgcatgcccccgttccgccggaaaaccctggtactgattggggctcagggcgtgggacggcgcagcctgaagaacaagctcatcatgtgggatccagatcgctatggcaccacggtgccctacacctcccggcggccgaaagactcagagcgggaaggtcagggttacagctttgtgtcccgtggggagatggaggctgacgtccgtgctgggcgctacctggagcatggcgaatacgagggcaacctgtatggcacacgtattgactccatccggggcgtggtcgctgctgggaaggtgtgcgtgctggatgtcaacccccaggcggtgaaggtgctacgaacggccgagtttgtcccttacgtggtgttcatcgaggccccagacttcgagaccctgcgggccatgaacagggctgcgctggagagtggaatatccaccaagcagctcacggaggcggacctgagayggacagtggaggagagcagccgcatccagcggggctacgggcactactttgacctctgcctggtcaatagcaacctggagaggaccttccgcgagctccagacagccatggagaagctacggacagagccccagtgggtgcctgtcagctgggtgtactgagcctgttcacctggtcyttggctcactctgtgttgaaacccagaacctgaayccatccccctcctgacctgtgaccccctgccacaatccttagcccccatatctggctgtccttgggtaacagctcccagcaggccctaagtctggcttcagcacagaggcgtgcactgccagggaggtgggcattcatggggtaccttgtgcccaggtgctgcccactcctgatgcccattggtcaccagatatctctgagggccaagctatgcccaggaatgtgtcagagtcacctccataatggtcagtacagagaagagaaaagctgctttgggaccacatggtcagtaggcacactgccccctgccacccctccccagtcaccagttctcctctggactggccacacccaccccattcctggactcctcccacctctcacccctgtgtcggaggaacaggccttgggctgtttccgtgtgaccaggggaatgtgtggcccgctggcagccaggcaggcccgggtggtggtgccagcctggtgccatcttgaaggctggaggagtcagagtgagagcyagtggccacagctgcagagcactgcagctcccagctcctttggaaagggacagggtcgcagggcagatgctgctcggtccttccctcatccacagcttctcactgccgaagtttctccagatttctccaatgtgtcctgacaggtcagccctgctccccacagggccaggctggcaggggccagtgggctcagcccaggtaggggcaggatggagggctgagccctgtgacaacctgctgytaccaactgaagagccccaagctctccatggcccacagcaggcacaggtctgagctctatgtccttgaccttggtccatttggttttctgtctagccaggtccaggtagcccacttgcatcagggctgctgggttggaggggctaaggaggagtgcagaggggaccttgggagcctgggcttgaaggacagttgccctccaggaggttcctcacacacaactccagaggcgccatttacactgtagtctgtacaacctgtggttccacgtgcatgttcggcacctgtctgtgcctctggcaccaggttgtgtgtgtgtgcccccaccacagctctatgactctgttctccctccctgccattgtggactcttgtatttgagggacctcaagagagtgaggaccctaccatccactgtccatattcagtcccagccccagtgcgcttcctctgttcyctccctcagccatccaattcttgagttttctcactgattggttttctttctttttccttggattaaatgtgaaagcaaaggc

SEQ ID NO: 5678 - DNA, 1588 bp, Homo sapiens
tcccctgcgctgcccagtagggaggaaaaccggaggagagcgcaggaggaaacagtaccggctggaggccggtcttgcaggagcgggggactgctgggggcggggcttggtggtgacygctggcggggcggggcctggggctcagaggggtgggctttggagatcagagggtcgacgctgcttcgttgcctggactctggtttccgccctggagcaagccggggcctggtcggcagctgggccgccatggagtccacgctgggcgcgggcatcgtgatagccgaggcgctacagaaccagctagcctggctggagaacgtgtggctctggatcacctttctgggcgatcccaagatcctctttctgttctacttccccgcggcctactacgcctcccgccgtgtgggcatcgcggtgctctggatcagcctcmtcaccgagtggctcaacctcatcttcaagtggtttctttttggagacaggcccttttggtgggtccatgagtctggttactacagccaggctccagcccaggttcaccagttcccctcttcttgtgagactggtccaggcagcccttctggacactgcatgatcacaggagcagccctctggcccataatgacrgccctgtcttcgcaggtggccactcgggcccgcagccgctgggtaagggtgatgcctagcctggcttattgcaccttccttttggcggttggcttgtcgcgaatcttcatcttagcacatttccctcaccaggtgctggctggcctaataactggcgctgtcctgggctggctgatgactccccgagtgcctatggagcgggagctaagcttctatgggttgactgcactggccctcatgctaggcaccagcctcatctattggaycctctttacactgggcctggatctttcttggtccatcagcctagccttcaagtggtgtgagcggcctgagtggatacacgtggatagccggccctttgcctccctgagccgtgactcaggggctgccctgggcctgggcattgccttgcactctccctgctatgcccrggtgcgtcgggcacagctgggaaatggccagaagatagcctgccttgtgctggccatggggctgctgggccccctggactggctgggccacccccctcagatcagcctcttctacattttcaatttcctcaagtacaccctctggccatgcctagtcctggccctcgtgccctgggcagtgcacatgttcagtgcccaggaagcaccgcccatccactcttcctgacttcttgtgtgcctccctttcctttccctcccacaaagccaacactctgtgaccaccacactccaggaggcagccccatccccttccagcccctaagtaggccctcccctccctaaatctgcttccgcaccacctggkcttagccccaaasatgggccttctctctcccagataagttggtcctccctctgcctttcctctcaagcccccaaagagcaaaggcaacagcaagaccagcgggttcttgcaacactgtgaggggcagccagggcggccccaataaagcccttgaatactttga

SEQ ID NO: 5679 - DNA, 1724 bp, Homo sapiens
ccgggccgagggccggacctgcgtccgctgcggggcagggataccgggtccctgcagggagcwcaagccccagcgcgcccgcgaagagctgcgcggactcccggctgcttcccccgaatcccgggcgcaggaagcgcgaagccggacgaacgcggggagcgcgcggcgagcccgcctgaggccgcccctcccgccgcccggggtcacgcgccgcgcgctcccgccccgccccgccccgcagcgcctcagccgacaggggcttccgagcgagcagagtcccgcgccccgcactccatggagcagctgctgcgcgccgagctgcgcaccgcgaccctgcgggccttcggcggccccggcgccggctgcatcagcgagggccgagcctacgacacggacgcaggcccagtgttcgtcaaagtcaaccgcaggacgcaggcccggcagatgtttgagggggaggtggccagcctggaggccctcmggagcacgggcctggtgcgggtgccgaggcccatgaaggtcatcgacctgccgggaggtggggccgcctttgtgatggagcatttgaagatgaagagcttgagcagtcaagcatcaaaacttggagagcagatggcagatttgcatctttacaaccagaagctcagggagaagttgaaggaggaggagaacacagtgggccgaagaggtgagggtgctgagcctcagtatgtggacaagttcggcttccacacggtgacgtgctgcggcttcatcccgcaggtgaatgagtggcaggatgactggccgacctttttcgcccggcaccggctccaggcgcagctggacctcattgagaaggactatgctgaccgagaggcacgagaactctggtcccggctacaggtgaagatcccggatctgttttgtggcctagagattgtccccgcgttgctccacggggatctctggtcgggaaacgtggctgaggacgacgtggggcccattatttacgacccggcttccttctatggccattccgagtttgaactggcaatcgccttgatgtttggggggttccccagatccttcttcaccgcctaccaccggaagatccccaaggctccgggcttcgaccagcggctgctgctctaccagctgtttaactacctgaaccactggaaccacttcgggcgggagtacaggagcccttcsttgggcaccatgcgaaggctgctcaagtagcggcccctgccctcccttcccctgtccccgtccccgtctccgtctccccgtccctgtccccccgtcccccgtccctgtgcccccgtccctgtccccctgttcccgtctccccgtccctccgtctccatccccccgtccccccatcctcctgtccccgtccccccgtccccgtccctccatccctgtcccccgtccccctgtccccctgtccacataccaatccccctgtccccgacccccatccccgtcccccatctccgtccccgtcccccctgccccgtccccgtctccgttcccccgtccccatcctccatccccgtctcccatcgccgtccccccgtccccgtcccccgtccccgtcccccctgtccctgtcccccttcccccgacccctcccagatcctggggaccaataaagcccgcagcgggyctcggctggcgtcctgcgcctcgttcctccgctcgtggggctgctttcagggccagacgcacggcgagct

SEQ ID NO: 5680 - DNA, 1899 bp, Homo sapiens
aaaaacaaacaataaaaaaacctcacgtcaaatgacttcagcacggactgggctcaggtgcgcacctgctcgtgtgcacgcgtgtgtacccacgtgtatgcatgcatgggcgcgcgtgggcattcctgtgtctcaagtccctttcccaggacatcctggaatcagcagccccaccccgggccgagggccggacctgcgtccgctgcggggcagggataccgggtccctgcagggagcwcaagccccagcgcgcccgcgaagagctgcgcggactcccggctgcttcccccgaatcccgggcgcaggaagcgcgaagccggacgaacgcggggagcgcgcggcgagcccgcctgaggccgcccctcccgccgcccggggtcacgcgccgcgcgctcccgccccgccccgccccgcagcgcctcagccgacaggggcttccgagcgagcagagtcccgcgccccgcactccatggagcagctgctgcgcgccgagctgcgcaccgcgaccctgcgggccttcggcggccccggcgccggctgcatcagcgagggccgagcctacgacacggacgcaggcccagtgttcgtcaaagtcaaccgcaggacgcaggcccggcagatgtttgagggggaggtggccagcctggaggccctcmggagcacgggcctggtgcgggtgccgaggcccatgaaggtcatcgacctgccgggaggtggggccgcctttgtgatggagcatttgaagatgaagagcttgagcagtcaagcatcaaaacttggagagcagatggcagatttgcatctttacaaccagaagctcagggagaagttgaaggaggaggagaacacagtgggccgaagaggtgagggtgctgagcctcagtatgtggacaagttcggcttccacacggtgacgtgctgcggcttcatcccgcaggtgaatgagtggcaggatgactggccgacctttttcgcccggcaccggctccaggcgcagctggacctcattgagaaggactatgctgaccgagaggcacgagaactctggtcccggctacaggtgaagatcccggatctgttttgtggcctagagattgtccccgcgttgctccacggggatctctggtcgggaaacgtggctgaggacgacgtggggcccattatttacgacccggcttccttctatggccattccgagtttgaactggcaatcgccttgatgtttggggggttccccagatccttcttcaccgcctaccaccggaagatccccaaggctccgggcttcgaccagcggctgctgctctaccagctgtttaactacctgaaccactggaaccacttcgggcgggagtacaggagcccttcsttgggcaccatgcgaaggctgctcaagtagcggcccctgccctcccttcccctgtccccgtccccgtctccgtctccccgtccctgtccccccgtcccccgtccctgtgcccccgtccctgtccccctgttcccgtctccccgtccctccgtctccatccccccgtccccccatcctcctgtccccgtccccccgtccccgtccctccatccctgtcccccgtccccctgtccccctgtccacataccaatccccctgtccccgacccccatccccgtcccccatctccgtccccgtcccccctgccccgtccccgtctccgttcccccgtccccatcctccatccccgtctcccatcgccgtccccccgtccccgtcccccgtccccgtcccccctgtccctgtcccccttcccccgacccctcccagatcctggggaccaataaagcccgcagcgggyctcggctggcgtcctgcgcctcgttcctccgctcgtggggctgctttcagggccagacgcacggcgagct

SEQ ID NO: 5681 - DNA, 1660 bp, Homo sapiens
aaaaacaaacaataaaaaaacctcacgtcaaatgacttcagcacggactgggctcaggtgcgcacctgctcgtgtgcacgcgtgtgtacccacgtgtatgcatgcatgggcgcgcgtgggcattcctgtgtctcaagtccctttcccaggacatcctggaatcagcagccccaccccgggccgagggccggacctgcgtccgctgcggggcagggataccgggtccctgcagggagcwcaagccccagcgcgcccgcgaagagctgcgcggactcccggctgcttcccccgaatcccgggcgcaggaagcgcgaagccggacgaacgcggggagcgcgcggcgagcccgcctgaggccgcccctcccgccgcccggggtcacgcgccgcgcgctcccgccccgccccgccccgcagcgcctcagccgacaggggcttccgagcgagcagagtcccgcgccccgcactccatggagcagctgctgcgcgccgagctgcgcaccgcgaccctgcgggccttcggcggccccggcgccggctgcatcagcgagggccgagcctacgacacggacgcaggcccagtgttcgtcaaagtcaaccgcaggacgcaggcccggcagatgtttgagggggaggtggccagcctggaggccctcmggagcacgggcctggtgcgggtgccgaggcccatgaaggtcatcgacctgccgggaggtggggccgcctttgtgatggagcatttgaagatgaagagcttgagcagtcaagcatcaaaacttggagagcagatggcagatttgcatctttacaaccagaagctcagggagaagttgaaggaggaggagaacacagtgggccgaagaggtgagggtgctgagcctcagtatgtggacaagttcggcttccacacggtgacgtgctgcggcttcatcccgcaggtgaatgagtggcaggatgactggccgacctttttcgcccggcaccggctccaggcgcagctggacctcattgagaaggactatgctgaccgagaggcacgagaactctggtcccggctacaggtgaagatcccggatctgttttgtggcctagagattgtccccgcgttgctccacggggatctctggtcgggaaacgtggctgaggacgacgtggggcccattatttacgacccggcttccttctatggccattccgagtttgaactggcaatcgccttgatgtttggggggttccccagatccttcttcaccgcctaccaccggaagatccccaaggctccgggcttcgaccagcggctgctgctctaccagctgtttaactacctgaaccactggaaccacttcgggcgggagtacaggagcccttcsttgggcaccatgcgaaggctgctcaagtagcggcccctgccctcccttcccctgtccccgtccccgtctccgtctccccgtccctgtccccccgtcccccgtccctgtgcccccgtccctgtccccctgttcccgtctccccgtccctccgtctccatccccccgtccccccatcctcctgtccccgtccccccgtccccgtccctccatccctgtcccccgtccccctgtccccctgtccacataccaatccccctgtccccgacccccatccccgtcccccatctccgt

SEQ ID NO: 5682 - DNA, 1891 bp, Homo sapiens
cctcacgtcaaatgacttcagcacggactgggctcaggtgcgcacctgctcgtgtgcacgcgtgtgtacccacgtgtatgcatgcatgggcgcgcgtgggcattcctgtgtctcaagtccctttcccaggacatcctggaatcagcagccccaccctgggccggcgcccgggccgagggccggacctgcgtccgctgcggggcagggataccgggtccctgcagggagcwcaagccccagcgcgcccgcgaagagctgcgcggactcccggctgcttcccccgaatcccgggcgcaggaagcgcgaagccggacgaacgcggggagcgcgcggcgagcccgcctgaggccgcccctcccgccgcccggggtcacgcgccgcgcgctcccgccccgccccgccccgcagcgcctcagccgacaggggcttccgagcgagcagagtcccgcgccccgcactccatggagcagctgctgcgcgccgagctgcgcaccgcgaccctgcgggccttcggcggccccggcgccggctgcatcagcgagggccgagcctacgacacggacgcaggcccagtgttcgtcaaagtcaaccgcaggacgcaggcccggcagatgtttgagggggaggtggccagcctggaggccctcmggagcacgggcctggtgcgggtgccgaggcccatgaaggtcatcgacctgccgggaggtggggccgcctttgtgatggagcatttgaagatgaagagcttgagcagtcaagcatcaaaacttggagagcagatggcagatttgcatctttacaaccagaagctcagggagaagttgaaggaggaggagaacacagtgggccgaagaggtgagggtgctgagcctcagtatgtggacaagttcggcttccacacggtgacgtgctgcggcttcatcccgcaggtgaatgagtggcaggatgactggccgacctttttcgcccggcaccggctccaggcgcagctggacctcattgagaaggactatgctgaccgagaggcacgagaactctggtcccggctacaggtgaagatcccggatctgttttgtggcctagagattgtccccgcgttgctccacggggatctctggtcgggaaacgtggctgaggacgacgtggggcccattatttacgacccggcttccttctatggccattccgagtttgaactggcaatcgccttgatgtttggggggttccccagatccttcttcaccgcctaccaccggaagatccccaaggctccgggcttcgaccagcggctgctgctctaccagctgtttaactacctgaaccactggaaccacttcgggcgggagtacaggagcccttcsttgggcaccatgcgaaggctgctcaagtagcggcccctgccctcccttcccctgtccccgtccccgtctccgtctccccgtccctgtccccccgtcccccgtccctgtgcccccgtccctgtccccctgttcccgtctccccgtccctccgtctccatccccccgtccccccatcctcctgtccccgtccccccgtccccgtccctccatccctgtcccccgtccccctgtccccctgtccacataccaatccccctgtccccgacccccatccccgtcccccatctccgtccccgtcccccctgccccgtccccgtctccgttcccccgtccccatcctccatccccgtctcccatcgccgtccccccgtccccgtcccccgtccccgtcccccctgtccctgtcccccttcccccgacccctcccagatcctggggaccaataaagcccgcagcgggyctcggctggcgtcctgcgcctcgttcctccgctcgtggggctgctttcagggccagacgcacggcgagct

SEQ ID NO: 5683 - DNA, 740 bp, Homo sapiens
attcttgaagtcagtgagaccaagaacccactagaacacactatcagccgtggtcaaccccaccatgttcttcaacatcgccatcaacggggagcccttgggccgcatctcctttgagctgtttgcaaacaagattccaaagacggcagaaaactttcatgctctaagcactggagagaaaggatttggttataagggttcctgctttcacagaattattccagagtttatgygtcagggcggtgacttcacatgccataatggcactggtgcctctacggggagaaatttgatgtcgaggacttcaccctaaagcatacaggtcctgacatcttgtccatggcaaatgcaggacccgatacaaacggttcctaatttttcatctgcactgccaagacagcgtggttgaatgggaagcaggtggtctctggcaaggtgagagaaggcatgaatattgtgaagcccatggagcgctttcggtccaggaatggcaagaccagcaagaagatcaccattgctgactggacaactctaataagtttcacttacgctttatcttaaccactggaccattccttctgtagctcagagagagcaccctccaccccatttgctcacactatcctgtcatctttgtgttcttgctgcagttccctttgggttccatgttttccttgttcccttccatgcctagctggattgtagagttaagtttatgaatatgaaataaaatctaaata

SEQ ID NO: 5684 - DNA, 1184 bp, Homo sapiens
ggcgtcttaaatgcgcaaagaaaggacgccggggacacccggttgggctctgctgctcccttctgggttccgaggcccaagcccttggcagtgtttgtgagtggaagggaggtcacgctatcgtccgcggccccagcagccctgtgccctcgttggatcccgcgacgcggctcctttaagagcctcgcgggtcgcccgccgctaggtcgctccccggccatgcgggcgctgcgggccggcctgaccctggcgtygggcgcggggctgggtgcggtcgtcgagggctggcggcggcggcgggaggacgcgcgggcggcgccgggactgctgggccggctgcccgtgctgcccgtggcggcggcagccgagttgccccctgtgcccgggggaccccgcggcccgggcgagctggccaagtacgggctgccggggctggcgcagctcaagagccgcgagtcgtacgtgctgtgctacgacccgcgcacccgcggcgcgctctgggtggtggagcagctgcgacccgagcgtctccgcggcgacggcgaccggcgcgagtgcgacttccgcgaggacgactcggtgcacgcgtaccaccgtgccaccaacgccgactaccgcggcagtggcttcgaccgcggtcacctggccgccgccgccaaccaccgctggagccagaaggccatggacgacacgttctacctgagcaacgtcgcgccccaggtgccccacctcaaccagaatgcctggaacaacctggagaaatatagccgcagcttgacccgcagctaccaaaacgtctatgtctgcacagggccactcttcctgcccaggacagaggctgatgggaaatcctaygtaaagtaccaggtcatcggcaagaaccacgtggcagtgcccacacacttcttcaaggtgctgatcctggaggcagcaggtgggcaaattgagctcckcayctacgtgatgcccaacgcacctgtggatgaggccatcccactggagcgcttcctggtgcccatcgagagcattgagcgggcttcggggctgctctttgtgccaaacatcctggcgcgggcaggcagcctcaaggccatcacggcgggcagtaagtgagggtggagcccagtgagactgtgggtgtgtgcaggccggggagtattaaaggtsgtgatttttggagacaa

SEQ ID NO: 5685 - DNA, 4426 bp, Homo sapiens
atgccscctatttggacacctactctgcccaacctactccagcccgcgtrcccctgcagcccgtcgggcgcccaggccacgcccctgggcgayattggctctccgattggacagcttaatggaggtgtggccggaagaggcgagtctcattggcagaggcgggaccgacggtgtgtgcggaacatggcggagcgcggcaggaagcggccgtgcggcccgggtgaacacggccaaaggattgagtggcgaaaatggaagcaacagaagaaagaggagaaaaaaaaatggaaggatctcaagctgatgaaaaaactggagcggcagcgggcacaggaggaacaggcaaagcgcctggaagaggaggaggcagyggcagagaaggaggaccgcgggcggccctacacactgagcgtagccctgccgggctccatcctggacaatgctcagtcgccrgagcttcgcacctacttggccggtcagattgccagagcctgtgccatcttctgtgtggatgagatcgtggtgtttgatgaggagggccaggatgccaagactgtggagggggaattcasaggagttgggaagaaggggcaggcgtgcgtacagctggcccggatcctgcagtacctggagtgtccacagtacctgaggaaggcgttcttccccaagcaccaggatctacagtttgcagggctcctgaaccccctggacagcccccaccacatgcgtcaggatgaggaatccgagttccgagagggcatcgtggtggatcggcccacccggccaggccacggctcctttgtcaactgtggcatgaaaaaggaggtgaagattgacaagaacctggagcccgggcttcgggtgactgtgcgactgaaccagcagcagcacccagactgcaagacctaccatggcaaagtggtatcatcgcaggaccctcgcaccaaagctggtctctactggggctacaccgtccgactggcttcctgcctcagtgctgtgtttgctgaggcccccttccaagatgggtatgacctgaccatcgggacgtcagagcgcggctcagatgtggcytctgcccagcttcccaacttcaggcatgctcttgtggtgttcgggggcctccagggtctggaagctggagcggatgctgaccccaacctggaggtggctgaacccagtgtcctctttgacctgtacgtcaatacctgtcctggccagggtagccgtaccatccgcacggaggaagccatcctcatctccctggccgcsctgcagcctggcctcayccaggcgggtgcccggcacacctgaaagttctaaggggccgaggacatsagtgaagcagcagtgaaaccaggggctctgcaggtcacttgggacggacgccaccagacttgtctccaaaaatcacsacctttaatactccccggcctgcacacacccacagtctcactgggctccaccctcacttactgcccgccgtgatggccttgaggctgcctgcccgcgccaggatgtttggcacaaagagcagccccgaagcccgctcaatgctctcgatgggcaccaggaagcgctccagtgggatggcctcatccacaggtgcgttgggcatcacgtagrtgmggagctcaatttgcccacctgctgcctccaggatcagcaccttgaagaagtgtgtgggcactgccacgtggttcttgccgatgacctggtactttacrtaggatttcccatcagcctctgtcctgtgggcagacccaggcacacgtgggcagggggcctggatgaacccaaagccacctcttccaggcagccttccctgatctgtcctctaacttctgtcaacctgcaggaccacgccctcactgtgagacttctgtagcctgcctggctcctccttgagsctggaactctctccagggtggttaactctttccctctgttttccttatgcccaacactgggtcaggcagagtgggcgacaataaacgctgctaggagaatcgagccttctgaatattcacattcgtctgaggggagacttaacgactgtccatctctccccacagaggtgagcaacaagtgggcaaggaccatgacaggtgayatcccagcaccagcacaggtgccaggacaccggacgggggctccccctcagcagagtctcctcccttccaccaggccctaggaggcacctgctaatgaaatttgatcagtgccccaaccaccgccttggccagcctatgccgagcccttaccatggaccaggccctggggaagcatgtgacatcaaccaagaggtcacaggttttgcagagggggacacaggtcatttgcccacagcaccaaggaactaggtgatgaggcctggactccatcccgagcctgtggattccagagtgagctgctcagcctggacctgttgcctctcagccccagccctctgcaggccagaaaaaccacggagcacacccagaggtgctcagttgcttccacctgagaggcagggctgcacaggagcaagagtggaggccctgggtcaggcagatctagattcaaactcccgagaagggtggagggaagtgctccaagcagagcagagactgaaggcgggagagcctggtgcaccgcggacctgcagggggaaggcrtgagagctcggtgcactggggacctgcatggggaaggcgggagagctcggtgcactggggacctgcatggggaaggcgtgagagctcggtgcactggggacctgcatggggaaggcgggagagctcggtgcacctcggacctgcagagggaaggtgggagagcttggtgcaccgcagacctgcagggggaaggcgggagagcttggtgcactgcagacctgcggggggaaggtgggagagcttggtgcactgcagacctgcggggggttccatattggcagaacaagattgggtgggcatgccaagaggtgacagcagggagaagcgggggcagattcagggcctgctgctgcccatgggcagaggagagatggtcaggggtacccgacaggtctttggctgtggaggtggaatgaggggactcgaggcagggaagctgacaggcttgccaagaaaccagatgagtagggaactggtattgacccagagcctggggcaagcctggccctgtgagtggcagtaggggcctcrggtgagtgggaggttctgccgcccccctggtttccaccttacctgggcaggaagagtggccctgtgcagacatagacgttttggtagctgcgggtcaagctgcggctatatttctccaggttgttccaggcattctggttgaggtggggcacctggtaggagagatagggcttagcaggactgtggctgggacccttcctcctctatcagagggccgccccaggtcctgaggggatggacaggctcagagatatccagtgagacaagcggggggaaactgaggctcaaggaatgaaagtcactccctgaaacccagggctgatagagtgctagccaccaccctctgtccctcccacagcccaggtgtcaaagtcttttctcagctcccaagagtcgaatgaaggaagagcctgtctccacctttcagagaggactgaggcctgtccccagccccacccagggtctcctgggaagaccagcccttccaactaccaacccgttccttttcccagtctgagccacaggaagagcctagcggggaatgycatgaatcgacctccatcctgagctctccaggcctgggacaatggaaagtggatagggggctgtcttcccagaaggaagctgggtcagaggttggtgccccatgggctccacccagagccccatggcagtctccatccattggtgccaggacctgctgggaacaggctgagagggtggttggcccagtgcacagtgcctggcactaacaacctgatcgtgggccaggtgtctgcctcgaaactgcctgaaggcaggcagggtaggacaatgtctggaggctcacggttttatagactaggggtccccaacccctgggctacagaccggtaccagaaccgggccacacagcaggaggtgagcagcaggcgagcaagggaagcttcatctgtatttacagccacccccccattgatcccacagcagcctgagctccgcctcctgtcagatcagtggcggctggagattgtcataggagctggaaccctatggtgaactgcgcatgtgaggaggttgcgcgcttcttttgaaaacctaatgcctgatctgtcgttgttgcccatcacctccagataggactgyctagttgcaggaaaacaagctcagggctcccacggatcctacattactgtgagttgtatatttcactatatgttacaatgtaataataatagaaataaaatgtacataaatgt

SEQ ID NO: 5686 - DNA, 848 bp, Homo sapiens
gagagagggaggagcaggcaggatcctggagctccctggatttcaagctggccgtggcctcccgggtgacgtcactgcggtcattgcctgatgagctcaggcagaggcgcctggggacggggctgctcctctgtcgagctgatcrcacccacagttgagctgcgctggccagagatgcctgcccacagcctggwgatgagcagcccggccctcccggcyttcctgctctgcagcacgctgctggtcatcaagatgtacgtggtggccatcatcacgggccaagtgaggctgcggaagaaggcctttgccaaccccgaggatgccctgagacacggaggcccccagtattgcaggagygaccccgacgtggaacgctgcctcagggcccaccggaacgacatggagaccatctaccccttccttttcctgggcttcgtctactcctttctgggtcctaacccttttgtcgcctggatgcacttcctggtcttcctcgtgggccgtgtggcacacaccgtggcctacctggggaagctgcgggcacccatccgctccgtgacctacaccctggcccagctcccctgcgcctccatggctctgcagatcctctgggaagcggcccgccacctktgaccagcagckgatgcctccttggccaccagaccatgggccaagagccgccgtggctatayctggggacttgatgttccttccagattgtggtgggccctgagtcctggtttcctggcagcctgctgcgcgtgtgggtctctgggcacagtgggcctgtgtgtgtgcccgtgtgtgtgtatgtgwgtgttgttttctcctagacccgtgacctgaga

SEQ ID NO: 5687 - DNA, 916 bp, Homo sapiens
gagagagggaggagcaggcaggatcctggagctccctggatttcaagctggccgtggcctcccgggtgacgtcactgcggtcattgcctgatgagctcaggcagaggcgcctggggacggggctgctcctctgtcgagctgatcrcacccacagttgagctgcgctggccagagatgcctgcccacagcctggwgatgagcagcccggccctcccggcyttcctgctctgcagcacgctgctggtcatcaagatgtacgtggtggccatcatcacgggccaagtgaggctgcggaagaaggcctttgccaaccccgaggatgccctgagacacggaggcccccagtattgcaggagygaccccgacgtggaacgctgcctcagggcccaccggaacgacatggagaccatctaccccttccttttcctgggcttcgtctactcctttctgggtcctaacccttttgtcgcctggatgcacttcctggtcttcctcgtgggccgtgtggcacacaccgtggcctacctggggaagctgcgggcacccatccgctccgtgacctacaccctggcccagctcccctgcgcctccatggctctgcagatcctctgggaagcggcccgccacctwtgaccagcagckgatgcctccttggccaccagaccatgggccaagagccgccgtggctatayctggggacttgatgttccttccagattgtggtgggccctgagtcctggtttcctggcagcctgctgcgcgtgtgggtctctgggcacagtgggcctgtgtgtgtgcccgtgtgtgtgtatgttgtgtgtgtgtgtgtgtgtgtgttttctcctagacccgtgacctgagatgtgtgatttttagtcattaaatggaagtgtctgccagctgggcccagcacctc

SEQ ID NO: 5688 - DNA, 1898 bp, Homo sapiens
gagagagggaggagcaggcaggatcctggagctccctggatttcaagctggccgtggcctcccgggtgacgtcactgcggtcattgcctgatgagctcaggcagaggcgcctggggacggggctgctcctctgtcgagctgatcrcacccacagttgagctgcgctggccagagatgcctgcccacagcctggwgatgagcagcccggccctcccggcyttcctgctctgcagcacgctgctggtcatcaagatgtacgtggtggccatcatcacgggccaagtgaggctgcggaagaaggcctttgccaaccccgaggatgccctgagacacggaggcccccagtattgcaggagygaccccgacgtggaacgctgcctcaggcaggcccaccggaacgacatggagaccatctaccccttccttttcctgggcttcgtctactcctttctgggtcctaacccttttgtcgcctggatgcacttcctggtcttcctcgtgggccgtgtggcacacaccgtggcctacctggggaagctgcgggcacccatccgctccgtgacctacaccctggcccagctcccctgcgcctccatggctctgcagatcctctgggaagcggcccgccacctgtgaccagcagckgatgcctccttggccaccagaccatgggccaagagccgccgtggctatayctggggacttgatgttccttccagattgtggtgggccctgagtcctggtttcctggcagcctgctgcgcgtgtgggtctctgggcacagtgggcctgtgtgtgtgcccgtgtgtgtgtatgtgwgtgtgkatgtttcttagccccttggattcctgcacgaagtggctgatgggaaccatttcaagacagattgtgaagattgatagaaaatccttcagctaaagtaacagagcatcaaaaacatcactccctctccctccctaacagtgaaaagagagaagggagactctatttaagattcccaaacctaatgatcatctgaatccygggctaagaatgcagacttttcagactgaccccagaaattctggcccagccaatctagaggcaagcctggccatctgtatttttttttttccaagacagagtcttgctctgttgcccaagctggagtgaagtggtacaatctggctcactgcagcctccgcctcccgggttcaagcgattctcccgcctcagcctcctgagtagctgggattacaggcgcgtatcaccatacccagctaatttttgtatttttagtagagacgggttcaccatgttgcccaggagggtctcgaactcctggcctcaagtgatccaccggcctcggcctcccaaagtgctgggatgacaggcatgaatcactgtgctcagccaccatctggagttttaaaaggctcccatgtgagtccctgtgatggccaggccaggggacccctrccagttctctgtggaagcaaggctggggtcttgggttcctgtatggtggaagctgggtgagccaaggacagggctggctcctctgcccccgctgacgcttcccttgccgttggctttggatgtctttgctgcagtcttctctctggctcaggtgtgggtgkgaggggcccacaggaagctcagccttctcctcccaaggtttgagtccctccaaagggcwgtgggtggaggaccgggagctttgggtgaccagccactcaaaggaactttctggtcccttcagtatcttcaaggtttggaaactgcaaatgtccccttgatggggaatccgtgtgtgtgtgtgtgtgtgtgtgtgtgtgtgtgtgtgtgtgtgtgtgttttctcctagacccgtgacctgagatgtgtgatttttagtcattaaatggaagtgtctgcca

SEQ ID NO: 5689 - DNA, 1774 bp, Homo sapiens
gctgctcctctgtcgagctgatcrcacccacagttgagctgcgctggccagagatgcctgcccacagcctggwgatgagcagcccggccctcccggcyttcctgctctgcagcacgctgctggtcatcaagatgtacgtggtggccatcatcacgggccaagtgaggctgcggaagaaggcctttgccaaccccgaggatgccctgagacacggaggcccccagtattgcaggagygaccccgacgtggaacgctgcctcagggcccaccggaacgacatggagaccatctaccccttccttttcctgggcttcgtctactcctttctgggtcctaacccttttgtcgcctggatgcacttcctggtcttcctcgtgggccgtgtggcacacaccgtggcctacctggggaagctgcgggcacccatccgctccgtgacctacaccctggcccagctcccctgcgcctccatggctctgcagatcctctgggaagcggcccgccacctgtgaccagcagckgatgcctccttggccaccagaccatgggccaagagccgccgtggctatayctggggacttgatgttccttccagattgtggtgggccctgagtcctggtttcctggcagcctgctgcgcgtgtgggtctctgggcacagtgggcctgtgtgtgtgcccgtgtgtgtgtatgtgwgtgtgkatgtttcttagccccttggattcctgcacgaagtggctgatgggaaccatttcaagacagattgtgaagattgatagaaaatccttcagctaaagtaacagagcatcaaaaacatcactccctctccctccctaacagtgaaaagagagaagggagactctatttaagattcccaaacctaatgatcatctgaatccygggctaagaatgcagacttttcagactgaccccagaaattctggcccagccaatctagaggcaagcctggccatctgtatttttttttttccaagacagagtcttgctctgttgcccaagctggagtgaagtggtacaatctggctcactgcagcctccgcctcccgggttcaagcgattctcccgcctcagcctcctgagtagctgggattacaggcgcgtatcaccatacccagctaatttttgtatttttagtagagacgggttcaccatgttgcccaggagggtctcgaactcctggcctcaagtgatccaccggcctcggcctcccaaagtgctgggatgacaggcatgaatcactgtgctcagccaccatctggagttttaaaaggctcccatgtgagtccctgtgatggccaggccaggggacccctrccagttctctgtggaagcaaggctggggtcttgggttcctgtatggtggaagctgggtgagccaaggacagggctggctcctctgcccccgctgacgcttcccttgccgttggctttggatgtctttgctgcagtcttctctctggctcaggtgtgggtgkgaggggcccacaggaagctcagccttctcctcccaaggtttgagtccctccaaagggcwgtgggtggaggaccgggagctttgggtgaccagccactcaaaggaactttctggtcccttcagtatcttcaaggtttggaaactgcaaatgtccccttgatggggaatccgtgtgtgtgtgtgtgtgtgtgtgtgtgtgtgtgtgtgtgtgtgtgtgttttctcctagacccgtgacctgagatgtgtgatttttagtcattaaatggaagtgtctgcca

SEQ ID NO: 5690 - DNA, 1895 bp, Homo sapiens
gagagagggaggagcaggcaggatcctggagctccctggatttcaagctggccgtggcctcccgggtgacgtcactgcggtcattgcctgatgagctcaggcagaggcgcctggggacggggctgctcctctgtcgagctgatcrcacccacagttgagctgcgctggccagagatgcctgcccacagcctggwgatgagcagcccggccctcccggcyttcctgctctgcagcacgctgctggtcatcaagatgtacgtggtggccatcatcacgggccaagtgaggctgcggaagaaggcctttgccaaccccgaggatgccctgagacacggaggcccccagtattgcaggagygaccccgacgtggaacgctgcctcagggcccaccggaacgacatggagaccatctaccccttccttttcctgggcttcgtctactcctttctgggtcctaacccttttgtcgcctggatgcacttcctggtcttcctcgtgggccgtgtggcacacaccgtggcctacctggggaagctgcgggcacccatccgctccgtgacctacaccctggcccagctcccctgcgcctccatggctctgcagatcctctgggaagcggcccgccacctgtgaccagcagckgatgcctccttggccaccagaccatgggccaagagccgccgtggctatayctggggacttgatgttccttccagattgtggtgggccctgagtcctggtttcctggcagcctgctgcgcgtgtgggtctctgggcacagtgggcctgtgtgtgtgcccgtgtgtgtgtatgtgwgtgtgkatgtttcttagccccttggattcctgcacgaagtggctgatgggaaccatttcaagacagattgtgaagattgatagaaaatccttcagctaaagtaacagagcatcaaaaacatcactccctctccctccctaacagtgaaaagagagaagggagactctatttaagattcccaaacctaatgatcatctgaatccygggctaagaatgcagacttttcagactgaccccagaaattctggcccagccaatctagaggcaagcctggccatctgtatttttttttttccaagacagagtcttgctctgttgcccaagctggagtgaagtggtacaatctggctcactgcagcctccgcctcccgggttcaagcgattctcccgcctcagcctcctgagtagctgggattacaggcgcgtatcaccatacccagctaatttttgtatttttagtagagacgggttcaccatgttgcccaggagggtctcgaactcctggcctcaagtgatccaccggcctcggcctcccaaagtgctgggatgacaggcatgaatcactgtgctcagccaccatctggagttttaaaaggctcccatgtgagtccctgtgatggccaggccaggggacccctrccagttctctgtggaagcaaggctggggtcttgggttcctgtatggtggaagctgggtgagccaaggacagggctggctcctctgcccccgctgacgcttcccttgccgttggctttggatgtctttgctgcagtcttctctctggctcaggtgtgggtgkgaggggcccacaggaagctcagccttctcctcccaaggtttgagtccctccaaagggcwgtgggtggaggaccgggagctttgggtgaccagccactcaaaggaactttctggtcccttcagtatcttcaaggtttggaaactgcaaatgtccccttgatggggaatccgtgtgtgtgtgtgtgtgtgtgtgtgtgtgtgtgtgtgtgtgtgtgtgttttctcctagacccgtgacctgagatgtgtgatttttagtcattaaatggaagtgtctgcca

SEQ ID NO: 5691 - DNA, 3708 bp, Homo sapiens
tgagtaacggacgtgcgaggatgatgcttgtgcaagaaggaaatgaccgctgtcccggctccgcgggagacgaaccccggcttcccgccctcagggactagctctccagggaactgggacgcgcccccggaccgtgcagttctctgcaggaccaggccawggagctcgaagtccggcgggtccgayaggcgttcctgtccggccggtcgcgacctctgcggtttcggctgcagcagcyggaggccctgcggaggatggtgcaggagcgcgagaaggatatcctgacggccwtcgccgccgacctgtgcaagagtgaattcaatgtgtacagtcaggaagtcattactgtccttggggaaattgattttatgcttgagaatcttcctgaatrggttactgctaaaccagttaagaagaacgtgctcaccatgctggatgaggcctatattcagccacagcctctgggagtggtgckgataatcggagcttggaattaccycttcgttctcaccattcagccactgataggagccatcgctgcaggaaatgctgtgattataaagccttctgaactgagtgaaaatacagccaagatcttggcaaagcttctccctcagtatttagaccaggatctctatattgttattaatggtggtgttgaggaaaccacggagctcctgaagcagcgatttgaccacattttctatabggsaaacactgcggttggcaaaattgtcatggaagctgctgccaagcatctgacccctgtgactcttgaactgggagggaaaagtccatgttatattgataaagattgtgacctggacattgtttgsagaygcataacctggggaaaatacatgaattgtggccaaacctgcattgcacccractatattctctgtgaagcatccctccaaaatcaaattgtatggaagattaaggaaacagtgaasgaattttatggagaaaatataaaagagtctcctgattatgaaaggatcatcaatcttcgtcattttaagaggatactaagtttgcttgaaggacaaaagatagcttttggtggggagactgatgaggccacacgctacatagccycaacagtacttaccgatgttgatcctaaaaccaaggtgatscaagaagaaatttttggaccaattcttccaatagtgcctgtgaaaaatgtagatgaggccataaatttcataaatgaacgtgaaaagcctctggctctttatgtattttygcataaccataagctcatcaaacggatgattgatgagacatccagtggaggtgtcacaggcartgacgtcattatgcacttcacgctcaactctttcccatttggaggagtgggttccagtgggatgggagcttatcacggaaaacatagttttgatacttyttctcatcagcrtycctgttkattaaaaagtttaaagagagaaggtgctaacaaactcagatatcctcccaacagccagtcaraggtggattggggraaattttttctcttgaaacggttcaacaaagaaaaactcggtctcctgttgctcactttcctgggtattgtagccgctgtgcttgtcaagaaataccaagctgtgctgaggagaaaggccctgttgatttttctggtagttcacagactgcgttggtccagtaagcagagatgaacaccagatttcaaaacccagccctgtctgttaagagtgaggcwgaatattactgaagaatgatcctgttcaacctcctagtgcctctactgaattattcctcttttaaatggttaatgaaccaataatttttaaatcataccaaaaatagtaagaaaatatgcaaacactctgtgatcaaacttaaaagtcattgccattcatcattaataaaagttgccatttcaactacgtcccaacattccctaatagggtattcagggaacctgtcttaaattgtgcttatctaaatcttggaactttgagctaggggaggagaatgtattagactaaatacaaactgcggggttgtaagggagtctcagaacctcactgaatccttcactccagttaatggcactgctcacttcctgcctctgctgccaccatcactgtgtgaagctttcaagagcttggtacttcccagggctaccggcagtcctctgtagtccagagaggtgagattagatcttcttggttccctgtgaggtttcaggcactaaaactctatgtggggaagggaggggttactcctcctccaatgggactcaaggacttgacctccaggagtaggcccctggtcagaagtgccatctcaccagtggtcttcattcttcctcattcattctttatcatcctgtgttctgtttagttgcaacaatctcttgtgactaatgtcactcaaagcatcttgtaaatcctagggcttcctggaagttagttgccaaagtcatgcaagcatcacctgtcattcttgtgttggagttatagaattctacatcttataaaacctaactggcatttaaaaaatactgtggccgggcgtggtggctcatgcctgtaatcccagcactttgggaggccgaggtgggaggattgcttgagtccaggaatttgagaccagcctggacaacacagtgagacctcatctctatcaaaaaataaaaattagctagatgtggtggcatgagcctgtgttcccagctgcttaggaggctgaagcaggaggattgattgagcctgcgaggccaaggctgcagcaggctgtgattgcaccactgcacttcagcttgggcaacagagcaagaccctgtctccgaaacaaataaaaaatactgtaataaaagtacttataaacatactaatcctctttcaggaccctaaagttgcaggttagtaggtcttcaaggacaaatctgtaagtttcttatttctgtagtgcaaaacttaaagtgagggaaccatttcctctcacagacaaagaggcctgggatattaggactttggggtttgagagcatcatggggcagacagatggtggatggtctggacaagaagcgagtaagccactgcggttggtcatactgaagggaattgatggcaagaggatcccctgagcaagtcagaagttactctcatcagtcgttcatggtcacaacctgaggtactctgctgagtgggcaaggctgaagaagaggcctgtggaatgcagcattacctgctggacagagcagggcaggcagttctatgccttgkagctcctgactgcagggactctgtccccacactcaraaagactcagctcactcaatgagagaatgtgatttactttatagaacgtataatcaactttgttgaataatttgttctattaaggctgtctaaagtatgtgatgtcttcatcatagtatgaagtgttgaaaattaataacgagcctagtttaggaaaaagctgcttaaaactgtggctctaagagagtaatcataaaataccttagataaaattgcactatggaattttcattgagtatgtttaaattattggcttgtctactaatacacatctgcttcaaaatgaacatatttcataaaattrgcatcaattttaatgacgctcctggtatggaacctcagatataccctattggagacaatcctttgatcataaattctccccaactataaatcattttatgtctttatc

SEQ ID NO: 5692 - DNA, 4448 bp, Homo sapiens
gccccggggcgctctcagcaggatggccaacaccttccctccatccctacaccccgccgccccctggcccgtggccgcgctcggctcccgcactgctcactccaccccctacatcccagcccgctgccagagccggggagagggcgggggccgcgtgggcgaggccgtgaacagcggctgtcacgtgggccgcccaggccaataggggtgaggctttgggtcgagctcagtcctcccccggcgcctccgactggcagtgggactcagcgggcgtggaggtcgcggctgagcgagcgagccctgggcgagtgaattgtggctgtgggttgacggtggagacaccccccggagggaggcggagggaagggaggcgaggcctgcacctgcatgcttcccgcctcccactccccagcgcccccggaccgtgcagttctctgcaggaccaggccawggagctcgaagtccggcgggtccgayaggcgttcctgtccggccggtcgcgacctctgcggtttcggctgcagcagcyggaggccctgcggaggatggtgcaggagcgcgagaaggatatcctgacggccwtcgccgccgacctgtgcaagagtgaattcaatgtgtacagtcaggaagtcattactgtccttggggaaattgattttatgcttgagaatcttcctgaatrggttactgctaaaccagttaagaagaacgtgctcaccatgctggatgaggcctatattcagccacagcctctgggagtggtgckgataatcggagcttggaattaccycttcgttctcaccattcagccactgataggagccatcgctgcaggaaatgctgtgattataaagccttctgaactgagtgaaaatacagccaagatcttggcaaagcttctccctcagtatttagaccaggatctctatattgttattaatggtggtgttgaggaaaccacggagctcctgaagcagcgatttgaccacattttctatabggsaaacactgcggttggcaaaattgtcatggaagctgctgccaagcatctgacccctgtgactcttgaactgggagggaaaagtccatgttatattgataaagattgtgacctggacattgtttgsagaygcataacctggggaaaatacatgaattgtggccaaacctgcattgcacccractatattctctgtgaagcatccctccaaaatcaaattgtatggaagattaaggaaacagtgaasgaattttatggagaaaatataaaagagtctcctgattatgaaaggatcatcaatcttcgtcattttaagaggatactaagtttgcttgaaggacaaaagatagcttttggtggggagactgatgaggccacacgctacatagccycaacagtacttaccgatgttgatcctaaaaccaaggtgatscaagaagaaatttttggaccaattcttccaatagtgcctgtgaaaaatgtagatgaggccataaatttcataaatgaacgtgaaaagcctctggctctttatgtattttygcataaccataagctcatcaaacggatgattgatgagacatccagtggaggtgtcacaggcartgacgtcattatgcacttcacgctcaactctttcccatttggaggagtgggttccagtgggatgggagcttatcacggaaaacatagttttgatacttyttctcatcagcrtycctgttkattaaaaagtttaaagagagaaggtgctaacaaactcagatatcctcccaacagccagtcaraggtggattggggraaattttttctcttgaaacggttcaacaaagaaaaactcggtctcctgttgctcactttcctgggtattgtagccgctgtgcttgtcaaggcwgaatattactgaagaatgatcctgttcaacctcctagtgcctctactgaattattcctcttttaaatggttaatgaaccaataatttttaaatcataccaaaaatagtaagaaaatatgcaaacactctgtgatcaaacttaaaagtcattgccattcatcattaataaaagttgccatttcaactacgtcccaacattccctaatagggtattcagggaacctgtcttaaattgtgcttatctaaatcttggaactttgagctaggggaggagaatgtattagactaaatacaaactgcggggttgtaagggagtctcagaacctcactgaatccttcactccagttaatggcactgctcacttcctgcctctgctgccaccatcactgtgtgaagctttcaagagcttggtacttcccagggctaccggcagtcctctgtagtccagagaggtgagattagatcttcttggttccctgtgaggtttcaggcactaaaactctatgtggggaagggaggggttactcctcctccaatgggactcaaggacttgacctccaggagtaggcccctggtcagaagtgccatctcaccagtggtcttcattcttcctcattcattctttatcatcctgtgttctgtttagttgcaacaatctcttgtgactaatgtcactcaaagcatcttgtaaatcctagggcttcctggaagttagttgccaaagtcatgcaagcatcacctgtcattcttgtgttggagttatagaattctacatcttataaaacctaactggcatttaaaaaatactgtggccgggcgtggtggctcatgcctgtaatcccagcactttgggaggccgaggtgggaggattgcttgagtccaggaatttgagaccagcctggacaacacagtgagacctcatctctatcaaaaaataaaaattagctagatgtggtggcatgagcctgtgttcccagctgcttaggaggctgaagcaggaggattgattgagcctgcgaggccaaggctgcagcaggctgtgattgcaccactgcacttcagcttgggcaacagagcaagaccctgtctccgaaacaaataaaaaatactgtaataaaagtacttataaacatactaatcctctttcaggaccctaaagttgcaggttagtaggtcttcaaggacaaatctgtaagtttcttatttctgtagtgcaagtaaaatttcactttttgaaactatagagagatccctttctgattagcctacagaacttaaagtgagggaaccatttcctctcacagacaaagaggcctgggatattaggactttggggtttgagagcatcatggggcagacagatggtggatggtctggacaagaagcgagtaagccactgcggttggtcatactgaagggaattgatggcaagaggatcccctgagcaagtcagaagttactctcatcagtcgttcatggtcacaacctgaggtactctgctgagtgggcaaggctgaagaagaggcctgtggaatgcagcattacctgctggacagagcagggcaggcagttctatgccttgkagctcctgactgcagggactctgtccccacactcaraaagactcagctcactcaatgagagaatgtgatttactttatagaacgtataatcaactttgttgaataatttgttctattaaggctgtctaaagtatgtgatgtcttcatcatagtatgaagtgttgaaaattaataacgagcctagtttaggaaaaagctgcttaaaactgtggctctaagagagtaatcataaaataccttagataaaattgcactatggaattttcattgagtatgtttaaattattggcttgtctactaatacacatctgcttcaaaatgaacatatttcataaaattrgcatcaattttaatgacgctcctggtatggaacctcagatataccctattggagacaatcctttgatcataaattctccccaactataaatcattttatgtctttatcatagatggtatttgtcaactttttttttctcattttaaaattcttagctgagaagattttctcaaactttatgttctgctgtgtgtgttgggggtggtggttrgtagctatagtaaataggtttttccagtggcatcctcctacccccagttgctgatctagaacaagtgtttctgtaagcatatttgtagaacactaatcccgcaagattttacacaaaaaaatggtcctgccaccagtcctgtataccactggcttgtaaagcacatcagcaaactaaaggacccaggtcatttggaacctctgaagtgctagtgtgtgcagctcccagacttccttgaccgcggagccgtttaccttaatacctgttaaccatggaccacacttgggcaaacagtggcatagagtctggaattgcttccatgatgactttgctgtgctctgttcctacttgttttgtgcccttatttatatcatgtcactactagaagaaaaagttcagtaagaacaagtatttctc

SEQ ID NO: 5693 - DNA, 1730 bp, Homo sapiens
cttgtcacgcaaacttcctgggcaggaactccaagggctcaatggacgggaagcagggtccttaaatacgtcccctcttggctcttgccgttccaggagccccagttaccgggagaggctgtgtcaaaggcgccatgagcaagatcagcgaggccgtgaagcgcgcccgcgccgccttcagctcgggcaggacccgtccgctgcagttccggatccagcagctggaggcgctgcagcgcctgatccaggagcaggagcagsagctggtgggcgcrctggccgcagacctgcacaagaatgaatggaacgcctactatgaggargtggtgtacgtcctagaggagatcgagtacatgatccagaagctccctgagtgggccgcggatgagccygtggagaagacgccccagactcagcaggacgagctctacatccactcggagccactgggcgtggtcctcgtcattggcacctggaactaccccttcaacctcaccatccagcccatggtgggcgccatcgctgcagggaackcagtggtcctcaagccctcggagctgagtgagaacatggcgagcctgctggctaccatcatcccccagtacctggacaaggatctgtacccagtaatcaatgggggtgtccctgagaccacggagctgctcaaggagaggttcgaccatatcctgtacacgggcagcacgggggtggggaagatcatcatgacrgctgctgccaagcacctgacccctgtcacgctggagctgggagggaagagtccctgctacgtggacaagaactgtgacctggacgtggcctgccgacgcatcgcctgggggaaattcatgaacagtggccagacctgcgtggccccwgactacatcctctgtgacccctcgatccagaaccaaattgtggagaagctcaagaagtcactgaaagagttctacggggaagatgctaagaaatcccgggactatggaagaatcattagtgcccggcacttccagagggtgatgggcctgattgagggccagaaggtggcttwtgggggcaccgrggatgccgccactcgctacatagcccccaccatcctcacggacgtggacccccagtccscggtgatgcaagaggagatcttcgggcctgtgctgcccatcgtgtgcgtgcgcagcctggaggaggccatccagttcatcaaccagcgtgagaagcccctggccctctacatgttctccagcaacgacaaggtgattaagaagatgattgcagagacatccagtggtggggtggcggccaacgatgtcatcgtccacatcaccttgcactctctgcccttcgggggcgtggggaacagcggcatgggatcctaycatggcaagaagagcttcgagactttctctcaccgccgctcttgcctggtgaggcctctgatgaatgatgaaggcctgaaggtcagataccccccgagcccggccaagatgacccagcactgaggaggggttgctccgcctggcctggccatactgtgtcccatcggagtgcggaccacmctcactggctctcctggccctgggagaatygctcctgcagccccagcccagccccactcctctgctgacctgctgacctgtgcacaccccactcccacatgggcccaggcctcaccattccaagtctccacccctttctagaccaataaagagacraatacaattttctaactcagc

SEQ ID NO: 5694 - DNA, 1868 bp, Homo sapiens
accggagttagatgccagcgcagaagggacgtgagcccagccgaggtaccgctgaagaggaatcaattttgatgaggaaacaagctcagagggttgaaatgacttgtccaaggttacaggccagtggaggcttgaacccaggctctgaaaattggaaaaccaagaaggttttgatgttttgtgtgacgccacctgaattagaaaccaagatgaacataaccaaaggtggtctggtgttgttttcagcaaactcgaattcatcatgtatggagctatcaaagaaaattgcagagcggctaggggtggagatgggcaaagtgcaggtttaccaggaacctaacagagaaacragagtacaaattcaagagtctgtgaggggaaaagatgttttcatcatccaaactgtttcgaaggacgtgaacaccaccatcatggagctcctgatcatggtgtatgcatgtaagacctcttgtgccaagagcatcattggcgtgataccctactttccttacagcaagcagtgcaagatgagaaaaagaggctccattgtctctaaattgctggcttccatgatgtgcaaagctggtctaactcatcttattactatggatttacaccagaaggaaattcagggcttcttcaatattcctgttgacaatttaagagcatctcccttcttattacagtatattcaagaagagatcccagattacaggaatgcagtaatcgtggccaagtctccagcctcggcgaagagggcacagtcttttgctgagcgcctgcgcctgggaattgcagtgattcatggagaggcgcaggatgccgagtcggacttggtggatggacggcattccccacccatggtcagaagtgtggctgccatccaccccagcctggagatccccatgctgattcctaaagaaaagcccccaatcacggttgtgggtgatgttggaggaaggattgccatcatcgtggatgacatcattgatgatgttgacagctttcttgctgcagcagagaccctgaaggaaagaggtgcatataagatctttgtgatggcaactcatggcttgttgtcttctgacgccccccggcggattgaagagtctgccattgatgaggtggtggtcaccaatacaattccacatgaagtccagaagctccagtgccccaagattaaaactgtggatatcagcatgatcctttcagaggcgatccgtcggatccacaatggggagtccatgtcctaccttttcagaaacataggcttagatgactgagttttccttyaggaaaactcccgagggccaaactggaaacataagagtgactgctcggtgggatggatttcacaggaaccgtcatgcttgttcctccctctcccctgtaacctcacttcttattgwttcctaagaagatagaccaactttttatgtcggtttgggtgtttgtgagtttggggagcaatttttataaaagaaaaactttattctcctcttttgaaaaggtaagacctcgttttagttktaactgtttaaaaaataacacttggaataagatttgtaagctcacaaagccttcttccaaagttgcttgagccaagtgcttaaaaagttaataaaataaaatgatctgtatgatacctgcaattgaaaagccgaaaagattatactgtcaagtccagtaaatgacatttttagagatgcttttgtagacaagcatatggaatatgtgattgtatttattttctgcaactaaaaaaggaataaaaacttgtgtttgtgtgtttttctaaaactttgtgttttggcaatcgttttrtaactaaaataaaatgaaagctaaatctacacgctgtgaatgtt

SEQ ID NO: 5695 - DNA, 1998 bp, Homo sapiens
tgtgcatggagtcgccattttgctcctagagaggccgccaggagacccggcgctttcttccttctgcagctgaggctgcggcggggccggggctggggtcggggccaggtaggcgggcgggagccagtggcgagcggcagcgagggctggctggctccggcattgcggggcgcaggaggaattttgttgtcagagaataaaaggaggttgtccataattgactttaagcagcaatcagtaaaacattgagctcttcagctccgyctttcttgctctgaaaattggaaaaccaagaaggttttgatgttttgtgtgacgccacctgaattagaaaccaagatgaacataaccaaaggtggtctggtgttgttttcagcaaactcgaattcatcatgtatggagctatcaaagaaaattgcagagcggctaggggtggagatgggcaaagtgcaggtttaccaggaacctaacagagaaacragagtacaaattcaagagtctgtgaggggaaaagatgttttcatcatccaaactgtttcgaaggacgtgaacaccaccatcatggagctcctgatcatggtgtatgcatgtaagacctcttgtgccaagagcatcattggcgtgataccctactttccttacagcaagcagtgcaagatgagaaaaagaggctccattgtctctaaattgctggcttccatgatgtgcaaagctggtctaactcatcttattactatggatttacaccagaaggaaattcagggcttcttcaatattcctgttgacaatttaagagcatctcccttcttattacagtatattcaagaagagatcccagattacaggaatgcagtaatcgtggccaagtctccagcctcggcgaagagggcacagtcttttgctgagcgcctgcgcctgggaattgcagtgattcatggagaggcgcaggatgccgagtcggacttggtggatggacggcattccccacccatggtcagaagtgtggctgccatccaccccagcctggagatccccatgctgattcctaaagaaaagcccccaatcacggttgtgggtgatgttggaggaaggattgccatcatcgtggatgacatcattgatgatgttgacagctttcttgctgcagcagagaccctgaaggaaagaggtgcatataagatctttgtgatggcaactcatggcttgttgtcttctgacgccccccggcggattgaagagtctgccattgatgaggtggtggtcaccaatacaattccacatgaagtccagaagctccagtgccccaagattaaaactgtggatatcagcatgatcctttcagaggcgatccgtcggatccacaatggggagtccatgtcctaccttttcagaaacataggcttagatgactgagttttccttyaggaaaactcccgagggccaaactggaaacataagagtgactgctcggtgggatggatttcacaggaaccgtcatgcttgttcctccctctcccctgtaacctcacttcttattgwttcctaagaagatagaccaactttttatgtcggtttgggtgtttgtgagtttggggagcaatttttataaaagaaaaactttattctcctcttttgaaaaggtaagacctcgttttagttktaactgtttaaaaaataacacttggaataagatttgtaagctcacaaagccttcttccaaagttgcttgagccaagtgcttaaaaagttaataaaataaaatgatctgtatgatacctgcaattgaaaagccgaaaagattatactgtcaagtccagtaaatgacatttttagagatgcttttgtagacaagcatatggaatatgtgattgtatttattttctgcaactaaaaaaggaataaaaacttgtgtttgtgtgtttttctaaaactttgtgttttggcaatcgttttrtaactaaaataaaatgaaagctaaatctacacgctgtgaatgtt

SEQ ID NO: 5696 - DNA, 2064 bp, Homo sapiens
cgcccaccggcctcgcagtcaccgcggacgccaatcttgtgcatggagtcgccattttgctcctagagaggccgccaggagacccggcgctttcttccttctgcagctgaggctgcggcggggccggggctggggtcggggccaggggtcggcgggggcgggggacgggcgtccggtgcctgggctctctcctctccctgaggcgccgctggggagtcgaaccctgatgatgggacctgtggaggaattttgttgtcagagaataaaaggaggttgtccataattgactttaagcagcaatcagtaaaacattgagctcttcagctccgyctttcttgctctgaaaattggaaaaccaagaaggttttgatgttttgtgtgacgccacctgaattagaaaccaagatgaacataaccaaaggtggtctggtgttgttttcagcaaactcgaattcatcatgtatggagctatcaaagaaaattgcagagcggctaggggtggagatgggcaaagtgcaggtttaccaggaacctaacagagaaacragagtacaaattcaagagtctgtgaggggaaaagatgttttcatcatccaaactgtttcgaaggacgtgaacaccaccatcatggagctcctgatcatggtgtatgcatgtaagacctcttgtgccaagagcatcattggcgtgataccctactttccttacagcaagcagtgcaagatgagaaaaagaggctccattgtctctaaattgctggcttccatgatgtgcaaagctggtctaactcatcttattactatggatttacaccagaaggaaattcagggcttcttcaatattcctgttgacaatttaagagcatctcccttcttattacagtatattcaagaagagatcccagattacaggaatgcagtaatcgtggccaagtctccagcctcggcgaagagggcacagtcttttgctgagcgcctgcgcctgggaattgcagtgattcatggagaggcgcaggatgccgagtcggacttggtggatggacggcattccccacccatggtcagaagtgtggctgccatccaccccagcctggagatccccatgctgattcctaaagaaaagcccccaatcacggttgtgggtgatgttggaggaaggattgccatcatcgtggatgacatcattgatgatgttgacagctttcttgctgcagcagagaccctgaaggaaagaggtgcatataagatctttgtgatggcaactcatggcttgttgtcttctgacgccccccggcggattgaagagtctgccattgatgaggtggtggtcaccaatacaattccacatgaagtccagaagctccagtgccccaagattaaaactgtggatatcagcatgatcctttcagaggcgatccgtcggatccacaatggggagtccatgtcctaccttttcagaaacataggcttagatgactgagttttccttyaggaaaactcccgagggccaaactggaaacataagagtgactgctcggtgggatggatttcacaggaaccgtcatgcttgttcctccctctcccctgtaacctcacttcttattgwttcctaagaagatagaccaactttttatgtcggtttgggtgtttgtgagtttggggagcaatttttataaaagaaaaactttattctcctcttttgaaaaggtaagacctcgttttagttktaactgtttaaaaaataacacttggaataagatttgtaagctcacaaagccttcttccaaagttgcttgagccaagtgcttaaaaagttaataaaataaaatgatctgtatgatacctgcaattgaaaagccgaaaagattatactgtcaagtccagtaaatgacatttttagagatgcttttgtagacaagcatatggaatatgtgattgtatttattttctgcaactaaaaaaggaataaaaacttgtgtttgtgtgtttttctaaaactttgtgttttggcaatcgttttrtaactaaaataaaatgaaagctaaatctacacgctgtgaatgtt

SEQ ID NO: 5697 - DNA, 1978 bp, Homo sapiens
cgcccctccccgcccaccggcctcgcagtcaccgcggacgccaatcttgtgcatggagtcgccattttgctcctagagaggccgccaggagacccggcgctttcttccttctgcagctgaggctgcggcggggccggggctggggtcggggccaggaggaattttgttgtcagagaataaaaggaggttgtccataattgactttaagcagcaatcagtaaaacattgagctcttcagctccgyctttcttgctctgaaaattggaaaaccaagaaggttttgatgttttgtgtgacgccacctgaattagaaaccaagatgaacataaccaaaggtggtctggtgttgttttcagcaaactcgaattcatcatgtatggagctatcaaagaaaattgcagagcggctaggggtggagatgggcaaagtgcaggtttaccaggaacctaacagagaaacragagtacaaattcaagagtctgtgaggggaaaagatgttttcatcatccaaactgtttcgaaggacgtgaacaccaccatcatggagctcctgatcatggtgtatgcatgtaagacctcttgtgccaagagcatcattggcgtgataccctactttccttacagcaagcagtgcaagatgagaaaaagaggctccattgtctctaaattgctggcttccatgatgtgcaaagctggtctaactcatcttattactatggatttacaccagaaggaaattcagggcttcttcaatattcctgttgacaatttaagagcatctcccttcttattacagtatattcaagaagagatcccagattacaggaatgcagtaatcgtggccaagtctccagcctcggcgaagagggcacagtcttttgctgagcgcctgcgcctgggaattgcagtgattcatggagaggcgcaggatgccgagtcggacttggtggatggacggcattccccacccatggtcagaagtgtggctgccatccaccccagcctggagatccccatgctgattcctaaagaaaagcccccaatcacggttgtgggtgatgttggaggaaggattgccatcatcgtggatgacatcattgatgatgttgacagctttcttgctgcagcagagaccctgaaggaaagaggtgcatataagatctttgtgatggcaactcatggcttgttgtcttctgacgccccccggcggattgaagagtctgccattgatgaggtggtggtcaccaatacaattccacatgaagtccagaagctccagtgccccaagattaaaactgtggatatcagcatgatcctttcagaggcgatccgtcggatccacaatggggagtccatgtcctaccttttcagaaacataggcttagatgactgagttttccttyaggaaaactcccgagggccaaactggaaacataagagtgactgctcggtgggatggatttcacaggaaccgtcatgcttgttcctccctctcccctgtaacctcacttcttattgwttcctaagaagatagaccaactttttatgtcggtttgggtgtttgtgagtttggggagcaatttttataaaagaaaaactttattctcctcttttgaaaaggtaagacctcgttttagttktaactgtttaaaaaataacacttggaataagatttgtaagctcacaaagccttcttccaaagttgcttgagccaagtgcttaaaaagttaataaaataaaatgatctgtatgatacctgcaattgaaaagccgaaaagattatactgtcaagtccagtaaatgacatttttagagatgcttttgtagacaagcatatggaatatgtgattgtatttattttctgcaactaaaaaaggaataaaaacttgtgtttgtgtgtttttctaaaactttgtgttttggcaatcgttttrtaactaaaataaaatgaaagctaaatctacacgctgtgaatgtt

SEQ ID NO: 5698 - DNA, 1964 bp, Homo sapiens
accggagttagatgccagcgcagaagggacgtgagcccagccgaggtaccgctgaagaggaatcaattttgatgaggaaacaagctcagagggttgaaatgacttgtccaaggttacaggccagtggaggcttgaacccaggaggaattttgttgtcagagaataaaaggaggttgtccataattgactttaagcagcaatcagtaaaacattgagctcttcagctccgyctttcttgctctgaaaattggaaaaccaagaaggttttgatgttttgtgtgacgccacctgaattagaaaccaagatgaacataaccaaaggtggtctggtgttgttttcagcaaactcgaattcatcatgtatggagctatcaaagaaaattgcagagcggctaggggtggagatgggcaaagtgcaggtttaccaggaacctaacagagaaacragagtacaaattcaagagtctgtgaggggaaaagatgttttcatcatccaaactgtttcgaaggacgtgaacaccaccatcatggagctcctgatcatggtgtatgcatgtaagacctcttgtgccaagagcatcattggcgtgataccctactttccttacagcaagcagtgcaagatgagaaaaagaggctccattgtctctaaattgctggcttccatgatgtgcaaagctggtctaactcatcttattactatggatttacaccagaaggaaattcagggcttcttcaatattcctgttgacaatttaagagcatctcccttcttattacagtatattcaagaagagatcccagattacaggaatgcagtaatcgtggccaagtctccagcctcggcgaagagggcacagtcttttgctgagcgcctgcgcctgggaattgcagtgattcatggagaggcgcaggatgccgagtcggacttggtggatggacggcattccccacccatggtcagaagtgtggctgccatccaccccagcctggagatccccatgctgattcctaaagaaaagcccccaatcacggttgtgggtgatgttggaggaaggattgccatcatcgtggatgacatcattgatgatgttgacagctttcttgctgcagcagagaccctgaaggaaagaggtgcatataagatctttgtgatggcaactcatggcttgttgtcttctgacgccccccggcggattgaagagtctgccattgatgaggtggtggtcaccaatacaattccacatgaagtccagaagctccagtgccccaagattaaaactgtggatatcagcatgatcctttcagaggcgatccgtcggatccacaatggggagtccatgtcctaccttttcagaaacataggcttagatgactgagttttccttyaggaaaactcccgagggccaaactggaaacataagagtgactgctcggtgggatggatttcacaggaaccgtcatgcttgttcctccctctcccctgtaacctcacttcttattgwttcctaagaagatagaccaactttttatgtcggtttgggtgtttgtgagtttggggagcaatttttataaaagaaaaactttattctcctcttttgaaaaggtaagacctcgttttagttktaactgtttaaaaaataacacttggaataagatttgtaagctcacaaagccttcttccaaagttgcttgagccaagtgcttaaaaagttaataaaataaaatgatctgtatgatacctgcaattgaaaagccgaaaagattatactgtcaagtccagtaaatgacatttttagagatgcttttgtagacaagcatatggaatatgtgattgtatttattttctgcaactaaaaaaggaataaaaacttgtgtttgtgtgtttttctaaaactttgtgttttggcaatcgttttrtaactaaaataaaatgaaagctaaatctacacgctgtgaatgtt

SEQ ID NO: 5699 - DNA, 2003 bp, Homo sapiens
cgcccctccccgcccaccggcctcgcagtcaccgcggacgccaatcttgtgcatggagtcgccattttgctcctagagaggccgccaggagacccggcgctttcttccttctgcagctgaggctgcggcggggccggggctggggtcggggccaggaggaattttgttgtcagagaataaaaggaggttgtccataattgactttaagcagcaatcagtaaaacattgagctcttcagctccgyctttcttgctctgaaaattggaaaaccaagaaggttttgatgttttgtgtgacgccacctgaattagaaaccaagatgaacataaccaaaggtggtctggtgttgttttcagcaaactcgaattcatcatgtatggagctatcaaagaaaattgcagactttttccccctttctcttctctaggcggctaggggtggagatgggcaaagtgcaggtttaccaggaacctaacagagaaacragagtacaaattcaagagtctgtgaggggaaaagatgttttcatcatccaaactgtttcgaaggacgtgaacaccaccatcatggagctcctgatcatggtgtatgcatgtaagacctcttgtgccaagagcatcattggcgtgataccctactttccttacagcaagcagtgcaagatgagaaaaagaggctccattgtctctaaattgctggcttccatgatgtgcaaagctggtctaactcatcttattactatggatttacaccagaaggaaattcagggcttcttcaatattcctgttgacaatttaagagcatctcccttcttattacagtatattcaagaagagatcccagattacaggaatgcagtaatcgtggccaagtctccagcctcggcgaagagggcacagtcttttgctgagcgcctgcgcctgggaattgcagtgattcatggagaggcgcaggatgccgagtcggacttggtggatggacggcattccccacccatggtcagaagtgtggctgccatccaccccagcctggagatccccatgctgattcctaaagaaaagcccccaatcacggttgtgggtgatgttggaggaaggattgccatcatcgtggatgacatcattgatgatgttgacagctttcttgctgcagcagagaccctgaaggaaagaggtgcatataagatctttgtgatggcaactcatggcttgttgtcttctgacgccccccggcggattgaagagtctgccattgatgaggtggtggtcaccaatacaattccacatgaagtccagaagctccagtgccccaagattaaaactgtggatatcagcatgatcctttcagaggcgatccgtcggatccacaatggggagtccatgtcctaccttttcagaaacataggcttagatgactgagttttccttyaggaaaactcccgagggccaaactggaaacataagagtgactgctcggtgggatggatttcacaggaaccgtcatgcttgttcctccctctcccctgtaacctcacttcttattgwttcctaagaagatagaccaactttttatgtcggtttgggtgtttgtgagtttggggagcaatttttataaaagaaaaactttattctcctcttttgaaaaggtaagacctcgttttagttktaactgtttaaaaaataacacttggaataagatttgtaagctcacaaagccttcttccaaagttgcttgagccaagtgcttaaaaagttaataaaataaaatgatctgtatgatacctgcaattgaaaagccgaaaagattatactgtcaagtccagtaaatgacatttttagagatgcttttgtagacaagcatatggaatatgtgattgtatttattttctgcaactaaaaaaggaataaaaacttgtgtttgtgtgtttttctaaaactttgtgttttggcaatcgttttrtaactaaaataaaatgaaagctaaatctacacgctgtgaatgtt

SEQ ID NO: 5700 - DNA, 1809 bp, Homo sapiens
tgggggttgtgaccggagttagatgccagcgcagaagggacgtgagcccagccgaggtaccgctgaagaggaatcaattttggctctgaaaattggaaaaccaagaaggttttgatgttttgtgtgacgccacctgaattagaaaccaagatgaacataaccaaaggtggtctggtgttgttttcagcaaactcgaattcatcatgtatggagctatcaaagaaaattgcagagcggctaggggtggagatgggcaaagtgcaggtttaccaggaacctaacagagaaacragagtacaaattcaagagtctgtgaggggaaaagatgttttcatcatccaaactgtttcgaaggacgtgaacaccaccatcatggagctcctgatcatggtgtatgcatgtaagacctcttgtgccaagagcatcattggcgtgataccctactttccttacagcaagcagtgcaagatgagaaaaagaggctccattgtctctaaattgctggcttccatgatgtgcaaagctggtctaactcatcttattactatggatttacaccagaaggaaattcagggcttcttcaatattcctgttgacaatttaagagcatctcccttcttattacagtatattcaagaagagatcccagattacaggaatgcagtaatcgtggccaagtctccagcctcggcgaagagggcacagtcttttgctgagcgcctgcgcctgggaattgcagtgattcatggagaggcgcaggatgccgagtcggacttggtggatggacggcattccccacccatggtcagaagtgtggctgccatccaccccagcctggagatccccatgctgattcctaaagaaaagcccccaatcacggttgtgggtgatgttggaggaaggattgccatcatcgtggatgacatcattgatgatgttgacagctttcttgctgcagcagagaccctgaaggaaagaggtgcatataagatctttgtgatggcaactcatggcttgttgtcttctgacgccccccggcggattgaagagtctgccattgatgaggtggtggtcaccaatacaattccacatgaagtccagaagctccagtgccccaagattaaaactgtggatatcagcatgatcctttcagaggcgatccgtcggatccacaatggggagtccatgtcctaccttttcagaaacataggcttagatgactgagttttccttyaggaaaactcccgagggccaaactggaaacataagagtgactgctcggtgggatggatttcacaggaaccgtcatgcttgttcctccctctcccctgtaacctcacttcttattgwttcctaagaagatagaccaactttttatgtcggtttgggtgtttgtgagtttggggagcaatttttataaaagaaaaactttattctcctcttttgaaaaggtaagacctcgttttagttktaactgtttaaaaaataacacttggaataagatttgtaagctcacaaagccttcttccaaagttgcttgagccaagtgcttaaaaagttaataaaataaaatgatctgtatgatacctgcaattgaaaagccgaaaagattatactgtcaagtccagtaaatgacatttttagagatgcttttgtagacaagcatatggaatatgtgattgtatttattttctgcaactaaaaaaggaataaaaacttgtgtttgtgtgtttttctaaaactttgtgttttggcaatcgttttrtaactaaaataaaatgaaagctaaatctacacgctgtgaatgtt

SEQ ID NO: 5701 - DNA, 1823 bp, Homo sapiens
gaggaattttgttgtcagagaataaaaggaggttgtccataattgactttaagcagcaatcagtaaaacattgagctcttcagctccgyctttcttgctctgaaaattggaaaaccaagaaggttttgatgttttgtgtgacgccacctgaattagaaaccaagatgaacataaccaaaggtggtctggtgttgttttcagcaaactcgaattcatcatgtatggagctatcaaagaaaattgcagagcggctaggggtggagatgggcaaagtgcaggtttaccaggaacctaacagagaaacragagtacaaattcaagagtctgtgaggggaaaagatgttttcatcatccaaactgtttcgaaggacgtgaacaccaccatcatggagctcctgatcatggtgtatgcatgtaagacctcttgtgccaagagcatcattggcgtgataccctactttccttacagcaagcagtgcaagatgagaaaaagaggctccattgtctctaaattgctggcttccatgatgtgcaaagctggtctaactcatcttattactatggatttacaccagaaggaaattcagggcttcttcaatattcctgttgacaatttaagagcatctcccttcttattacagtatattcaagaagagatcccagattacaggaatgcagtaatcgtggccaagtctccagcctcggcgaagagggcacagtcttttgctgagcgcctgcgcctgggaattgcagtgattcatggagaggcgcaggatgccgagtcggacttggtggatggacggcattccccacccatggtcagaagtgtggctgccatccaccccagcctggagatccccatgctgattcctaaagaaaagcccccaatcacggttgtgggtgatgttggaggaaggattgccatcatcgtggatgacatcattgatgatgttgacagctttcttgctgcagcagagaccctgaaggaaagaggtgcatataagatctttgtgatggcaactcatggcttgttgtcttctgacgccccccggcggattgaagagtctgccattgatgaggtggtggtcaccaatacaattccacatgaagtccagaagctccagtgccccaagattaaaactgtggatatcagcatgatcctttcagaggcgatccgtcggatccacaatggggagtccatgtcctaccttttcagaaacataggcttagatgactgagttttccttyaggaaaactcccgagggccaaactggaaacataagagtgactgctcggtgggatggatttcacaggaaccgtcatgcttgttcctccctctcccctgtaacctcacttcttattgwttcctaagaagatagaccaactttttatgtcggtttgggtgtttgtgagtttggggagcaatttttataaaagaaaaactttattctcctcttttgaaaaggtaagacctcgttttagttktaactgtttaaaaaataacacttggaataagatttgtaagctcacaaagccttcttccaaagttgcttgagccaagtgcttaaaaagttaataaaataaaatgatctgtatgatacctgcaattgaaaagccgaaaagattatactgtcaagtccagtaaatgacatttttagagatgcttttgtagacaagcatatggaatatgtgattgtatttattttctgcaactaaaaaaggaataaaaacttgtgtttgtgtgtttttctaaaactttgtgttttggcaatcgttttrtaactaaaataaaatgaaagctaaatctacacgctgtgaatgtt

SEQ ID NO: 5702 - DNA, 2350 bp, Homo sapiens
caagggaaggggaggagaagaggggtggggaaggacattccacaggcttttttggcccctgccagagacagaagggggtcaaagagaaagggaaaggagcaagccaggaagccagacaacaacagcatcaaaacaaggctgtttctgtgtgtgaggaactttgcctgggagataaaattagacctagagctttctgacagggagtctgaagcgtgggacatggaccgttcactgggatggcaagggaattctgtccctgaggacaggactgaagctgggatcaagcgtttcctggaggacaccacggatgatggagaactgagcaagttcgtgaaggatttctcaggaaatgcgagctgccacccaccagaggctaagacctgggcatccaggccccaagtcccggagccaaggccccaggccccggacctctatgatgatgacctggagttcagacccccctcgcggccccagtcctctgacaaccagcagtacttctgtgccccagcccctctcagcccatctgccaggccccgcagcccatggggcaagcttgatccctatgattcctctgaggtagagcctccagccctgcctttgcctttcagtgggctgctgcaggaagaccgggggcagggagyagagtgtgtgtgtgtgtgtgtgtgtgtgtgtgtgtgtgtgtgtttgtgtgtgtgtgtatctgggacctatttcagtcctgtgtcagccctagctccaagatatctgcccccaagggcactggaaatttgcagtttcagcaagggcaggaggcccagctggtggcctcagatgggaactcacagaagtctggcactgcttttttaaggctggggcaaaggcctgaaagggagagaagattggcgctgggtgccggggcccctttggctcctcaccgtgatgcattctgccttcctgtctactaggatgacaaggagtatgtgggctttgcaaccctccccaaccaagtccaccgaaagtccgtgaagaaaggctttgactttaccctcatggtggcaggagagtctggcctgggcaaatccacacttgtcaatagcctcttcctcactgatctgtaccgggaccggaaacttcttggtgctgaagagaggatcatgcaaactgtggagatcactaagcatgcagtggacatagaagagaagggtgtgaggctgcggctcaccattgtggacacaccaggttttggggatgcagtcaacaacacagagtgctggaagcctgtggcagaatacattgatcagcagtttgagcagtatttccgagacgagagtggcctgaaccgaaagaacatccaagacaacagggtgcactgctgcctgtacttcatctcacccttcggccatgggctccggccattggatgttgaattcatgaaggccctgcatcagcgggtcaacatcgtgcctatcctggctaaggcagacacactgacacctcccgaagtggaccacaagaaacgcaaaatccgggaggagattgwgcattttggaatcaagatctatcaattcccagactgtgactctgatgaggatgaggacttcaaattgcaggaccaagccctaaaggaaagcatcccatttgcagtaattggcagcaacactgtagtagaggccagagggcgrcgagttcggggtcgactctacccctggggcatcgtggaagtggaaaacccagggcactgcgactttgtgaagctgaggacaatgctggtacgtacccacatgcaggacctgaaggatgtgacrcgggagacacattatgagaactaccgggcacagtgcatccagagcatgacccgcctggtggtgaaggaacggaatcgcaagtatgaccagaagccaggacaaagctggcagggggagatcccaagcctagccttgggtgagaccaagccctacttttgttcttctataggccctgggctcaatctaagcgggtgctggggtcctcctcgccttatcaacccttttctccctttagcaaactgactcgggaaagtggtaccgacttccccatccctgctgtcccaccagggacagatccagaaactgagaagcttatccgagagaaagatgaggagctgcggcggatgcaggagatgctacacaaaatacaaaaacagatgaaggagaactattaactggctttcagccctggatatttaaatctcctcctcttcttcctgtccatgccggcccctcccagcaccagctctgctcaggccccttcagctactgccacttcgccttacatccctgctgactgcccagagactcagaggaaataaagtttaataaatctgtaggtggct

SEQ ID NO: 5703 - DNA, 1828 bp, Homo sapiens
caagggaaggggaggagaagaggggtggggaaggacattccacaggcttttttggcccctgccagagacagaagggggtcaaagagaaagggaaaggagcaagccaggaagccagacaacaacagcatcaaaacaaggctgtttctgtgtgtgaggaactttgcctgggagataaaattagacctagagctttctgacagggagtctgaagcgtgggacatggaccgttcactgggatggcaagggaattctgtccctgaggacaggactgaagctgggatcaagcgtttcctggaggacaccacggatgatggagaactgagcaagttcgtgaaggatttctcaggaaatgcgagctgccacccaccagaggctaagacctgggcatccaggccccaagtcccggagccaaggccccaggccccggacctctatgatgatgacctggagttcagacccccctcgcggccccagtcctctgacaaccagcagtacttctgtgccccagcccctctcagcccatctgccaggccccgcagcccatggggcaagcttgatccctatgattcctctgaggatgacaaggagtatgtgggctttgcaaccctccccaaccaagtccaccgaaagtccgtgaagaaaggctttgactttaccctcatggtggcaggagagtctggcctgggcaaatccacacttgtcaatagcctcttcctcactgatctgtaccgggaccggaaacttcttggtgctgaagagaggatcatgcaaactgtggagatcactaagcatgcagtggacatagaagagaagggtgtgaggctgcggctcaccattgtggacacaccaggttttggggatgcagtcaacaacacagagtgctggaagcctgtggcagaatacattgatcagcagtttgagcagtatttccgagacgagagtggcctgaaccgaaagaacatccaagacaacagggtgcactgctgcctgtacttcatctcacccttcggccatgggctccggccattggatgttgaattcatgaaggccctgcatcagcgggtcaacatcgtgcctatcctggctaaggcagacacactgacacctcccgaagtggaccacaagaaacgcaaaatccgggaggagattgwgcattttggaatcaagatctatcaattcccagactgtgactctgatgaggatgaggacttcaaattgcaggaccaagccctaaaggaaagcatcccatttgcagtaattggcagcaacactgtagtagaggccagagggcgrcgagttcggggtcgactctacccctggggcatcgtggaagtggaaaacccagggcactgcgactttgtgaagctgaggacaatgctggtacgtacccacatgcaggacctgaaggatgtgacrcgggagacacattatgagaactaccgggcacagtgcatccagagcatgacccgcctggtggtgaaggaacggaatcgcaacaaactgactcgggaaagtggtaccgacttccccatccctgctgtcccaccagggacagatccagaaactgagaagcttatccgagagaaagatgaggagctgcggcggatgcaggagatgctacacaaaatacaaaaacagatgaaggagaactattaactggctttcagccctggatatttaaatctcctcctcttcttcctgtccatgccggcccctcccagcaccagctctgctcaggccccttcagctactgccacttcgccttacatccctgctgactgcccagagactcagaggaaataaagtttaataaatctgtaggtggctt

SEQ ID NO: 5704 - DNA, 1686 bp, Homo sapiens
ccgggcccctcccgcagcggtccgcactcggggaggcgggagggtgacggcggtgctgcgaggtcggcgcgcagctccgccgcgggtcgctcgggcgctgtccaggcggagccggccccgcccgggctgcagccatgatcaagcgtttcctggaggacaccacggatgatggagaactgagcaagttcgtgaaggatttctcaggaaatgcgagctgccacccaccagaggctaagacctgggcatccaggccccaagtcccggagccaaggccccaggccccggacctctatgatgatgacctggagttcagacccccctcgcggccccagtcctctgacaaccagcagtacttctgtgccccagcccctctcagcccatctgccaggccccgcagcccatggggcaagcttgatccctatgattcctctgaggatgacaaggagtatgtgggctttgcaaccctccccaaccaagtccaccgaaagtccgtgaagaaaggctttgactttaccctcatggtggcaggagagtctggcctgggcaaatccacacttgtcaatagcctcttcctcactgatctgtaccgggaccggaaacttcttggtgctgaagagaggatcatgcaaactgtggagatcactaagcatgcagtggacatagaagagaagggtgtgaggctgcggctcaccattgtggacacaccaggttttggggatgcagtcaacaacacagagtgctggaagcctgtggcagaatacattgatcagcagtttgagcagtatttccgagacgagagtggcctgaaccgaaagaacatccaagacaacagggtgcactgctgcctgtacttcatctcacccttcggccatgggctccggccattggatgttgaattcatgaaggccctgcatcagcgggtcaacatcgtgcctatcctggctaaggcagacacactgacacctcccgaagtggaccacaagaaacgcaaaatccgggaggagattgwgcattttggaatcaagatctatcaattcccagactgtgactctgatgaggatgaggacttcaaattgcaggaccaagccctaaaggaaagcatcccatttgcagtaattggcagcaacactgtagtagaggccagagggcgrcgagttcggggtcgactctacccctggggcatcgtggaagtggaaaacccagggcactgcgactttgtgaagctgaggacaatgctggtacgtacccacatgcaggacctgaaggatgtgacrcgggagacacattatgagaactaccgggcacagtgcatccagagcatgacccgcctggtggtgaaggaacggaatcgcaacaaactgactcgggaaagtggtaccgacttccccatccctgctgtcccaccagggacagatccagaaactgagaagcttatccgagagaaagatgaggagctgcggcggatgcaggagatgctacacaaaatacaaaaacagatgaaggagaactattaactggctttcagccctggatatttaaatctcctcctcttcttcctgtccatgccggcccctcccagcaccagctctgctcaggccccttcagctactgccacttcgccttacatccctgctgactgcccagagactcagaggaaataaagtttaataaatctgtaggtggctt

SEQ ID NO: 5705 - DNA, 1953 bp, Homo sapiens
ccgggcccctcccgcagcggtccgcactcggggaggcgggagggtgacggcggtgctgcgaggtcggcgcgcagctccgccgcgggtcgctcgggcgctgtccaggcggagccggccccgcccgggctgcagccatgatcaagcgtttcctggaggacaccacggatgatggagaactgagcaagttcgtgaaggatttctcaggaaatgcgagctgccacccaccagaggctaagacctgggcatccaggccccaagtcccggagccaaggccccaggccccggacctctatgatgatgacctggagttcagacccccctcgcggccccagtcctctgacaaccagcagtacttctgtgccccagcccctctcagcccatctgccaggccccgcagcccatggggcaagcttgatccctatgattcctctgaggatgacaaggagtatgtgggctttgcaaccctccccaaccaagtccaccgaaagtccgtgaagaaaggctttgactttaccctcatggtggcaggagagtctggcctgggcaaatccacacttgtcaatagcctcttcctcactgatctgtaccgggaccggaaacttcttggtgctgaagagaggatcatgcaaactgtggagatcactaagcatgcagtggacatagaagagaagggtgtgaggctgcggctcaccattgtggacacaccaggttttggggatgcagtcaacaacacagagtgctggaagcctgtggcagaatacattgatcagcagtttgagcagtatttccgagacgagagtggcctgaaccgaaagaacatccaagacaacagggtgcactgctgcctgtacttcatctcacccttcggccatgggtatggtccaagcctgaggctcctggcaccaccgggtgctgtcaagggaacaggccaagagcaccaggggcagggctgccactagcaggtggtcacaggttcctgttccccaggctccggccattggatgttgaattcatgaaggccctgcatcagcgggtcaacatcgtgcctatcctggctaaggcagacacactgacacctcccgaagtggaccacaagaaacgcaaaatccgggaggagattgwgcattttggaatcaagatctatcaattcccagactgtgactctgatgaggatgaggacttcaaattgcaggaccaagccctaaaggaaagcatcccatttgcagtaattggcagcaacactgtagtagaggccagagggcgrcgagttcggggtcgactctacccctggggcatcgtggaagtggaaaacccagggcactgcgactttgtgaagctgaggacaatgctggtacgtacccacatgcaggacctgaaggatgtgacrcgggagacacattatgagaactaccgggcacagtgcatccagagcatgacccgcctggtggtgaaggaacggaatcgcaagtatgaccagaagccaggacaaagctggcagggggagatcccaagcctagccttgggtgagaccaagccctacttttgttcttctataggccctgggctcaatctaagcgggtgctggggtcctcctcgccttatcaacccttttctccctttagcaaactgactcgggaaagtggtaccgacttccccatccctgctgtcccaccagggacagatccagaaactgagaagcttatccgagagaaagatgaggagctgcggcggatgcaggagatgctacacaaaatacaaaaacagatgaaggagaactattaactggctttcagccctggatatttaaatctcctcctcttcttcctgtccatgccggcccctcccagcaccagctctgctcaggccccttcagctactgccacttcgccttacatccctgctgactgcccagagactcagaggaaataaagtttaataaatctgtaggtggct

SEQ ID NO: 5706 - DNA, 1730 bp, Homo sapiens
ctcaagcccccgcggtgcttctggagctgagtaaaaaagagccaggtgtccagtgcagcccggggacgaggagctgaggctccccgctctgtcctgggtgactctgcatactctgcgcatccgggggtcgcgggctgcgaggccggcccccagctgggcaccccgacccacttcgcgccggcaccgctagcagctgagatcaagcgtttcctggaggacaccacggatgatggagaactgagcaagttcgtgaaggatttctcaggaaatgcgagctgccacccaccagaggctaagacctgggcatccaggccccaagtcccggagccaaggccccaggccccggacctctatgatgatgacctggagttcagacccccctcgcggccccagtcctctgacaaccagcagtacttctgtgccccagcccctctcagcccatctgccaggccccgcagcccatggggcaagcttgatccctatgattcctctgaggatgacaaggagtatgtgggctttgcaaccctccccaaccaagtccaccgaaagtccgtgaagaaaggctttgactttaccctcatggtggcaggagagtctggcctgggcaaatccacacttgtcaatagcctcttcctcactgatctgtaccgggaccggaaacttcttggtgctgaagagaggatcatgcaaactgtggagatcactaagcatgcagtggacatagaagagaagggtgtgaggctgcggctcaccattgtggacacaccaggttttggggatgcagtcaacaacacagagtgctggaagcctgtggcagaatacattgatcagcagtttgagcagtatttccgagacgagagtggcctgaaccgaaagaacatccaagacaacagggtgcactgctgcctgtacttcatctcacccttcggccatgggtatggtccaagcctgaggctcctggcaccaccgggtgctgtcaagggaacaggccaagagcaccaggggcagggctgccactagcaggtggtcacaggttcctgttccccaggctccggccattggatgttgaattcatgaaggccctgcatcagcgggtcaacatcgtgcctatcctggctaaggcagacacactgacacctcccgaagtggaccacaagaaacgcaaaatccgggaggagattgwgcattttggaatcaagatctatcaattcccagactgtgactctgatgaggatgaggacttcaaattgcaggaccaagccctaaaggaaagcatcccatttgcagtaattggcagcaacactgtagtagaggccagagggcgrcgagttcggggtcgactctacccctggggcatcgtggaagtggaaaacccagggcactgcgactttgtgaagctgaggacaatgctggtacgtacccacatgcaggacctgaaggatgtgacrcgggagacacattatgagaactaccgggcacagtgcatccagagcatgacccgcctggtggtgaaggaacggaatcgcaacaaactgactcgggaaagtggtaccgacttccccatccctgctgtcccaccagggacagatccagaaactgagaagcttatccgagagaaagatgaggagctgcggcggatgcaggagatgctactgccacttcgccttacatccctgctgactgcccagagactcagaggaaataaagtttaataaatctgtaggtggctt

SEQ ID NO: 5707 - DNA, 2179 bp, Homo sapiens
caagggaaggggaggagaagaggggtggggaaggacattccacaggcttttttggcccctgccagagacagaagggggtcaaagagaaagggaaaggagcaagccaggaagccagacaacaacagcatcaaaacaaggctgtttctgtgtgtgaggaactttgcctgggagataaaattagacctagagctttctgacagggagtctgaagcgtgggacatggaccgttcactgggatggcaagggaattctgtccctgaggacaggactgaagctgggatcaagcgtttcctggaggacaccacggatgatggagaactgagcaagttcgtgaaggatttctcaggaaatgcgagctgccacccaccagaggctaagacctgggcatccaggccccaagtcccggagccaaggccccaggccccggacctctatgatgatgacctggagttcagacccccctcgcggccccagtcctctgacaaccagcagtacttctgtgccccagcccctctcagcccatctgccaggccccgcagcccatggggcaagcttgatccctatgattcctctgaggtagagcctccagccctgcctttgcctttcagtgggctgctgcaggaagaccgggggcagggagyagagtgtgtgtgtgtgtgtgtgtgtgtgtgtgtgtgtgtgtgtttgtgtgtgtgtgtatctgggacctatttcagtcctgtgtcagccctagctccaagatatctgcccccaagggcactggaaatttgcagtttcagcaagggcaggaggcccagctggtggcctcagatgggaactcacagaagtctggcactgcttttttaaggctggggcaaaggcctgaaagggagagaagattggcgctgggtgccggggcccctttggctcctcaccgtgatgcattctgccttcctgtctactaggatgacaaggagtatgtgggctttgcaaccctccccaaccaagtccaccgaaagtccgtgaagaaaggctttgactttaccctcatggtggcaggagagtctggcctgggcaaatccacacttgtcaatagcctcttcctcactgatctgtaccgggaccggaaacttcttggtgctgaagagaggatcatgcaaactgtggagatcactaagcatgcagtggacatagaagagaagggtgtgaggctgcggctcaccattgtggacacaccaggttttggggatgcagtcaacaacacagagtgctggaagcctgtggcagaatacattgatcagcagtttgagcagtatttccgagacgagagtggcctgaaccgaaagaacatccaagacaacagggtgcactgctgcctgtacttcatctcacccttcggccatgggtatggtccaagcctgaggctcctggcaccaccgggtgctgtcaagggaacaggccaagagcaccaggggcagggctgccactagcaggtggtcacaggttcctgttccccaggctccggccattggatgttgaattcatgaaggccctgcatcagcgggtcaacatcgtgcctatcctggctaaggcagacacactgacacctcccgaagtggaccacaagaaacgcaaaatccgggaggagattgwgcattttggaatcaagatctatcaattcccagactgtgactctgatgaggatgaggacttcaaattgcaggaccaagccctaaaggaaagcatcccatttgcagtaattggcagcaacactgtagtagaggccagagggcgrcgagttcggggtcgactctacccctggggcatcgtggaagtggaaaacccagggcactgcgactttgtgaagctgaggacaatgctggtacgtacccacatgcaggacctgaaggatgtgacrcgggagacacattatgagaactaccgggcacagtgcatccagagcatgacccgcctggtggtgaaggaacggaatcgcaacaaactgactcgggaaagtggtaccgacttccccatccctgctgtcccaccagggacagatccagaaactgagaagcttatccgagagaaagatgaggagctgcggcggatgcaggagatgctactgccacttcgccttacatccctgctgactgcccagagactcagaggaaataaagtttaataaatctgtaggtggctt

SEQ ID NO: 5708 - DNA, 1758 bp, Homo sapiens
ccgggcccctcccgcagcggtccgcactcggggaggcgggagggtgacggcggtgctgcgaggtcggcgcgcagctccgccgcgggtcgctcgggcgctgtccaggcggagccggccccgcccgggctgcagccatggggccagtaccaacttcatttggaaaacgcagaggaggcccacaaacactgcctgcctcaccaggagggatgatcaagcgtttcctggaggacaccacggatgatggagaactgagcaagttcgtgaaggatttctcaggaaatgcgagctgccacccaccagaggctaagacctgggcatccaggccccaagtcccggagccaaggccccaggccccggacctctatgatgatgacctggagttcagacccccctcgcggccccagtcctctgacaaccagcagtacttctgtgccccagcccctctcagcccatctgccaggccccgcagcccatggggcaagcttgatccctatgattcctctgaggatgacaaggagtatgtgggctttgcaaccctccccaaccaagtccaccgaaagtccgtgaagaaaggctttgactttaccctcatggtggcaggagagtctggcctgggcaaatccacacttgtcaatagcctcttcctcactgatctgtaccgggaccggaaacttcttggtgctgaagagaggatcatgcaaactgtggagatcactaagcatgcagtggacatagaagagaagggtgtgaggctgcggctcaccattgtggacacaccaggttttggggatgcagtcaacaacacagagtgctggaagcctgtggcagaatacattgatcagcagtttgagcagtatttccgagacgagagtggcctgaaccgaaagaacatccaagacaacagggtgcactgctgcctgtacttcatctcacccttcggccatgggctccggccattggatgttgaattcatgaaggccctgcatcagcgggtcaacatcgtgcctatcctggctaaggcagacacactgacacctcccgaagtggaccacaagaaacgcaaaatccgggaggagattgwgcattttggaatcaagatctatcaattcccagactgtgactctgatgaggatgaggacttcaaattgcaggaccaagccctaaaggaaagcatcccatttgcagtaattggcagcaacactgtagtagaggccagagggcgrcgagttcggggtcgactctacccctggggcatcgtggaagtggaaaacccagggcactgcgactttgtgaagctgaggacaatgctggtacgtacccacatgcaggacctgaaggatgtgacrcgggagacacattatgagaactaccgggcacagtgcatccagagcatgacccgcctggtggtgaaggaacggaatcgcaacaaactgactcgggaaagtggtaccgacttccccatccctgctgtcccaccagggacagatccagaaactgagaagcttatccgagagaaagatgaggagctgcggcggatgcaggagatgctacacaaaatacaaaaacagatgaaggagaactattaactggctttcagccctggatatttaaatctcctcctcttcttcctgtccatgccggcccctcccagcaccagctctgctcaggccccttcagctactgccacttcgccttacatccctgctgactgcccagagactcagaggaaataaagtttaataaatctgtaggtggctt

SEQ ID NO: 5709 - DNA, 3357 bp, Homo sapiens
tgacaatatcaggtgagctgtggaggtggggtccttggaagctggatgacagcagctggcaaggggataagagagcagtgagcccctccctcaaggaggtctggctttatccayagacagggccctctgaggtggggctgaggtacaaagggggattgagcagcccaggagaagagagatgggggttcccttcttctcttctctcagatgcatggtggacttaggaccttgctgggctgggggtctcactgcagagatgaagctgcttctggccctagcaggsstcctggccattctggccacgccccagccctctgaaggtgctgctccagctktcctgggggaggtggacacctcgttggtgctgagctccatggaggaggccaagcagctggtggacaaggcctacaaggagcggcgggaaaggtggggcacgaggcactgcccagctctgggcaaggatgtcccaggcctttcasagaagcagcaggcagcagggagcttgaaggtgggagagggggactatggggacccatgtggactccctttctgtctgtctgtccctgtcatcaagcagcggcttcgcagcggctcagccagccccatggaactcctatcctacttcaagcagccggtggcagccaccaggacggcggtgagggccgctgactacctgcacgtggctctagacctgctggagaggaagctgcggtccctgtggcgaaggccattcaatgtcactgatgtgctgacgcccgcccagctgaatgtgttgtccaagtcaagcggctgcgcctaccaggacgtgggggtgacttgcccggagcaggacaaataccgcaccatcaccgggatgtgcaacaacagacgcagccccacgctgggggcctccaaccgtgcctttgtgcgctggctgccggcggagtatgaggacggcttctctcttccctacggctggacgcccggggtcaagcgcaacggcttcccggtggctctggctcgcgcggtctccaacgagatcgtgcgcttccccactgatcagctgactccggaccaggagcgctcactcaygttcatgcaatggggccagctgttggaccacgacctcgacttcacccctgagccggccgcccgggcctccttcgtcactggcgtcaactgcgagaccagctgcgttcagcagccgccctgcttcccgctcaagatcccgcccaatgacccccgcatcaagaaccaagccgactgcatcccgttcttccgctcctgcccggcttgccccgggagcaacatcaccatccgcaaccagatcaacgygctcacttccttcgtggacgccagcatggtgtacggcagcgaggagcccctggccaggaacctgcgcaacatgtccaaccagctggggctgctggccgtcaaccagcgcttccaagacaacggccgggccctgctgccctttgacaacctgcacgatgacccctgtctcctcaccaaccgctcagcgcgcatcccctgcttcctggcaggggacacccgttccagtgagatgcccgagctcacctccatgcacaccctcttacttcgggagcacaaccggctggccacagagctcaagagcctgaaccctaggtgggatggggagaggctctaccaggaagcccggaagatcgtgggggccatggtccagatcatcacttaycgggactacctgcccctggtgctggggccaacrgccatgaggaagtacctgcccacgtaccgttcctacaatgactcagtggacccacgcatcgccaacgtcttcaccaatgccttccgctacggccacaccctcatccaacccttcatgttccgcctggacaatcggtaccagcccatggaacccaacccccgtgtccccctcagcagggtcttttttgcctcctggagggtcgtgctggaaggtggcattgaccccatcctccggggcctcatggccacccctgccaagctgaatcgtcagaaccaaattgcagtggatgagatcygggagcgattgtttgagcaggtcatgaggattgggctggacctgcctgctctgaacatgcagcgcagcagggaccacggcctcccaggatacaatgcctggaggcgcttctgtgggctcccgcagcctgaaactgtgggccagctgggcacggtgctgaggaacctgaaattggcgaggaaactgatggagcagtatggcacgcccaacaacatcgacatctggatgggcggcgtgtccgagcctctgaagcgcaaaggccgcgtgggcccactcctcgcctgcatcatcggtacccagttcaggaagctccgggatggtgatcggttttggtgggagaacgagggtgtgttcagcatgcagcagcgacaggccctggcccagatctcattgccccggatcatctgcgacaacacaggcatcaccacygtgtctaagaacaacrtcttcatgtccaactcatatccccgggactttgtcaactgcagtacacttcctgcattgaacctggcttcctggagggaagcctcctagaggccaggtaagggggtgcagcagtgaggggtatatctgggctggccagttggaaccacggagatctccttgccctagatgagcccagccctgttctgggtgcagctgagaaaatgagtgactagacgttcatttgtgtgctcatgtatgtgcgaagtatataaattggcttttcatgcgtgtgtgttgtctgaacatggggagtgtttcatgggttatgtgtatgtgccatttatgtgagtgtgtgtttgtgctgatgagaatactgagtatgtggaaggcagcagagcggactggtgaggagcacagctcaggaactagactgcctgggttccaatcctggctctgtggcttgctagctatgtgaccttgagcaaattaccctccttaaacaagagttttcttccttgtaaattacatctgtcatggtttcttggagggcccacttgtatcctctggttcttcatttattgagcacctactacatgcaaggcactgtactaggcgtgagaagcatatagaggcaagaaagagataccaagatgccatctgtgtcctggttagcagagctggaccagtggtgccttggagggataagccagctgcagctgggctgtgtggttgacttatgggcccagccagccaggctcaggccatggctcccctttttcttcctcaccctgatttcttgcttattcactgaagttctcctgaagaggaactgggcctgttgccctttctgtaccatttatttgctcccaatgtttatgataataaaggcaccgctgatggggacctcc

SEQ ID NO: 5710 - DNA, 3312 bp, Homo sapiens
tgacaatatcaggtgagctgtggaggtggggtccttggaagctggatgacagcagctggcaaggggataagagagcagtgagcccctccctcaaggaggtctggctttatccayagacagggccctctgaggtggggctgaggtacaaagggggattgagcagcccaggagaagagagatgggggttcccttcttctcttctctcagatgcatggtggacttaggaccttgctgggctgggggtctcactgcagagatgaagctgcttctggccctagcaggsstcctggccattctggccacgccccagccctctgaaggtgctgctccagctktcctgggggaggtggacacctcgttggtgctgagctccatggaggaggccaagcagctggtggacaaggcctacaaggagcggcgggaaagcatcaagcagcggcttcgcagcggctcagccagccccatggaactcctatcctacttcaagcagccggtggcagccaccaggacggcggtgagggccgctgactacctgcacgtggctctagacctgctggagaggaagctgcggtccctgtggcgaaggccattcaatgtcactgatgtgctgacgcccgcccagctgaatgtgttgtccaagtcaagcggctgcgcctaccaggacgtgggggtgacttgcccggagcaggacaaataccgcaccatcaccgggatgtgcaacaacaggtgcggctggctgggggtggctgcaggaaccgggctcagagaggcgtcccggacgccacaagcctcccggtgtcagcgccctgtcctcccctgcagacgcagccccacgctgggggcctccaaccgtgcctttgtgcgctggctgccggcggagtatgaggacggcttctctcttccctacggctggacgcccggggtcaagcgcaacggcttcccggtggctctggctcgcgcggtctccaacgagatcgtgcgcttccccactgatcagctgactccggaccaggagcgctcactcaygttcatgcaatggggccagctgttggaccacgacctcgacttcacccctgagccggccgcccgggcctccttcgtcactggcgtcaactgcgagaccagctgcgttcagcagccgccctgcttcccgctcaagatcccgcccaatgacccccgcatcaagaaccaagccgactgcatcccgttcttccgctcctgcccggcttgccccgggagcaacatcaccatccgcaaccagatcaacgygctcacttccttcgtggacgccagcatggtgtacggcagcgaggagcccctggccaggaacctgcgcaacatgtccaaccagctggggctgctggccgtcaaccagcgcttccaagacaacggccgggccctgctgccctttgacaacctgcacgatgacccctgtctcctcaccaaccgctcagcgcgcatcccctgcttcctggcaggggacacccgttccagtgagatgcccgagctcacctccatgcacaccctcttacttcgggagcacaaccggctggccacagagctcaagagcctgaaccctaggtgggatggggagaggctctaccaggaagcccggaagatcgtgggggccatggtccagatcatcacttaycgggactacctgcccctggtgctggggccaacrgccatgaggaagtacctgcccacgtaccgttcctacaatgactcagtggacccacgcatcgccaacgtcttcaccaatgccttccgctacggccacaccctcatccaacccttcatgttccgcctggacaatcggtaccagcccatggaacccaacccccgtgtccccctcagcagggtcttttttgcctcctggagggtcgtgctggaaggtggcattgaccccatcctccggggcctcatggccacccctgccaagctgaatcgtcagaaccaaattgcagtggatgagatcygggagcgattgtttgagcaggtcatgaggattgggctggacctgcctgctctgaacatgcagcgcagcagggaccacggcctcccaggatacaatgcctggaggcgcttctgtgggctcccgcagcctgaaactgtgggccagctgggcacggtgctgaggaacctgaaattggcgaggaaactgatggagcagtatggcacgcccaacaacatcgacatctggatgggcggcgtgtccgagcctctgaagcgcaaaggccgcgtgggcccactcctcgcctgcatcatcggtacccagttcaggaagctccgggatggtgatcggttttggtgggagaacgagggtgtgttcagcatgcagcagcgacaggccctggcccagatctcattgccccggatcatctgcgacaacacaggcatcaccacygtgtctaagaacaacrtcttcatgtccaactcatatccccgggactttgtcaactgcagtacacttcctgcattgaacctggcttcctggagggaagcctcctagaggccaggtaagggggtgcagcagtgaggggtatatctgggctggccagttggaaccacggagatctccttgccctagatgagcccagccctgttctgggtgcagctgagaaaatgagtgactagacgttcatttgtgtgctcatgtatgtgcgaagtatataaattggcttttcatgcgtgtgtgttgtctgaacatggggagtgtttcatgggttatgtgtatgtgccatttatgtgagtgtgtgtttgtgctgatgagaatactgagtatgtggaaggcagcagagcggactggtgaggagcacagctcaggaactagactgcctgggttccaatcctggctctgtggcttgctagctatgtgaccttgagcaaattaccctccttaaacaagagttttcttccttgtaaattacatctgtcatggtttcttggagggcccacttgtatcctctggttcttcatttattgagcacctactacatgcaaggcactgtactaggcgtgagaagcatatagaggcaagaaagagataccaagatgccatctgtgtcctggttagcagagctggaccagtggtgccttggagggataagccagctgcagctgggctgtgtggttgacttatgggcccagccagccaggctcaggccatggctcccctttttcttcctcaccctgatttcttgcttattcactgaagttctcctgaagaggaactgggcctgttgccctttctgtaccatttatttgctcccaatgtttatgataataaaggcaccgctgatggggacctcc

SEQ ID NO: 5711 - DNA, 3226 bp, Homo sapiens
tgacaatatcaggtgagctgtggaggtggggtccttggaagctggatgacagcagctggcaaggggataagagagcagtgagcccctccctcaaggaggtctggctttatccayagacagggccctctgaggtggggctgaggtacaaagggggattgagcagcccaggagaagagagatgggggttcccttcttctcttctctcagatgcatggtggacttaggaccttgctgggctgggggtctcactgcagagatgaagctgcttctggccctagcaggsstcctggccattctggccacgccccagccctctgaaggtgctgctccagctktcctgggggaggtggacacctcgttggtgctgagctccatggaggaggccaagcagctggtggacaaggcctacaaggagcggcgggaaagcatcaagcagcggcttcgcagcggctcagccagccccatggaactcctatcctacttcaagcagccggtggcagccaccaggacggcggtgagggccgctgactacctgcacgtggctctagacctgctggagaggaagctgcggtccctgtggcgaaggccattcaatgtcactgatgtgctgacgcccgcccagctgaatgtgttgtccaagtcaagcggctgcgcctaccaggacgtgggggtgacttgcccggagcaggacaaataccgcaccatcaccgggatgtgcaacaacagacgcagccccacgctgggggcctccaaccgtgcctttgtgcgctggctgccggcggagtatgaggacggcttctctcttccctacggctggacgcccggggtcaagcgcaacggcttcccggtggctctggctcgcgcggtctccaacgagatcgtgcgcttccccactgatcagctgactccggaccaggagcgctcactcaygttcatgcaatggggccagctgttggaccacgacctcgacttcacccctgagccggccgcccgggcctccttcgtcactggcgtcaactgcgagaccagctgcgttcagcagccgccctgcttcccgctcaagatcccgcccaatgacccccgcatcaagaaccaagccgactgcatcccgttcttccgctcctgcccggcttgccccgggagcaacatcaccatccgcaaccagatcaacgygctcacttccttcgtggacgccagcatggtgtacggcagcgaggagcccctggccaggaacctgcgcaacatgtccaaccagctggggctgctggccgtcaaccagcgcttccaagacaacggccgggccctgctgccctttgacaacctgcacgatgacccctgtctcctcaccaaccgctcagcgcgcatcccctgcttcctggcaggggacacccgttccagtgagatgcccgagctcacctccatgcacaccctcttacttcgggagcacaaccggctggccacagagctcaagagcctgaaccctaggtgggatggggagaggctctaccaggaagcccggaagatcgtgggggccatggtccagatcatcacttaycgggactacctgcccctggtgctggggccaacrgccatgaggaagtacctgcccacgtaccgttcctacaatgactcagtggacccacgcatcgccaacgtcttcaccaatgccttccgctacggccacaccctcatccaacccttcatgttccgcctggacaatcggtaccagcccatggaacccaacccccgtgtccccctcagcagggtcttttttgcctcctggagggtcgtgctggaaggtggcattgaccccatcctccggggcctcatggccacccctgccaagctgaatcgtcagaaccaaattgcagtggatgagatcygggagcgattgtttgagcaggtcatgaggattgggctggacctgcctgctctgaacatgcagcgcagcagggaccacggcctcccaggatacaatgcctggaggcgcttctgtgggctcccgcagcctgaaactgtgggccagctgggcacggtgctgaggaacctgaaattggcgaggaaactgatggagcagtatggcacgcccaacaacatcgacatctggatgggcggcgtgtccgagcctctgaagcgcaaaggccgcgtgggcccactcctcgcctgcatcatcggtacccagttcaggaagctccgggatggtgatcggtgaggaggggttttggtgggagaacgagggtgtgttcagcatgcagcagcgacaggccctggcccagatctcattgccccggatcatctgcgacaacacaggcatcaccacygtgtctaagaacaacrtcttcatgtccaactcatatccccgggactttgtcaactgcagtacacttcctgcattgaacctggcttcctggagggaagcctcctagaggccaggtaagggggtgcagcagtgaggggtatatctgggctggccagttggaaccacggagatctccttgccctagatgagcccagccctgttctgggtgcagctgagaaaatgagtgactagacgttcatttgtgtgctcatgtatgtgcgaagtatataaattggcttttcatgcgtgtgtgttgtctgaacatggggagtgtttcatgggttatgtgtatgtgccatttatgtgagtgtgtgtttgtgctgatgagaatactgagtatgtggaaggcagcagagcggactggtgaggagcacagctcaggaactagactgcctgggttccaatcctggctctgtggcttgctagctatgtgaccttgagcaaattaccctccttaaacaagagttttcttccttgtaaattacatctgtcatggtttcttggagggcccacttgtatcctctggttcttcatttattgagcacctactacatgcaaggcactgtactaggcgtgagaagcatatagaggcaagaaagagataccaagatgccatctgtgtcctggttagcagagctggaccagtggtgccttggagggataagccagctgcagctgggctgtgtggttgacttatgggcccagccagccaggctcaggccatggctcccctttttcttcctcaccctgatttcttgcttattcactgaagttctcctgaagaggaactgggcctgttgccctttctgtaccatttatttgctcccaatgtttatgataataaaggcaccgctgatggggacctcc

SEQ ID NO: 5712 - DNA, 3216 bp, Homo sapiens
tgacaatatcaggtgagctgtggaggtggggtccttggaagctggatgacagcagctggcaaggggataagagagcagtgagcccctccctcaaggaggtctggctttatccayagacagggccctctgaggtggggctgaggtacaaagggggattgagcagcccaggagaagagagatgggggttcccttcttctcttctctcagatgcatggtggacttaggaccttgctgggctgggggtctcactgcagagatgaagctgcttctggccctagcaggsstcctggccattctggccacgccccagccctctgaaggtgctgctccagctktcctgggggaggtggacacctcgttggtgctgagctccatggaggaggccaagcagctggtggacaaggcctacaaggagcggcgggaaagcatcaagcagcggcttcgcagcggctcagccagccccatggaactcctatcctacttcaagcagccggtggcagccaccaggacggcggtgagggccgctgactacctgcacgtggctctagacctgctggagaggaagctgcggtccctgtggcgaaggccattcaatgtcactgatgtgctgacgcccgcccagctgaatgtgttgtccaagtcaagcggctgcgcctaccaggacgtgggggtgacttgcccggagcaggacaaataccgcaccatcaccgggatgtgcaacaacagacgcagccccacgctgggggcctccaaccgtgcctttgtgcgctggctgccggcggagtatgaggacggcttctctcttccctacggctggacgcccggggtcaagcgcaacggcttcccggtggctctggctcgcgcggtctccaacgagatcgtgcgcttccccactgatcagctgactccggaccaggagcgctcactcaygttcatgcaatggggccagctgttggaccacgacctcgacttcacccctgagccggccgcccgggcctccttcgtcactggcgtcaactgcgagaccagctgcgttcagcagccgccctgcttcccgctcaagatcccgcccaatgacccccgcatcaagaaccaagccgactgcatcccgttcttccgctcctgcccggcttgccccgggagcaacatcaccatccgcaaccagatcaacgygctcacttccttcgtggacgccagcatggtgtacggcagcgaggagcccctggccaggaacctgcgcaacatgtccaaccagctggggctgctggccgtcaaccagcgcttccaagacaacggccgggccctgctgccctttgacaacctgcacgatgacccctgtctcctcaccaaccgctcagcgcgcatcccctgcttcctggcaggggacacccgttccagtgagatgcccgagctcacctccatgcacaccctcttacttcgggagcacaaccggctggccacagagctcaagagcctgaaccctaggtgggatggggagaggctctaccaggaagcccggaagatcgtgggggccatggtccagatcatcacttaycgggactacctgcccctggtgctggggccaacrgccatgaggaagtacctgcccacgtaccgttcctacaatgactcagtggacccacgcatcgccaacgtcttcaccaatgccttccgctacggccacaccctcatccaacccttcatgttccgcctggacaatcggtaccagcccatggaacccaacccccgtgtccccctcagcagggtcttttttgcctcctggagggtcgtgctggaaggtggcattgaccccatcctccggggcctcatggccacccctgccaagctgaatcgtcagaaccaaattgcagtggatgagatcygggagcgattgtttgagcaggtcatgaggattgggctggacctgcctgctctgaacatgcagcgcagcagggaccacggcctcccaggatacaatgcctggaggcgcttctgtgggctcccgcagcctgaaactgtgggccagctgggcacggtgctgaggaacctgaaattggcgaggaaactgatggagcagtatggcacgcccaacaacatcgacatctggatgggcggcgtgtccgagcctctgaagcgcaaaggccgcgtgggcccactcctcgcctgcatcatcggtacccagttcaggaagctccgggatggtgatcggttttggtgggagaacgagggtgtgttcagcatgcagcagcgacaggccctggcccagatctcattgccccggatcatctgcgacaacacaggcatcaccacygtgtctaagaacaacrtcttcatgtccaactcatatccccgggactttgtcaactgcagtacacttcctgcattgaacctggcttcctggagggaagcctcctagaggccaggtaagggggtgcagcagtgaggggtatatctgggctggccagttggaaccacggagatctccttgccctagatgagcccagccctgttctgggtgcagctgagaaaatgagtgactagacgttcatttgtgtgctcatgtatgtgcgaagtatataaattggcttttcatgcgtgtgtgttgtctgaacatggggagtgtttcatgggttatgtgtatgtgccatttatgtgagtgtgtgtttgtgctgatgagaatactgagtatgtggaaggcagcagagcggactggtgaggagcacagctcaggaactagactgcctgggttccaatcctggctctgtggcttgctagctatgtgaccttgagcaaattaccctccttaaacaagagttttcttccttgtaaattacatctgtcatggtttcttggagggcccacttgtatcctctggttcttcatttattgagcacctactacatgcaaggcactgtactaggcgtgagaagcatatagaggcaagaaagagataccaagatgccatctgtgtcctggttagcagagctggaccagtggtgccttggagggataagccagctgcagctgggctgtgtggttgacttatgggcccagccagccaggctcaggccatggctcccctttttcttcctcaccctgatttcttgcttattcactgaagttctcctgaagaggaactgggcctgttgccctttctgtaccatttatttgctcccaatgtttatgataataaaggcaccgctgatggggacctcc

SEQ ID NO: 5713 - DNA, 2720 bp, Homo sapiens
  misc_feature (1)...(2720): n = A,T,C or G
gagaagagctggaggaagtgagaggtcrgctgggggycctcaaagtgagaggggagcagaggatcctcccgtgcaggctgtggatgtcactcacttcccagctggtgaagcctcgctgcagagatgcatctgctcccagccctggcaggggtcctggccacactcgtcctcgcccagccctgtgagggcactgacccagcctcccctggggcagtggagacctcgrtcctgcgagactgcatngcagaggccaagttgctggtggatgctgcctacaattggacccagaagagcatcaagcagcggcttcgcagcggttcagccagccccatggacctcctgtcctacttcaaacaaccggtagcagccaccaggacagttgttcgggccgcagattatatgcatgtggcyttggggctgcttgaagagaagttacaaccccagcggtccggacccttcaatgtcactgatgtgctaacagaaccacasctgcggctgctgtcccaggccagtggctgtgctctccgggaccaggccgagcgctgcagcgacaagtaccgcaccatcactggacggtgcaacaacaagaggagacccttgctaggggcctccaaccaggctctggctcgctggctgcccgccgagtatgaggatgggctgtcgctccccttcggctggacccccagcaggaggcgcaatggcttccttctccctcttgtccgggctgtctccaaccagattgtgcgcttccccaatgagagactgacctcygaccgtggccgrgccctcatgttcatgcagtggggccagttcattgaccatgacctggacttctccccggagtcccyggccagagtggccttcactgcaggcgttgactgtgagaggacctgmgcccagctgcccccctgctttcccatcaagatcccacccaatgacccccgcatcaagaaccagcgtgactgcatccctttcttccrctcggcaccmtcatgccyccaaaacaagaacagagtccgcaaccagatcaacgcgctcacctcctttgtggacgccagcatggtgtatggcagtgaggtctccctctcgctgcggctccgcaaccggaccaactacctggggctgctggccatcaaccagcgctttcaagacaacggccgggccctgctgcccttygacaacctgcaygatgacccctgtctcctcaccaaccgctcggcgcgcatcccctgcttcctggcaggtgacacccgatcaacggaaacccccaaactggcagccatgcacaccctctttatgcgagagcacaaccggctggccaccgagctgagacgcctgaatccccggtggaatggagacaaactgtacaatgaggctcggaagatcatgggggccatggtccagatcatcacctaycgagactttctgcccctggttctgggcaaggcccgggccaggagaaccctggggcactacagggggtactgctccaatrtggacccacgggtggccaatgtcttcaccctggccttccgctttggccacacaatgctccagcccttcatgttccgcttggacagtcagtaccgggcctccgcacccaactcgcawgtcccacttagctctgccttctttgccagctggcggatcgtgtatgaagggggcatcgaccccatcctccggggcctcatggccacccctgccaagctgaaccgtcaggatgccatgttagtggatgagctccgggaccggctgtttcggcaagtgaggaggattgggctggacctggcagctctcaacatgcaacgaagccgggaccacggccttccagggtacwatgcttggaggcgcttctgtgggctctcccagccccggaatttggcacagcttagccgggtgctgaaaaaccaggacttggcaaggaagttcctgaatttgtatggaacacctgacaacattgacatctggattggggccatcgctgagcctcttttgccgggggctcgagtggggcctcttctggcttgtctgttcgagaaccagttcagaagagcccgagacggaracaggttctggtggcagaaacgaggtgttttcaccaaaagacagcgcaaggccctgagcagaatttccttgtctcgaattatatgtgacaataccggtatcaccacggtttcaagggacatcttcagagccaacatctaccctcggggctttgtgaactgcagccgtatccccaggttgaacctatcagcctggcgagggacatgaggcttctgcaggagtctatcccaagtctccaacttttggagacaaggggaaggggaggaccatgaggctgccttgtctccctggagcaagtgcaggctgctgacgcttctgctggctacagctcagagctgggttccccagccaggagtgaaggctgggggctcctatcagcaatggaccttcccgccttgggagcctcttaggtattaggctatgaatcagcgccacgtgcaaaggcttgggagccaagccatgtggtcttgcaccccaggcaagaaaagtcagctggagggtttacagcactttctactgtttcccagccctccctcccctccctcaccatgactaagagaccactcggtcctagcctccagacaccccacaatactcctctgagcctgaggccaggcagcatgctctgcttctaccaataaagcactgctaagggc

SEQ ID NO: 5714 - DNA, 2282 bp, Homo sapiens
  misc_feature (1)...(2282): n = A,T,C or G
gagaagagctggaggaagtgagaggtcrgctgggggycctcaaagtgagaggggagcagaggatcctcccgtgcaggctgtggatgtcactcacttcccagctggtgaagcctcgctgcagagatgcatctgctcccagccctggcaggggtcctggccacactcgtcctcgcccagccctgtgagggcactgacccagcctcccctggggcagtggagacctcgrtcctgcgagactgcatngcagaggccaagttgctggtggatgctgcctacaattggacccagaagagcatcaagcagcggcttcgcagcggttcagccagccccatggacctcctgtcctacttcaaacaaccggtagcagccaccaggacagttgttcgggccgcagattatatgcatgtggcyttggggctgcttgaagagaagttacaaccccagcggtccggacccttcaatgtcactgatgtgctaacagaaccacasctgcggctgctgtcccaggccagtggctgtgctctccgggaccaggccgagcgctgcagcgacaagtaccgcaccatcactggacggtgcaacaacaagaggagacccttgctaggggcctccaaccaggctctggctcgctggctgcccgccgagtatgaggatgggctgtcgctccccttcggctggacccccagcaggaggcgcaatggcttccttctccctcttgtccgggctgtctccaaccagattgtgcgcttccccaatgagagactgacctcygaccgtggccgrgccctcatgttcatgcagtggggccagttcattgaccatgacctggacttctccccggagtcccyggccagagtggccttcactgcaggcgttgactgtgagaggacctgmgcccagctgcccccctgctttcccatcaagatcccacccaatgacccccgcatcaagaaccagcgtgactgcatccctttcttccrctcggcaccmtcatgccyccaaaacaagaacagagtccgcaaccagatcaacgcgctcacctcctttgtggacgccagcatggtgtatggcagtgaggtctccctctcgctgcggctccgcaaccggaccaactacctggggctgctggccatcaaccagcgctttcaagacaacggccgggccctgctgcccttygacaacctgcaygatgacccctgtctcctcaccaaccgctcggcgcgcatcccctgcttcctggcaggtgacacccgatcaacggaaacccccaaactggcagccatgcacaccctctttatgcgagagcacaaccggctggccaccgagctgagacgcctgaatccccggtggaatggagacaaactgtacaatgaggctcggaagatcatgggggccatggtccagatcatcacctaycgagactttctgcccctggttctgggcaaggcccgggccaggagaaccctggggcactacagggggtactgctccaatrtggacccacgggtggccaatgtcttcaccctggccttccgctttggccacacaatgctccagcccttcatgttccgcttggacagtcagtaccgggcctccgcacccaactcgcawgtcccacttagctctgccttctttgccagctggcggatcgtgtatgaagggggcatcgaccccatcctccggggcctcatggccacccctgccaagctgaaccgtcaggatgccatgttagtggatgagctccgggaccggctgtttcggcaagtgaggaggattgggctggacctggcagctctcaacatgcaacgaagccgggaccacggccttccagggtacwatgcttggaggcgcttctgtgggctctcccagccccggaatttggcacagcttagccgggtgctgaaaaaccaggacttggcaaggaagttcctgaatttgtatggaacacctgacaacattgacatctggattggggccatcgctgagcctcttttgccgggggctcgagtggggcctcttctggcttgtctgttcgagaaccagttcagaagagcccgagacggaracaggttctggtggcagaaacgaggtgttttcaccaaaagacagcgcaaggccctgagcagaatttccttgtctcgaattatatgtgacaataccggtatcaccacggtttcaagggacatcttcagagccaacatctaccctcggggctttgtgaactgcagccgtatccccaggttgaacctatcagcctggcgagggacatgaggcttctgcag

SEQ ID NO: 5715 - DNA, 2664 bp, Homo sapiens
  misc_feature (1)...(2664): n = A,T,C or G
gagaagagctggaggaagtgagaggtcrgctgggggycctcaaagtgagaggggagcagaggatcctcccgtgcaggctgtggatgtcactcacttcccagctggtgaagcctcgctgcagagatgcatctgctcccagccctggcaggggtcctggccacactcgtcctcgcccagccctgtgagggcactgacccagcctcccctggggcagtggagacctcgrtcctgcgagactgcatngcagaggccaagttgctggtggatgctgcctacaattggacccagaagagcatcaagcagcggcttcgcagcggttcagccagccccatggacctcctgtcctacttcaaacaaccggtagcagccaccaggacagttgttcgggccgcagattatatgcatgtggcyttggggctgcttgaagagaagttacaaccccagcggtccggacccttcaatgtcactgatgtgctaacagaaccacasctgcggctgctgtcccaggccagtggctgtgctctccgggaccaggccgagcgctgcagcgacaagtaccgcaccatcactggacggtgcaacaacaagaggagacccttgctaggggcctccaaccaggctctggctcgctggctgcccgccgagtatgaggatgggctgtcgctccccttcggctggacccccagcaggaggcgcaatggcttccttctccctcttgtccgggctgtctccaaccagattgtgcgcttccccaatgagagactgacctcygaccgtggccgrgccctcatgttcatgcagtggggccagttcattgaccatgacctggacttctccccggagtcccyggccagagtggccttcactgcaggcgttgactgtgagaggacctgmgcccagctgcccccctgctttcccatcaagatcccacccaatgacccccgcatcaagaaccagcgtgactgcatccctttcttccrctcggcaccmtcatgccyccaaaacaagaacagagtccgcaaccagatcaacgcgctcacctcctttgtggacgccagcatggtgtatggcagtgaggtctccctctcgctgcggctccgcaaccggaccaactacctggggctgctggccatcaaccagcgctttcaagacaacggccgggccctgctgcccttygacaacctgcaygatgacccctgtctcctcaccaaccgctcggcgcgcatcccctgcttcctggcaggtgacacccgatcaacggaaacccccaaactggcagccatgcacaccctctttatgcgagagcacaaccggctggccaccgagctgagacgcctgaatccccggtggaatggagacaaactgtacaatgaggctcggaagatcatgggggccatggtccagatcatcacctaycgagactttctgcccctggttctgggcaaggcccgggccaggagaaccctggggcactacagggggtactgctccaatrtggacccacgggtggccaatgtcttcaccctggccttccgctttggccacacaatgctccagcccttcatgttccgcttggacagtcagtaccgggcctccgcacccaactcgcawgtcccacttagctctgccttctttgccagctggcggatcgtgtatgaaggtgaccaggttttccagggggcaaatggggggggcatcgaccccatcctccggggcctcatggccacccctgccaagctgaaccgtcaggatgccatgttagtggatgagctccgggaccggctgtttcggcaagtgaggaggattgggctggacctggcagctctcaacatgcaacgaagccgggaccacggccttccagggtacwatgcttggaggcgcttctgtgggctctcccagccccggaatttggcacagcttagccgggtgctgaaaaaccaggacttggcaaggaagttcctgaatttgtatggaacacctgacaacattgacatctggattggggccatcgctgagcctcttttgccgggggctcgagtggggcctcttctggcttgtctgttcgagaaccagttcagaagagcccgagacggaracaggtaagtgaccctatcataaaagacatcagcaccagaggcagagcagaaaaacactagcatttcaagactaaacattgaagaacactgctctttttagtatcatttcttccaagttcacaggatctgaaatcaggaggctcctctctgaaaagctgggtcaaaggaagagagacactgacccaggcaaggcccatattgcctgagctggagtcatcttaaacccagaggttgcctggcagcctcactattctgggttggtggatcccagaaaacatgggcagaaagggctaaatctggtttccctccaatacatttgtgatttaagacctgacggccgggcgcggtggctcacgcctgtaatcccagcactttgggaggccgaggcgggcggatcacgaggtcaggagatcgagaccatcccggctaaaacggtgaaaccccgtctctactaaaaatacaaaaaattagccgggcgtagtggcgggcgcctgtagtcccggctacttgggaggctgaggcaggagaatggcgtgaacccgggaggcggagcttgcagtgagccgag

SEQ ID NO: 5716 - DNA, 5804 bp, Homo sapiens
ggagacggaagtggcaagagcgcggcctcagagggtcgggcggacgccgcctggtgagaagcaggcagccagtacccttgccacggtagaatgggtgaggaggggccccccagcctggagtacatccaagccaaggatctgttcccccccaaggaactagtgaaggaggaagagaatcttcaggtccccttcacagtgctgcagggtgagggagtagagttcctgggccgggcagccgatgccctcattgccatctctaactaccggctgcatatcaaattcaaggactctgtcatcaacgtccccctccggatgattgacagtgtggagagccgtgatatgttccagttgcacatttcctgcaaggactccaaagtggtgaggtgccacttctccacttttaagcagtgccaagagtggctctcacggctaagccgagccacagcaagacctgccaagcctgaagacctctttgcctttgcctaccatgcctggtgcctggggctgaccgaggaggaccagcacactcacctatgtcagccaggtgagcacatacgttgtcgacaggaggcggagcttgcaaggatgggctttgacstgcagaacgtctggagagtctcacacatcaacagcaactacaaattgtgccccagttacccccagaagctgctggttcctgtgtggatcactgacaaagagctggagaacgtggcttccttccgctcctggaagcggattcccgtggttgtgtatagacacttgcgcaatggggctgccatcgcccgctgcagccagccagagatcagctggtggggctggcgcaatgctgatgatgagtacctggtcacgtccattgctaaagcctgtgccctggacccggggacaagggccactgggggctccctcagcaccgggaataatgataccrgcraggcgtgtgatgctgactttgattcttctctgactgcgtgctctggagkggagagcacagcagctcctcaaaagctgctgatcctggatgcgcgatcctacacggcagcagtggccaaccgggccaagggtggaggctgtgaatgtgaagagtactatcccaactgtgaggtcgtgttcatgggaatggccaacatccatgccatccggaacagctttcagtacctccgggctgtgtgtagccagatgccggatcctagcaactggttgtcggcactggagagtaccaaatggctgcagcacttgtcggtgatgctaaaagcagctgtgctggtggctaatacagtagaccgggaaggccggcctgtgctggtacactgctcagatggctgggaccgcacaccgcagatcgtagccctggccaaaatattactggacccatattacaggacgttggagggcttccaagtgttagtggagtctgactggctggattttgggcacaagtttggagatcgctgtggccaccaagagaatgtggaggaccaaaacgaacaatgccctgtgttcctccagtggcttgattctgttcatcagttgcttaagcagttcccctgcctgtttgaatttaatgaagcattcctggtaaaactggtgcaacacacatactcctgcctctacggcaccttcctggccaacaacccctgtgagcgagagaagcgcaacatctacaagcggacctgctctgtgtgggcgctccttcgagctggcaataaaaactttcataacttcctctacacacccagctcagacatggtcctgcatcctgtttgtcatgtccgggccctgcacctctggacagctgtttatctgccagcatcatctccatgcacacttggggaagaaaacatggatctttacctttccccagtggcccagagccaggagttctctggccgctctctggacagattacctaaaaccagatccatggatgatcttctttctgcctgtgacacaarcagccccctgactcgtacatccagtgaccctaacctgaataaccactgtcaggaggtcagggtaggcctggagccctggcacagcaatcctgagggatcagagacaagctttgtggactctggggtaggagggcctcagcaaactgtaggagaagtgggtcttcctcctcctctgcccagcagccagaaagactacttgagcaataaacctttcaagagtcacaaaagctgttctccaagttacaaactgcttaataccgcagtgcctcgggaaatgaagagcaacacctctgatcctgagatcaaagtcctagaagagactaagggaccagctccagacccttctgcccaggatgagctgggtaggactttagatggcataggggagccacctgaacattgtcctgaaacagaagctgtcagtgcactctccaaggtcatttctaacaagtgtgatggagtttgtaattttcctgagtcttcccagaactctcctacaggtacgccccaacaggcccagccagactccatgctaggtgtgccctccaagtgtgttcttgatcacagcctcagcaccgtttgcaacccaccgagtgctgcctgccaaactcctctagacccaagcactgacttcctcaaccaagatccctcagggtctgtggcaagtatctcccaccaggaacaactgagttctgtgccggatctgacccatggggaggaagacattggtaaaagaggaaataataggaatgggcagttattggaaaatcctcgctttgggaaaatgccattggaattggtccggaagccaatttctcagagccagatcagtgagttctcttttctagggtccaactgggacagcttccaagggatggtgacttcattcccaagtggggaggccacccctcggcggctgctttcctatggctgttgtagcaagaggccaaacagtaagcagatgcgggccacagggccctgctttgggggccagtgggctcagagagaaggtgtgaagtcacctgtctgttctagtcattccaatggacattgtactggcccaggaggaaagaaccagatgtggttgtccagtcatccaaagcaagtctctagcacaaagcccgttccactgaactgcccttctccagtgcctcctctgtatttggrtgatgatggactcccctttcccacggatgtgatccagcataggttacggcaaatcgaagcagggtacaaacaagaggtggagcagctacgtcgacaggtgcgtgagcttcagatgaggctggacatycgtcactgctgtgcccctccagcagagccccccatggactatgaggatgattttacatgtttgaaggagtcagatggcagtgatactgaggattttggctctgatcacagtgaagactgcctttcagaagcaagctgggaacctgttgataagaaagagactgaggtgactcgctgggttccagaccatatggcatcacactgctataactgtgactgtgaattctggttggccaaacgaagacaccattgcagaaattgtgggaatgtattttgtgctggatgctgccacctgaagctgcccattcctgatcagcaactctatgacccagttctcgtctgtaactcatgttacgaacacattcaagtctctcgtgccagggaactcatgagccaacagctgaagaaacccattgctacagcttccagttgaatgccggggagaaacctgtccaattttagcaggtttgaagggaggatcttcttcagttgtagtttggaaggttccttggtgtggctcatgaaatcacagagctcagagataccatcttgagaaatcctccttggtatcatgaaactggagcagaggaattgcaatttagcaggaggtcctctactggtgataccctcaccttggggtaatggtcctaacccagacccagggtctggaagcttaatgttgagttggtgactccagcctctttctcctggaggtcacaagatgatgattgcgtagatgttgcctggtgcaaagtgccccaaacagcaatagaaagrcatatgtataaccaaactccaagtgataaccagacccatctctcctccaccttgacaaaagcagattatagtatacaaggtaggaattcctgtcctatttgagatgaactatatcctgtacctctgtgctctgtgtctgcatgaaggctcagcctttagaggcactccttctagttgcattagtactgtctttctgtggagtttggtttgaagactggctcagcaagtggaggtttcaatgtatttttcagttggctcatcagccagcattggtgaatattcagtttaggggaacagttctagggagtgagacatttttgggagcagaggaaaactctgctgatgttcggtcctggcaaacattgagttattttgagctgtgaaggcagtcgtctctgttacacagtggcagctcttgagttatgcactgtgaagaatgagaagggaaaagcaaaaattatccttgtgaaatatctgctgattgtgccctactctttgcacctgacttttcctagttgtcctggtgctaacacaggagctacaccttgatcctctcctggcatgaaaataaaacaaaggttttcgttgttgttgttccattgcccatttcccccatgttgtctttcccttggctgatgcctcctctgggtcacattgcttcttatcctgaacacttgacaccttgagggtagaatttagcgtttggtttttacctcctagcatatgctgtttggtatgtgagggtttcagtacaaatgctgctgtctatttctgtgcacttaacaatggaacccaaacagaagagaataaagccttgataccaaaattgggaaagaacatgtgtccatttggaccaaacgttgttggtttttaaaaaattttattttgtttttttgtttttgtttttgttttttttcatcttaatatgtaccagtggcacttaaccaaaagatacagtgatatagccatgtactgtgggtgggacagatacagtctccttggcctataatgaaaccactaggactttatacagttttccttaatttgttgacatataaatggtaaattatatttaggcttatcctgttttgaaatgatggtagtcatctttcttactgctactttcatgttgctttctagaaaacagcatttcattccaaaataactaggatctgcatttagaacaagaatcattatttgtcctgaccttttcagtcctacagagacgcatctgtggttcttttgtacttgccatagatgtaacctaaaaagttttggcatatttaggtcagcctagcggaactttttttttcatttaaatggagctgaataatggagattttgtgtctgcaaaattcctgagatcattgaaaaagtaacaagctgttccttgtttctgatacataaaattattttaagcattttatcaatcattaaaatttactgccagttgtgagtggctttttaattaacttgtctttcattgcacttcactctgcctgttttcaaggggagtaagattggtaacatttggggagactgtatctgtctacttagcgtggctgttttgagggactgtcccatcagtgaacaaactgcatggccttggagagagactctgggctcttggctcagatgtkttmatcaaatactcctttcagagctgttgtgggtgtaagtgacatgatgtggccaaaaatccaaactgtgcagttgcgttgtgacaaacatgcaatgtgctgtaaaaattcratacagtttaaataaaatctctatattagt

SEQ ID NO: 5717 - DNA, 5747 bp, Homo sapiens
ggagacggaagtggcaagagcgcggcctcagagggtcgggcggacgccgcctggtgagaagcaggcagccagtacccttgccacggtagaatgggtgaggaggggccccccagcctggagtacatccaagccaaggatctgttcccccccaaggaactagtgaaggaggaagagaatcttcaggtccccttcacagtgctgcagggtgagggagtagagttcctgggccgggcagccgatgccctcattgccatctctaactaccggctgcatatcaaattcaaggactctgtcatcaacgtccccctccggatgattgacagtgtggagagccgtgatatgttccagttgcacatttcctgcaaggactccaaagtggtgaggtgccacttctccacttttaagcagtgccaagagtggctctcacggctaagccgagccacagcaagacctgccaagcctgaagacctctttgcctttgcctaccatgcctggtgcctggggctgaccgaggaggaccagcacactcacctatgtcagccaggtgagcacatacgttgtcgacaggaggcggagcttgcaaggatgggctttgacstgcagaacgtctggagagtctcacacatcaacagcaactacaaattgtgccccagttacccccagaagctgctggttcctgtgtggatcactgacaaagagctggagaacgtggcttccttccgctcctggaagcggattcccgtggttgtgtatagacacttgcgcaatggggctgccatcgcccgctgcagccagccagagatcagctggtggggctggcgcaatgctgatgatgagtacctggtcacgtccattgctaaagcctgtgccctggacccggggacaagggccactgggggctccctcagcaccgggaataatgataccrgcraggcgtgtgatgctgactttgattcttctctgactgcgtgctctggagkggagagcacagcagctcctcaaaagctgctgatcctggatgcgcgatcctacacggcagcagtggccaaccgggccaagggtggaggctgtgaatgtgaagagtactatcccaactgtgaggtcgtgttcatgggaatggccaacatccatgccatccggaacagctttcagtacctccgggctgtgtgtagccagatgccggatcctagcaactggttgtcggcactggagagtaccaaatggctgcagcacttgtcggtgatgctaaaagcagctgtgctggtggctaatacagtagaccgggaaggccggcctgtgctggtacactgctcagatggctgggaccgcacaccgcagatcgtagccctggccaaaatattactggacccatattacaggacgttggagggcttccaagtgttagtggagtctgactggctggattttgggcacaagtttggagatcgctgtggccaccaagagaatgtggaggaccaaaacgaacaatgccctgtgttcctccagtggcttgattctgttcatcagttgcttaagcagttcccctgcctgtttgaatttaatgaagcattcctggtaaaactggtgcaacacacatactcctgcctctacggcaccttcctggccaacaacccctgtgagcgagagaagcgcaacatctacaagcggacctgctctgtgtgggcgctccttcgagctggcaataaaaactttcataacttcctctacacacccagctcagacatggtcctgcatcctgtttgtcatgtccgggccctgcacctctggacagctgtttatctgccagcatcatctccatgcacacttggggaagaaaacatggatctttacctttccccagtggcccagagccaggagttctctggccgctctctggacagattacctaaaaccagatccatggatgatcttctttctgcctgtgacacaarcagccccctgactcgtacatccagtgaccctaacctgaataaccactgtcaggaggtcagggtaggcctggagccctggcacagcaatcctgagggatcagagacaagctttgtggactctggggtaggagggcctcagcaaactgtaggagaagtgggtcttcctcctcctctgcccagcagccagaaagactacttgagcaataaacctttcaagagtcacaaaagctgttctccaagttacaaactgcttaataccgcagtgcctcgggaaatgaagagcaacacctctgatcctgagatcaaagtcctagaagagactaagggaccagctccagacccttctgcccaggatgagctgggtaggactttagatggcataggggagccacctgaacattgtcctgaaacagaagctgtcagtgcactctccaaggtcatttctaacaagtgtgatggagtttgtaattttcctgagtcttcccagaactctcctacaggtacgccccaacaggcccagccagactccatgctaggtgtgccctccaagtgtgttcttgatcacagcctcagcaccgtttgcaacccaccgagtgctgcctgccaaactcctctagacccaagcactgacttcctcaaccaagatccctcagggtctgtggcaagtatctcccaccaggaacaactgagttctgtgccggatctgacccatggggaggaagacattggtaaaagaggaaataataggaatgggcagttattggaaaatcctcgctttgggaaaatgccattggaattggtccggaagccaatttctcagagccagatcagtgagttctcttttctagggtccaactgggacagcttccaagggatggtgacttcattcccaagtggggaggccacccctcggcggctgctttcctatggctgttgtagcaagaggccaaacagtaagcagatgcgggccacagggccctgctttgggggccagtgggctcagagagaaggtgtgaagtcacctgtctgttctagtcattccaatggacattgtactggcccaggaggaaagaaccagatgtggttgtccagtcatccaaagcaagtctctagcacaaagcccgttccactgaactgcccttctccagtgcctcctctgtatttggrtgatgatggactcccctttcccacggatgtgatccagcataggttacggcaaatcgaagcagggtacaaacaagaggtggagcagctacgtcgacaggtgcgtgagcttcagatgaggctggacatycgtcactgctgtgcccctccagcagagccccccatggactatgaggatgattttacatgtttgaaggagtcagatggcagtgatactgaggattttggctctgatcacagtgaagactgcctttcagaagcaagctgggaacctgttgataagaaagagactgaggtgactcgctgggttccagaccatatggcatcacactgctataactgtgactgtgaattctggttggccaaacgaagacaccattgcagaaattgtgggaatgtattttgtgctggatgctgccacctgaagctgcccattcctgatcagcaactctatgacccagttctcgtctgtaactcatgttacgaacacattcaagtctctcgtgccagggaactcatgagccaacagctgaagaaacccattgctacagcttccagttgaatgccggggagaaacctgtccaattttagcaggtttgaagggaggatcttcttcagttgtagtttggaaggttccttggtgtggctcatgaaatcacagagctcagagataccatcttgagaaatcctccttggtatcatgaaactggagcagaggaattgcaatttagcaggaggtcctctactggtgataccctcaccttggggtaatggtcctaacccagacccagggtctggaagcttaatgttgagttggtgactccagcctctttctcctggaggtcacaagatgatgattgcgtagatgttgcctggtgcaaagtgccccaaacagcaatagaaagrcatatgtataaccaaactccaagtgataaccagacccatctctcctccaccttgacaaaagcagattatagtatacaaggtaggaattcctgtcctatttgagatgaactatatcctgtacctctgtgctctgtgtctgcatgaaggctcagcctttagaggcactccttctagttgcattagtactgtctttctgtggagtttggtttgaagactggctcagcaagtggaggtttcaatgtatttttcagttggctcatcagccagcattggtgaatattcagtttaggggaacagttctagggagtgagacatttttgggagcagaggaaaactctgctgatgttcggtcctggcaaacattgagttattttgagctgtgaaggcagtcgtctctgttacacagtggcagctcttgagttatgcactgtgaagaatgagaagggaaaagcaaaaattatccttgtgaaatatctgctgattgtgccctactctttgcacctgacttttcctagttgtcctggtgctaacacaggagctacaccttgatcctctcctggcattctttcccttggctgatgcctcctctgggtcacattgcttcttatcctgaacacttgacaccttgagggtagaatttagcgtttggtttttacctcctagcatatgctgtttggtatgtgagggtttcagtacaaatgctgctgtctatttctgtgcacttaacaatggaacccaaacagaagagaataaagccttgataccaaaattgggaaagaacatgtgtccatttggaccaaacgttgttggtttttaaaaaattttattttgtttttttgtttttgtttttgttttttttcatcttaatatgtaccagtggcacttaaccaaaagatacagtgatatagccatgtactgtgggtgggacagatacagtctccttggcctataatgaaaccactaggactttatacagttttccttaatttgttgacatataaatggtaaattatatttaggcttatcctgttttgaaatgatggtagtcatctttcttactgctactttcatgttgctttctagaaaacagcatttcattccaaaataactaggatctgcatttagaacaagaatcattatttgtcctgaccttttcagtcctacagagacgcatctgtggttcttttgtacttgccatagatgtaacctaaaaagttttggcatatttaggtcagcctagcggaactttttttttcatttaaatggagctgaataatggagattttgtgtctgcaaaattcctgagatcattgaaaaagtaacaagctgttccttgtttctgatacataaaattattttaagcattttatcaatcattaaaatttactgccagttgtgagtggctttttaattaacttgtctttcattgcacttcactctgcctgttttcaaggggagtaagattggtaacatttggggagactgtatctgtctacttagcgtggctgttttgagggactgtcccatcagtgaacaaactgcatggccttggagagagactctgggctcttggctcagatgtkttmatcaaatactcctttcagagctgttgtgggtgtaagtgacatgatgtggccaaaaatccaaactgtgcagttgcgttgtgacaaacatgcaatgtgctgtaaaaattcratacagtttaaataaaatctctatattagt

SEQ ID NO: 5718 - DNA, 5711 bp, Homo sapiens
ggtgaggaggggccccccagcctggagtacatccaagccaaggatctgttcccccccaaggaactagtgaaggaggaagagaatcttcaggtccccttcacagtgctgcagggtgagggagtagagttcctgggccgggcagccgatgccctcattgccatctctaactaccggctgcatatcaaattcaaggactctgtcatcaacgtccccctccggatgattgacagtgtggagagccgtgatatgttccagttgcacatttcctgcaaggactccaaagtggtgaggtgccacttctccacttttaagcagtgccaagagtggctctcacggctaagccgagccacagcaagacctgccaagcctgaagacctctttgcctttgcctaccatgcctggtgcctggggctgaccgaggaggaccagcacactcacctatgtcagccaggtgagcacatacgttgtcgacaggaggcggagcttgcaaggatgggctttgacstgcagaacgtctggagagtctcacacatcaacagcaactacaaattgtgccccagttacccccagaagctgctggttcctgtgtggatcactgacaaagagctggagaacgtggcttccttccgctcctggaagcggattcccgtggttgtgtatagacacttgcgcaatggggctgccatcgcccgctgcagccagccagagatcagctggtggggctggcgcaatgctgatgatgagtacctggtcacgtccattgctaaagcctgtgccctggacccggggacaagggccactgggggctccctcagcaccgggaataatgataccrgcraggcgtgtgatgctgactttgattcttctctgactgcgtgctctggagkggagagcacagcagctcctcaaaagctgctgatcctggatgcgcgatcctacacggcagcagtggccaaccgggccaagggtggaggctgtgaatgtgaagagtactatcccaactgtgaggtcgtgttcatgggaatggccaacatccatgccatccggaacagctttcagtacctccgggctgtgtgtagccagatgccggatcctagcaactggttgtcggcactggagagtaccaaatggctgcagcacttgtcggtgatgctaaaagcagctgtgctggtggctaatacagtagaccgggaaggccggcctgtgctggtacactgctcagatggctgggaccgcacaccgcagatcgtagccctggccaaaatattactggacccatattacaggacgttggagggcttccaagtgttagtggagtctgactggctggattttgggcacaagtttggagatcgctgtggccaccaagagaatgtggaggaccaaaacgaacaatgccctgtgttcctccagtggcttgattctgttcatcagttgcttaagcagttcccctgcctgtttgaatttaatgaagcattcctggtaaaactggtgcaacacacatactcctgcctctacggcaccttcctggccaacaacccctgtgagcgagagaagcgcaacatctacaagcggacctgctctgtgtgggcgctccttcgagctggcaataaaaactttcataacttcctctacacacccagctcagacatggtcctgcatcctgtttgtcatgtccgggccctgcacctctggacagctgtttatctgccagcatcatctccatgcacacttggggaagaaaacatggatctttacctttccccagtggcccagagccaggagttctctggccgctctctggacagattacctaaaaccagatccatggatgatcttctttctgcctgtgacacaarcagccccctgactcgtacatccagtgaccctaacctgaataaccactgtcaggaggtcagggtaggcctggagccctggcacagcaatcctgagggatcagagacaagctttgtggactctggggtaggagggcctcagcaaactgtaggagaagtgggtcttcctcctcctctgcccagcagccagaaagactacttgagcaataaacctttcaagagtcacaaaagctgttctccaagttacaaactgcttaataccgcagtgcctcgggaaatgaagagcaacacctctgatcctgagatcaaagtcctagaagagactaagggaccagctccagacccttctgcccaggatgagctgggtaggactttagatggcataggggagccacctgaacattgtcctgaaacagaagctgtcagtgcactctccaaggtcatttctaacaagtgtgatggagtttgtaattttcctgagtcttcccagaactctcctacaggtacgccccaacaggcccagccagactccatgctaggtgtgccctccaagtgtgttcttgatcacagcctcagcaccgtttgcaacccaccgagtgctgcctgccaaactcctctagacccaagcactgacttcctcaaccaagatccctcagggtctgtggcaagtatctcccaccaggaacaactgagttctgtgccggatctgacccatggggaggaagacattggtaaaagaggaaataataggaatgggcagttattggaaaatcctcgctttgggaaaatgccattggaattggtccggaagccaatttctcagagccagatcagtgagttctcttttctagggtccaactgggacagcttccaagggatggtgacttcattcccaagtggggaggccacccctcggcggctgctttcctatggctgttgtagcaagaggccaaacagtaagcagatgcgggccacagggccctgctttgggggccagtgggctcagagagaaggtgtgaagtcacctgtctgttctagtcattccaatggacattgtactggcccaggaggaaagaaccagatgtggttgtccagtcatccaaagcaagtctctagcacaaagcccgttccactgaactgcccttctccagtgcctcctctgtatttggrtgatgatggactcccctttcccacggatgtgatccagcataggttacggcaaatcgaagcagggtacaaacaagaggtggagcagctacgtcgacaggtgcgtgagcttcagatgaggctggacatycgtcactgctgtgcccctccagcagagccccccatggactatgaggatgattttacatgtttgaaggagtcagatggcagtgatactgaggattttggctctgatcacagtgaagactgcctttcagaagcaagctgggaacctgttgataagaaagagactgaggtgactcgctgggttccagaccatatggcatcacactgctataactgtgactgtgaattctggttggccaaacgaagacaccattgcagaaattgtgggaatgtattttgtgctggatgctgccacctgaagctgcccattcctgatcagcaactctatgacccagttctcgtctgtaactcatgttacgaacacattcaagtctctcgtgccagggaactcatgagccaacagctgaagaaacccattgctacagcttccagttgaatgccggggagaaacctgtccaattttagcaggtttgaagggaggatcttcttcagttgtagtttggaaggttccttggtgtggctcatgaaatcacagagctcagagataccatcttgagaaatcctccttggtatcatgaaactggagcagaggaattgcaatttagcaggaggtcctctactggtgataccctcaccttggggtaatggtcctaacccagacccagggtctggaagcttaatgttgagttggtgactccagcctctttctcctggaggtcacaagatgatgattgcgtagatgttgcctggtgcaaagtgccccaaacagcaatagaaagrcatatgtataaccaaactccaagtgataaccagacccatctctcctccaccttgacaaaagcagattatagtatacaaggtaggaattcctgtcctatttgagatgaactatatcctgtacctctgtgctctgtgtctgcatgaaggctcagcctttagaggcactccttctagttgcattagtactgtctttctgtggagtttggtttgaagactggctcagcaagtggaggtttcaatgtatttttcagttggctcatcagccagcattggtgaatattcagtttaggggaacagttctagggagtgagacatttttgggagcagaggaaaactctgctgatgttcggtcctggcaaacattgagttattttgagctgtgaaggcagtcgtctctgttacacagtggcagctcttgagttatgcactgtgaagaatgagaagggaaaagcaaaaattatccttgtgaaatatctgctgattgtgccctactctttgcacctgacttttcctagttgtcctggtgctaacacaggagctacaccttgatcctctcctggcatgaaaataaaacaaaggttttcgttgttgttgttccattgcccatttcccccatgttgtctttcccttggctgatgcctcctctgggtcacattgcttcttatcctgaacacttgacaccttgagggtagaatttagcgtttggtttttacctcctagcatatgctgtttggtatgtgagggtttcagtacaaatgctgctgtctatttctgtgcacttaacaatggaacccaaacagaagagaataaagccttgataccaaaattgggaaagaacatgtgtccatttggaccaaacgttgttggtttttaaaaaattttattttgtttttttgtttttgtttttgttttttttcatcttaatatgtaccagtggcacttaaccaaaagatacagtgatatagccatgtactgtgggtgggacagatacagtctccttggcctataatgaaaccactaggactttatacagttttccttaatttgttgacatataaatggtaaattatatttaggcttatcctgttttgaaatgatggtagtcatctttcttactgctactttcatgttgctttctagaaaacagcatttcattccaaaataactaggatctgcatttagaacaagaatcattatttgtcctgaccttttcagtcctacagagacgcatctgtggttcttttgtacttgccatagatgtaacctaaaaagttttggcatatttaggtcagcctagcggaactttttttttcatttaaatggagctgaataatggagattttgtgtctgcaaaattcctgagatcattgaaaaagtaacaagctgttccttgtttctgatacataaaattattttaagcattttatcaatcattaaaatttactgccagttgtgagtggctttttaattaacttgtctttcattgcacttcactctgcctgttttcaaggggagtaagattggtaacatttggggagactgtatctgtctacttagcgtggctgttttgagggactgtcccatcagtgaacaaactgcatggccttggagagagactctgggctcttggctcagatgtkttmatcaaatactcctttcagagctgttgtgggtgtaagtgacatgatgtggccaaaaatccaaactgtgcagttgcgttgtgacaaacatgcaatgtgctgtaaaaattcratacagtttaaataaaatctctatattagt

SEQ ID NO: 5719 - DNA, 956 bp, Homo sapiens
ccgcctgtcgcctgtgcgcctgcgcgcggcgccgaggggacggggtccgactcagaaatggcggcctccatgttctacggcaggctagtggccrtggccacycttcggaaccaccggcctcggacggcccagcgggctgctgctcaggttctgggaagttctggatkgtttaataaccatggactccaagtacagcagcaacagcaaaggaatctctcactacatgaatacatgagtatggaattattgcaagaagctggtgtctccgttcccaaaggatatgtggcaaagtcaccagatgaagcttatgcaattgccaaaaaattaggtacagaagaaagaaataatatgtgcaggataaactgtaactatragtatttctggcaagttctctgggaccagaactcacaagtaataagaagcaggttcaaaagatgtcgtgataaaggcacaggttttagctggtggtagaggaaaaggaacatttgaaagtggcctcaaaggaggagtgaagatagttttctctccagaagaagcaaaagctgtttcttcacaaatgattgggaaaaaattgtttaccaagcaaacgggagaaaagggcagaatatgcaatcaagtattggtctgtgagcgaaaatatcccaggagagaatactactttgcrataacaatggaaaggtcatttcaaggtcctgtattaataggaagttcacatggtggtgtcaacattgaagatgttgctgctgagwctcctgaagcaataattaaagaacctattgatattgaagaaggcatcaaaaaggaacaagctctccagcttgcacagaagatgggatttccacctaatattgtggaatcagcagcagaaaacatggtcaagctttacagcctttttctgaaatacgatgcaaccatgatagaaataaatccaatggtggaagaytcagatggagctg

SEQ ID NO: 5720 - DNA, 2169 bp, Homo sapiens
ccgcctgtcgcctgtgcgcctgcgcgcggcgccgaggggacggggtccgactcagaaatggcggcctccatgttctacggcaggctagtggccrtggccacycttcggaaccaccggcctcggacggcccagcgggctgctgctcaggttctgggaagttctggatkgtttaataaccatggactccaagtacagcagcaacagcaaaggaatctctcactacatgaatacatgagtatggaattattgcaagaagctggtgtctccgttcccaaaggatatgtggcaaagtcaccagatgaagcttatgcaattgccaaaaaattaggttcaaaagatgtcgtgataaaggcacaggttttagctggtggtagaggaaaaggaacatttgaaagtggcctcaaaggaggagtgaagatagttttctctccagaagaagcaaaagctgtttcttcacaaatgattgggaaaaaattgtttaccaagcaaacgggagaaaagggcagaatatgcaatcaagtattggtctgtgagcgaaaatatcccaggagagaatactactttgcrataacaatggaaaggtcatttcaaggtcctgtattaataggaagttcacatggtggtgtcaacattgaagatgttgctgctgagwctcctgaagcaataattaaagaacctattgatattgaagaaggcatcaaaaaggaacaagctctccagcttgcacagaagatgggatttccacctaatattgtggaatcagcagcagaaaacatggtcaagctttacagcctttttctgaaatacgatgcaaccatgatagaaataaatccaatggtggaagaytcagatggagctgtattgtgtatggatgcaaagatcaattttgactctaattcagcctatcgccaaaagaaaatctttgatctacaggactggacccaggaagatgaaagggacaaagatgctgctaaggcaaatctcaactacattggcctcgatggaaatataggctgcctagtaaatggtgctggtttggctatggccacaatggatataataaaacttcatggagggactccagccaacttccttgatgttggtggtggtgctacagtccatcaagtaacagaagcatttaagcttatcacttcagataaaaaggtactggctattctggtcaacatttttggaggaatcatgcgctgtgatgttattgcacagggtatagtcatggcagtaaaagacttggaaattaaaatacctgttgtggtacggttacaaggtacacgagtcgatgatgctaaggcactgatagcggacagtggacttaaaatacttgcttgtgatgacttggatgaagctgctagaatggttgtaaagctctctgaaatagtgaccttagcgaagcaagcacatgtggatgtgaaatttcagttgccaatatgatctgaaaacccagtggatggctgaaggwgttaaatgtgctataatcattaagaatactgtgttctgtgttattgttctttttctttttagtgtgtggagattgtaattgccatctaggcacacaaacatttaaaaggatttggactgcatttaattgtaccattcagaatggactgtttgtacgaagcatgtataatgcagttatcttctttctttygtcgcagccagtcttttttgcttctcctacaaaacgtaacttgcaatttgccagtttattattgttggatacaaagttcttcattgataagagtcctataaataagataartacgaagataaagctttattctttagtgttaaaatacagtatatctaataactagcctcattagtagagcagtatattaaaacaatgttttatgtaaaaagtgtttatcttcagcaccaaatacatgataaatgtatcaatcactatttataaacagagctttcaaacactcctcagaatattcttctaagtattttgatgaagtaactttgtaattatttgaacattgttttaatcattaggaaacactgattaactgcaagtcttcatgattctgtcatattaagaaacacctgtaggtttgcttcaaataaaggcatatataccaaggamttacagacaaaattaagaatgtcaatttaagttaataaaaatctcccaatatgatttgg

SEQ ID NO: 5721 - DNA, 2038 bp, Homo sapiens
ccgcctgtcgcctgtgcgcctgcgcgcggcgccgaggggacggggtccgactcagaaatggcggcctccatgttctacggcaggctagtggccrtggccacycttcggaaccaccggcctcggacggcccagcgggctgctgctcaggttctgggaagttctggatkgtttaataaccatggactccaagtacagcagcaacagcaaaggaatctctcactacatgaatacatgagtatggaattattgcaagaagctggtgtctccgttcccaaaggatatgtggcaaagtcaccagatgaagcttatgcaattgccaaaaaattaggttcaaaagatgtcgtgataaaggcacaggttttagctggtggtagaggaaaaggaacatttgaaagtggcctcaaaggaggagtgaagatagttttctctccagaagaagcaaaagctgtttcttcacaaatgattgggaaaaaattgtttaccaagcaaacgggagaaaagggcagaatatgcaatcaagtattggtctgtgagcgaaaatatcccaggagagaatactactttgcrataacaatggaaaggtcatttcaaggtcctgtattaataggaagttcacatggtggtgtcaacattgaagatgttgctgctgagwctcctgaagcaataattaaagaacctattgatattgaagaaggcatcaaaaaggaacaagctctccagcttgcacagaagatgggatttccacctaatattgtggaatcagcagcagaaaacatggtcaagctttacagcctttttctgaaatacgatgcaaccatgatagaaataaatccaatggtggaagaytcagatggagctgtattgtgtatggatgcaaagatcaattttgactctaattcagcctatcgccaaaagaaaatctttgatctacaggactggacccaggaagatgaaagggacaaagatgctgctaaggcaaatctcaactacattggcctcgatggaaatataggctgcctagtaaatggtgctggtttggctatggccacaatggatataataaaacttcatggagggactccagccaacttccttgatgttggtggtggtgctacagtccatcaagtaacagaagcatttaagcttatcacttcagataaaaaggtactggctattctggtcaacatttttggaggaatcatgcgctgtgatgttattgcacagggtatagtcatggcagtaaaagacttggaaattaaaatacctgttgtggtacggttacaaggtacacgagtcgatgatgctaaggcactgatagcggacagtggacttaaaatacttgcttgtgatgacttggatgaagctgctagaatggttgtaaagctctctgaaatagtgaccttagcgaagcaagcacatgtggatgtgaaatttcagttgccaatatgatctgaaaacccagtggatggctgaaggwgttaaatgtgctataatcattaagaatactgtgttctgtgttattgttctttttctttttagtgtgtggagattgtaattgccatctaggcacacaaacatttaaaaggatttggactgcatttaattgtaccattcagaatggactgtttgtacgaagcatgtataatgcagttatcttctttctttygtcgcagccagtcttttttgcttctcctacaaaacgtaacttgcaatttgccagtttattattgttggatacaaagttcttcattgataagagtcctataaataagataartacgaagataaagctttattctttagtgttaaaatacagtatatctaataactagcctcattagtagagcagtatattaaaacaatgttttatgtaaaaagtgtttatcttcagcaccaaatacatgataaatgtatcaatcactatttataaacagagctttcaaacactcctcagaatattttcatgattctgtcatattaagaaacacctgtaggtttgcttcaaataaaggcatatataccaaggamttacagacaa

SEQ ID NO: 5722 - DNA, 388 bp, Homo sapiens
aggacattgccagmgtcttggcgatttggcccgacgcgctccgctttcgctacagcatggtggcctactggagacaggctggactcagctacatccgatactcccagatctgtgcaaaagtagtgagagatgcactgaagacagaattcaaagcaaatgccaaaaagacttctggcaacagcgtaaaaattgtgaaagtaaagaaggaataatctaccctgactaaagcttgaaatgctgcatttccaaggtgaagatgtatgggcacatgttatggcagattgaaaaggatctcatttcatgggaaaaaaaaatcctgtcttgttcataaattgacaatgtcaataaattgaaatatggttcactgttaaaaaaaaaaaaaaaaaag

SEQ ID NO: 5723 - DNA, 1894 bp, Homo sapiens
ggtgcgcaagggcacggacctmggagctctcccccgtcccgcgcgcccgccccgttcccccgccggccatgaacgccgctcgcaccggctaccgagtcttctcggccaactccacggccgcctgcacggagctggccaagcgcatcacagagcgccttggtgctgaattggggaagtctgttgtatatcaagagaccaatggagaaacaagagttgaaataaaagaatctgttcgtggccaagatattttcattatacagacaatacccagagatgtgaatacagctgtgatggagttgctcatcatggcttacgcactgaagactgcctgtgccaggaacattattggggtcatcccctacttcccctacagcaagcagagcaagatgaggaagaggggttccattgtgtgcaagctgctagcatccatgctggcgaaagcaggtttaactcacattatcactatggatcttcatcaaaaggaaatacaaggctttttcagctttcctgtggacaaccttagagcctcacctttcctgcttcagtatatccaggaagaaattccaaattacagaaatgcagtcattgtagctaagtctcctgatgctgcaaagagggcccagtcctatgcggagagactgcgtctgggtttggccgtcattcayggggaagctcagtgcacggaactkgacatggacgatggtcgtcactccccgcctatggtcaaaaatgctactgtgcacccaggcctggagttgccattgatgatggccaaagagaagccaccgataactgtagttggagatgttggaggccgcatcgcaatcatcgtggatgacattattgacgatgtggagagttttgttgctgccgcggagatcctgaaagagagaggcgcctataagatctatgttatggccacccacggcatcctgtctgcagaggcccctcgcctgattgaggagtcctccgtagacgaggtggtggtgacgaatactgtccctcatgaggttcagaagctgcartgtcccaagataaagactgtggatatcagtttgattctttctgaagccattcggagaatccacaatggagagtccatrgcctaccttttccgaaacatcactgtggatgactagctttcacgagggtctcgaccctggacctcctgagggaaacatggaaaaagcagtgccatgagtgatacagtgtttccttgcaagggaggactcgaaacagcctggagttagatatcytcttttgcccggattgatggggaggagggattaaaagagtcaggaagaagacagagctaatggataaatatcataacatggccttacatgtctgctgtcatcagccctgttccttaaaagttctagctgctttcttaaaaataatctgaaaatcttattgatactaaagaggagttaaaggcacataaagtcttaactctataatgttcatttagttgtttcagctccagggaaatggaggtattgatgttgaacctggttagggaagctgagcgcctgtggccctattactatccagttggcctctcccaaatcaacttcaagtcttttatagagaatcgtatttttctttcagaaattgttatgcctacagccattgaaaaatgaagcattcatgttgttacatcttccaaggatgtcagattagaaaatagcatcccacctctgggtatctgagtggctctgaagttgcaaataaaataatttgttgtcttgctagtcttttcattagacagcagaagaccatggatacagaacagcagtcaggtctgtggctggacacaaacactttcccaggttccaccctcttcctaagtgttgaagctaaatccttgttgaatactgtattttaaatcttt

SEQ ID NO: 5724 - DNA, 1874 bp, Homo sapiens
ggtgcgcaagggcacggacctmggagctctccccttcccccgccggccatgaacgccgctcgcaccggctaccgagtcttctcggccaactccacggccgcctgcacggagctggccaagcgcatcacagagcgccttggtgctgaattggggaagtctgttgtatatcaagagaccaatggagaaacaagagttgaaataaaagaatctgttcgtggccaagatattttcattatacagacaatacccagagatgtgaatacagctgtgatggagttgctcatcatggcttacgcactgaagactgcctgtgccaggaacattattggggtcatcccctacttcccctacagcaagcagagcaagatgaggaagaggggttccattgtgtgcaagctgctagcatccatgctggcgaaagcaggtttaactcacattatcactatggatcttcatcaaaaggaaatacaaggctttttcagctttcctgtggacaaccttagagcctcacctttcctgcttcagtatatccaggaagaaattccaaattacagaaatgcagtcattgtagctaagtctcctgatgctgcaaagagggcccagtcctatgcggagagactgcgtctgggtttggccgtcattcayggggaagctcagtgcacggaactkgacatggacgatggtcgtcactccccgcctatggtcaaaaatgctactgtgcacccaggcctggagttgccattgatgatggccaaagagaagccaccgataactgtagttggagatgttggaggccgcatcgcaatcatcgtggatgacattattgacgatgtggagagttttgttgctgccgcggagatcctgaaagagagaggcgcctataagatctatgttatggccacccacggcatcctgtctgcagaggcccctcgcctgattgaggagtcctccgtagacgaggtggtggtgacgaatactgtccctcatgaggttcagaagctgcartgtcccaagataaagactgtggatatcagtttgattctttctgaagccattcggagaatccacaatggagagtccatrgcctaccttttccgaaacatcactgtggatgactagctttcacgagggtctcgaccctggacctcctgagggaaacatggaaaaagcagtgccatgagtgatacagtgtttccttgcaagggaggactcgaaacagcctggagttagatatcytcttttgcccggattgatggggaggagggattaaaagagtcaggaagaagacagagctaatggataaatatcataacatggccttacatgtctgctgtcatcagccctgttccttaaaagttctagctgctttcttaaaaataatctgaaaatcttattgatactaaagaggagttaaaggcacataaagtcttaactctataatgttcatttagttgtttcagctccagggaaatggaggtattgatgttgaacctggttagggaagctgagcgcctgtggccctattactatccagttggcctctcccaaatcaacttcaagtcttttatagagaatcgtatttttctttcagaaattgttatgcctacagccattgaaaaatgaagcattcatgttgttacatcttccaaggatgtcagattagaaaatagcatcccacctctgggtatctgagtggctctgaagttgcaaataaaataatttgttgtcttgctagtcttttcattagacagcagaagaccatggatacagaacagcagtcaggtctgtggctggacacaaacactttcccaggttccaccctcttcctaagtgttgaagctaaatccttgttgaatactgtattttaaatcttt

SEQ ID NO: 5725 - DNA, 1026 bp, Homo sapiens
cgagaggtggggtggggggattacaaacctctaacagcaccacaggctgcccggggaacatctgctactacagccttgcagcccggagtcccggattttactggttcccgtgcctgcggacaggcccccagggctagcggctttgtggagggaacactgggtatcctctccacagtccaggtgctgggaggccctccttggcttaggaggacacttccaaagctggggcgccccaaggaggcaccagtggccagaatgtccaygcagagcacccaccccctgaaacctgaggccccaygtctgccacctgggatccccgagtccccgagctgtcagcggcgccacacactccctgccagtgagtttcgctgcctcaccccggaggacgctgtcagcgcctttgagatcgagcgtgaagccttcatctccgtcttgggcgtctgccccctgtacctggatgagatccggcacttcctgaccctatgtccagagctgtccctgggctggttcgaggagggctgccttgtggccttcatcatcggctcgctctgggacaaggagagactcatgcaggagtcactgacgctgcacaggtctgggggccacatagcccacctgcatgtgctggccgtgcaccgcgccttccggcagcagggcaggggccccatcctgctgtggcgctacctgcaccacctgggcagccagccggccgtgcgccgggcygcgctcatgtgcgaggacgcgctggtacccttctatgagaggttcagcttccacgccgtgggcccctgcgccatcaccgtgggctccctcaccttcatggagctccactgctccctgcggggccaccccttcctgcgcaggaacagcggctgctgaactgggctgcccacctggctgccaacatgatccccgtctctgccctgggctcctcttagctcagctgagcatggagacagcagtttccagagagtggagagagcagggctaaataaagaggagataaggtggcttctcacggcctga

SEQ ID NO: 5726 - DNA, 4457 bp, Homo sapiens
ggagccagcgggcgagagagcgcgcggcgggcgcgggttgccctcgtcgagagccatgggcgcggcgcggcgcggggctgaggatcggcgcggcccggaggcgctggggaccggggcgcgggcccggggccgcctttagccggcaccgagggcgcggggccggggatgagggcgcccgccgcggggagcccgtctgcgcgccgcggcaccttcccgcccagcgagcgagcccgagcaggcagacgcgcggccggcggtctgggggcgcgccgcctcccggtccccaaaatgtgaagcggggagggcggagacgcagagacggcccggccgggcgccctcgccgccctccggcagccgcgccgctccctccgctgcacgcccaggcctgagcagcgaggccaccgggccgcgcgctcccagcttcgctcggacgcggcttcggcccgcagagggttcgtggcccggacgcggcgagagctgggcccaggacggtgcgtccggcctcgcccgcggctgctcgcaccaacaagtttgaacaatgatcaccgtcaaccccgatgggaagataatggtcagaagatgcctggtcaccctgagaccctttcggctttttgtcctgggcatcggcttcttcactctctgcttcctgatgacgtctctgggaggccagttctcggcccggcgcctgggggactcgccattcaccatccgcacagaagtgatggggggccccgagtcccgcggcrtcctgcgcaagatgagcgacctgctggagctgatggtgaagcgcatggacgcactggccaggctggagaacagcagtgagctgcaccgggccggcggcgacctgcactttcccgcagacaggatgccccctggggccggcctcatggagcggatccaggctattgcccagaacgtctccgacatcgctgtgaaggtggaccagatcctgcgccacagtctgctcctgcacagcaaggtgtcagaaggccggcgggaccagtgtgaggcacccagtgaccccaagttccctgactgctcagggaaggtggagtggatgcgtgcccgctggacctctgacccctgctacgccttctttggggtggacggcaccgagtgctccttcctcatctacctcagtgaggtcgagtggttctgccccccgctgccctggaggaaccagacrgctgcccagagggcacccaagcccctccccaaagtccaggcagttttccgaagcaacctgtcccaccttctggacctgatgggcagcgggaaggagtccctgatcttcatgaagaagcggaccaagaggctcacagcccagtgggcgctggctgcccagcgcctggcacagaagctgggggccacccagagggaccagaagcagatcctggtccacatcggcttcctgacggaggagtccggggacgtgttcagccctcgggtcctgaagggcgggcccctaggggagatggtgcagtgggcggacattctgactgcactctatgtcctgggccatggcctgcgggtcacagtctccctgaaggagctgcagagtaacttaggggtaccgccaggccgsggaagctgcccgctcaccatgcccctgcccttcgacctcatctacaccgactaccayggcctgcagcagatgaagcggcacatgggactctccttcaagaagtaccggtgccgaatcagggtcatcgacaccttygggacggaacctgcgtacaaccacgaggagtacgccacgctgcacggctaccggaccaactggggctactggaacctcaaccccaagcagttcatgaccatgtttcctcatacccccgacaactccttcatgggcttcgtgtccgaggagctcaacgagacggagaagcggctcatcaaaggcggcaaggccagcaacatggccgtggtgtacggcaaggaggcgagcatctggaaggggaaggagaagttcctgggcatcctgaacaaatacatggagatccatggcaccgtgtactacgagagccagcggccccccgaggtgccagcctttgtgaagaaccacggcctcttaccgcagcctgagtttcagcagctgctgcgcaaggccaaactcttcatcgggtttggcttcccctacgagggccccgcccccctggaggccatcgccaatggttgcatcttcctgcagtcccgcttcagcccrccccacagctccctcaaccacgagttcttccgaggcaagcccacctccagagaggtgttctcccagcatccctacgcggagaacttcatyggcaagccccacgtgtggacagtcgactacaacaactcagaggagtttgaagcagccatcaaggccattatgagaactcaggtagacccctacctaccctaygagtacacctgcgaggggatgctggagcggatccacgcctacatccagcaccaggacttctgcagagctccagaccctgccctaccagaggcccacgccccgcagagcccctttgtcctggcccccaatgccacccacctcgagtgggctcggaacaccagcttggctcctggggcctggccccccgcgcacgccctgcgggcctggctggccgtgcctgggagggcctgcaccgacacctgcctggaccacgggctaatctgtgagccctccttcttccccttcctgaacagccaggacgccttcctcaagctgcaggtgccctgtgacagcaccgagtcggagatgaaccacctgtacccggcgttcgcccagcctggccaggagtgctacctgcagaaggagcctctgctcttcagctgcgccggctccaacaccaagtaccgccggctctgcccctgccgcgacttccgcaagggccaggtggccttgtgccagggctgtctgtgaatccgcctctgccrccctgcctggcacccacgctggctctctcctgccgcgggagaaagcaccagcaggttctgagccctggctgcttgtcctcctcgcaacccccccaggccggagcttccttccttagccgggaagctggcagaggagagccgtgcccgggaataggaggaggcagcatgccgagcccctgggacctcccaggcaggctccggttctctcctggggactcacrgmagcatcgtggccaagcaggtgtcggactgctcagagtccgcatggcccaggagcaggtggtcggaggcccctggctttgtgcaaggccggatctgggccaggtggcgaaaggggcccagtcgttcttgggcccaggatggggcctctagacttgcaagggagaggaacagggaccaggctgccccacggtccctgaagggtccaaggaggggccctccccatggccctggagagtgggcctgggtggtacctgctccaggcagggaaactgggggctcgcccttctcctgtgaggggagccaggcacacagggcccattggtgtttgggatgtggacagaggggcagggggctgggagaaggctaagccgaggggtcctgtttgtgcctccccttagtcccttcccgattcccccaccctccctctacacttgaggaccacagttgggggtgtagggaccacccagaccctggttgaattgtttctctctcctgcttgttccaacccttttcactctgggcttctcccaaaacccatcctggcatgacctgcaactccaggtggtggatttgttccaaagcctcaatccctaccccctccaaggggcaggtttccagtccagcctcagagatcaggctctgggacccctgcctggggggtggccttcatgcacyagccacttccgcaggtgctgactcccgcactccctggcattttttgcagacaagggcttgggatggaccctcagccccatggtacgccctgcccagtttccagwtgccctgtccacttaccctaggtagcccccyaccccatcagtgccgagtccttgtccctacctccagcttcctccagcctcaaaccgcctctggatctagctgtccttctccragtggcacgcctgccccaggatgccccctttccctcccccccatgcccagagccccgcctgcctcagcgggtcaggccttcagaacactgccacccacccagttttataatcccgctccctctccaggcaaccccacccaccagcctaggcctgctcctccacccttcccgggaggcagccccgggatgctgagagttggtggaggggccaggctggacgcttccygtgggagtcccctccagacctggctggcccctgcagccacagaaaccacgatggcaaaaaatctcattggttctcaaggactaacctgtgggggaaagcaatagagacactctttttctctctttttttaaagatttatttcttgaaataataaatattttattgggatgtgaggtgcagaagaggaactgt

SEQ ID NO: 5727 - DNA, 4463 bp, Homo sapiens
ggagccagcgggcgagagagcgcgcggcgggcgcgggttgccctcgtcgagagccatgggcgcggcgcggcgcggggctgaggatcggcgcggcccggaggcgctggggaccggggcgcgggcccggggccgcctttagccggcaccgagggcgcggggccggggatgagggcgcccgccgcggggagcccgtctgcgcgccgcggcaccttcccgcccagcgagcgagcccgagcaggcagacgcgcggccggcggtctgggggcgcgccgcctcccggtccccaaaatgtgaagcggggagggcggagacgcagagacggcccggccgggcgccctcgccgccctccggcagccgcgccgctccctccgctgcacgcccaggcctgagcagcgaggccaccgggccgcgcgctcccagcttcgctcggacgcggcttcggcccgcagagggttcgtggcccggacgcggcgagagctgggcccaggacggtgcgtccggcctcgcccgcggctgctcgcaccaacaagtttgaacaatgatcaccgtcaaccccgatgggaagataatggtcagaagatgcctggtcaccctgagaccctttcggctttttgtcctgggcatcggcttcttcactctctgcttcctgatgacgtctctgggaggccagttctcggcccggcgcctgggggactcgccattcaccatccgcacagaagtgatggggggccccgagtcccgcggcrtcctgcgcaagatgagcgacctgctggagctgatggtgaagcgcatggacgcactggccaggctggagaacagcagtgagctgcaccgggccggcggcgacctgcactttcccgcagacaggatgccccctggggccggcctcatggagcggatccaggctattgcccagaacgtctccgacatcgctgtgaaggtggaccagatcctgcgccacagtctgctcctgcacagcaaggtgtcagaaggccggcgggaccagtgtgaggcacccagtgaccccaagttccctgactgctcagggaaggtggagtggatgcgtgcccgctggacctctgacccctgctacgccttctttggggtggacggcaccgagtgctccttcctcatctacctcagtgaggtcgagtggttctgccccccgctgccctggaggaaccagacrgctgcccagagggcacccaagcccctccccaaagtccaggcagttttccgaagcaacctgtcccaccttctggacctgatgggcagcgggaaggagtccctgatcttcatgaagaagcggaccaagaggctcacagcccagtgggcgctggctgcccagcgcctggcacagaagctgggggccacccagagggaccagaagcagatcctggtccacatcggcttcctgacggaggagtccggggacgtgttcagccctcgggtcctgaagggcgggcccctaggggagatggtgcagtgggcggacattctgactgcactctatgtcctgggccatggcctgcgggtcacagtctccctgaaggagctgcagagtaacttaggggtaccgccaggccgsggaagctgcccgctcaccatgcccctgcccttcgacctcatctacaccgactaccayggcctgcagcagatgaagcggcacatgggactctccttcaagaagtaccggtgccgaatcagggtcatcgacaccttygggacggaacctgcgtacaaccacgaggagtacgccacgctgcacggctaccggaccaactggggctactggaacctcaaccccaagcagttcatgaccatgtttcctcatacccccgacaactccttcatgggcttcgtgtccgaggagctcaacgagacggagaagcggctcatcaaaggcggcaaggccagcaacatggccgtggtgtacggcaaggaggcgagcatctggaaggtgagcgggaaggagaagttcctgggcatcctgaacaaatacatggagatccatggcaccgtgtactacgagagccagcggccccccgaggtgccagcctttgtgaagaaccacggcctcttaccgcagcctgagtttcagcagctgctgcgcaaggccaaactcttcatcgggtttggcttcccctacgagggccccgcccccctggaggccatcgccaatggttgcatcttcctgcagtcccgcttcagcccrccccacagctccctcaaccacgagttcttccgaggcaagcccacctccagagaggtgttctcccagcatccctacgcggagaacttcatyggcaagccccacgtgtggacagtcgactacaacaactcagaggagtttgaagcagccatcaaggccattatgagaactcaggtagacccctacctaccctaygagtacacctgcgaggggatgctggagcggatccacgcctacatccagcaccaggacttctgcagagctccagaccctgccctaccagaggcccacgccccgcagagcccctttgtcctggcccccaatgccacccacctcgagtgggctcggaacaccagcttggctcctggggcctggccccccgcgcacgccctgcgggcctggctggccgtgcctgggagggcctgcaccgacacctgcctggaccacgggctaatctgtgagccctccttcttccccttcctgaacagccaggacgccttcctcaagctgcaggtgccctgtgacagcaccgagtcggagatgaaccacctgtacccggcgttcgcccagcctggccaggagtgctacctgcagaaggagcctctgctcttcagctgcgccggctccaacaccaagtaccgccggctctgcccctgccgcgacttccgcaagggccaggtggccttgtgccagggctgtctgtgaatccgcctctgccrccctgcctggcacccacgctggctctctcctgccgcgggagaaagcaccagcaggttctgagccctggctgcttgtcctcctcgcaacccccccaggccggagcttccttccttagccgggaagctggcagaggagagccgtgcccgggaataggaggaggcagcatgccgagcccctgggacctcccaggcaggctccggttctctcctggggactcacrgmagcatcgtggccaagcaggtgtcggactgctcagagtccgcatggcccaggagcaggtggtcggaggcccctggctttgtgcaaggccggatctgggccaggtggcgaaaggggcccagtcgttcttgggcccaggatggggcctctagacttgcaagggagaggaacagggaccaggctgccccacggtccctgaagggtccaaggaggggccctccccatggccctggagagtgggcctgggtggtacctgctccaggcagggaaactgggggctcgcccttctcctgtgaggggagccaggcacacagggcccattggtgtttgggatgtggacagaggggcagggggctgggagaaggctaagccgaggggtcctgtttgtgcctccccttagtcccttcccgattcccccaccctccctctacacttgaggaccacagttgggggtgtagggaccacccagaccctggttgaattgtttctctctcctgcttgttccaacccttttcactctgggcttctcccaaaacccatcctggcatgacctgcaactccaggtggtggatttgttccaaagcctcaatccctaccccctccaaggggcaggtttccagtccagcctcagagatcaggctctgggacccctgcctggggggtggccttcatgcacyagccacttccgcaggtgctgactcccgcactccctggcattttttgcagacaagggcttgggatggaccctcagccccatggtacgccctgcccagtttccagwtgccctgtccacttaccctaggtagcccccyaccccatcagtgccgagtccttgtccctacctccagcttcctccagcctcaaaccgcctctggatctagctgtccttctccragtggcacgcctgccccaggatgccccctttccctcccccccatgcccagagccccgcctgcctcagcgggtcaggccttcagaacactgccacccacccagttttataatcccgctccctctccaggcaaccccacccaccagcctaggcctgctcctccacccttcccgggaggcagccccgggatgctgagagttggtggaggggccaggctggacgcttccygtgggagtcccctccagacctggctggcccctgcagccacagaaaccacgatggcaaaaaatctcattggttctcaaggactaacctgtgggggaaagcaatagagacactctttttctctctttttttaaagatttatttcttgaaataataaatattttattgggatgtgaggtgcagaagaggaactgt

SEQ ID NO: 5728 - DNA, 4326 bp, Homo sapiens
ggagccagcgggcgagagagcgcgcggcgggcgcgggttgccctcgtcgagagccatgggcgcggcgcggcgcggggctgaggatcggcgcggcccggaggcgctggggaccggggcgcgggcccggggccgcctttagccggcaccgagggcgcggggccggggatgagggcgcccgccgcggggagcccgtctgcgcgccgcggcaccttcccgcccagcgagcgagcccgagcaggcagacgcgcggccggcggtctgggggcgcgccgcctcccggtccccaaaatgtgaagcggggagggcggagacgcagagacggcccggccgggcgccctcgccgccctccggcagccgcgccgctccctccgctgcacgcccaggcctgagcagcgaggccaccgggccgcgcgctcccagcttcgctcggacgcggcttcggcccgcagagggttcgtggcccggacgcggcgagagctgggcccaggacggtgcgtccggcctcgcccgcggctgctcgcaccaacaagtttgaacaatgatcaccgtcaaccccgatgggaagataatggtcagaagatgcctggtcaccctgagaccctttcggctttttgtcctgggcatcggcttcttcactctctgcttcctgatgacgtctctgggaggccagttctcggcccggcgcctgggggactcgccattcaccatccgcacagaagtgatggggggccccgagtcccgcggcrtcctgcgcaagatgagcgacctgctggagctgatggtgaagcgcatggacgcactggccaggctggagaacagcagtgagctgcaccgggccggcggcgacctgcactttcccgcagacaggatgccccctggggccggcctcatggagcggatccaggctattgcccagaacgtctccgacatcgctgtgaaggtggaccagatcctgcgccacagtctgctcctgcacagcaaggtgtcagaaggccggcgggaccagtgtgaggcacccagtgaccccaagttccctgactgctcagggaaggtggagtggatgcgtgcccgctggacctctgacccctgctacgccttctttggggtggacggcaccgagtgctccttcctcatctacctcagtgaggtcgagtggttctgccccccgctgccctggaggaaccagacrgctgcccagagggcacccaagcccctccccaaagtccaggcagttttccgaagcaacctgtcccaccttctggacctgatgggcagcgggaaggagtccctgatcttcatgaagaagcggaccaagaggctcacagcccagtgggcgctggctgcccagcgcctggcacagaagctgggggccacccagagggaccagaagcagatcctggtccacatcggcttcctgacggaggagtccggggacgtgttcagccctcgggtcctgaagggcgggcccctaggggagatggtgcagtgggcggacattctgactgcactctatgtcctgggccatggcctgcgggtcacagtctccctgaaggagctgcagagtaacttaggggtaccgccaggccgsggaagctgcccgctcaccatgcccctgcccttcgacctcatctacaccgactaccayggcctgcagcagatgaagcggcacatgggactctccttcaagaagtaccggtgccgaatcagggtcatcgacaccttygggacggaacctgcgtacaaccacgaggagtacgccacgctgcacggctaccggaccaactggggctactggaacctcaaccccaagcagttcatgaccatgtttcgggaaggagaagttcctgggcatcctgaacaaatacatggagatccatggcaccgtgtactacgagagccagcggccccccgaggtgccagcctttgtgaagaaccacggcctcttaccgcagcctgagtttcagcagctgctgcgcaaggccaaactcttcatcgggtttggcttcccctacgagggccccgcccccctggaggccatcgccaatggttgcatcttcctgcagtcccgcttcagcccrccccacagctccctcaaccacgagttcttccgaggcaagcccacctccagagaggtgttctcccagcatccctacgcggagaacttcatyggcaagccccacgtgtggacagtcgactacaacaactcagaggagtttgaagcagccatcaaggccattatgagaactcaggtagacccctacctaccctaygagtacacctgcgaggggatgctggagcggatccacgcctacatccagcaccaggacttctgcagagctccagaccctgccctaccagaggcccacgccccgcagagcccctttgtcctggcccccaatgccacccacctcgagtgggctcggaacaccagcttggctcctggggcctggccccccgcgcacgccctgcgggcctggctggccgtgcctgggagggcctgcaccgacacctgcctggaccacgggctaatctgtgagccctccttcttccccttcctgaacagccaggacgccttcctcaagctgcaggtgccctgtgacagcaccgagtcggagatgaaccacctgtacccggcgttcgcccagcctggccaggagtgctacctgcagaaggagcctctgctcttcagctgcgccggctccaacaccaagtaccgccggctctgcccctgccgcgacttccgcaagggccaggtggccttgtgccagggctgtctgtgaatccgcctctgccrccctgcctggcacccacgctggctctctcctgccgcgggagaaagcaccagcaggttctgagccctggctgcttgtcctcctcgcaacccccccaggccggagcttccttccttagccgggaagctggcagaggagagccgtgcccgggaataggaggaggcagcatgccgagcccctgggacctcccaggcaggctccggttctctcctggggactcacrgmagcatcgtggccaagcaggtgtcggactgctcagagtccgcatggcccaggagcaggtggtcggaggcccctggctttgtgcaaggccggatctgggccaggtggcgaaaggggcccagtcgttcttgggcccaggatggggcctctagacttgcaagggagaggaacagggaccaggctgccccacggtccctgaagggtccaaggaggggccctccccatggccctggagagtgggcctgggtggtacctgctccaggcagggaaactgggggctcgcccttctcctgtgaggggagccaggcacacagggcccattggtgtttgggatgtggacagaggggcagggggctgggagaaggctaagccgaggggtcctgtttgtgcctccccttagtcccttcccgattcccccaccctccctctacacttgaggaccacagttgggggtgtagggaccacccagaccctggttgaattgtttctctctcctgcttgttccaacccttttcactctgggcttctcccaaaacccatcctggcatgacctgcaactccaggtggtggatttgttccaaagcctcaatccctaccccctccaaggggcaggtttccagtccagcctcagagatcaggctctgggacccctgcctggggggtggccttcatgcacyagccacttccgcaggtgctgactcccgcactccctggcattttttgcagacaagggcttgggatggaccctcagccccatggtacgccctgcccagtttccagwtgccctgtccacttaccctaggtagcccccyaccccatcagtgccgagtccttgtccctacctccagcttcctccagcctcaaaccgcctctggatctagctgtccttctccragtggcacgcctgccccaggatgccccctttccctcccccccatgcccagagccccgcctgcctcagcgggtcaggccttcagaacactgccacccacccagttttataatcccgctccctctccaggcaaccccacccaccagcctaggcctgctcctccacccttcccgggaggcagccccgggatgctgagagttggtggaggggccaggctggacgcttccygtgggagtcccctccagacctggctggcccctgcagccacagaaaccacgatggcaaaaaatctcattggttctcaaggactaacctgtgggggaaagcaatagagacactctttttctctctttttttaaagatttatttcttgaaataataaatattttattgggatgtgaggtgcagaagaggaactgt

SEQ ID NO: 5729 - DNA, 1824 bp, Homo sapiens
agtgccctccccgctccgcggcgccggctgcgaagttgagcgaaaagtttgaggccggagggagcgaggccggggagtccgctccagcggggcgctycagtccctcagacgtgggctgagcttgggacgagctgcgttccgccccaggccactgtagggaacggcggtggcgcctccccagcaaaccggaccgactgggtccagccgccgcagggaatgacrccggtgctcctrcagccacggctccgggcggggaaggcgagccccacagccggccctgcgacgcccgcctgggcagcaccgataaggagctgaaggcaggagccgccgccacgggcagcgcccccacagcgccagggaccccctggcagcgggagccgcgggtcgaggttatggatccagcgggcggcccccggggcgtgctcccgcggccctgccgcgtgctggtgctgctgaacccgcgcggcggcaagggcaaggccttgcagctcttccggagtcacgtgcagccccttttggctgaggctgaaatctccttcacgctgatgctcactgagcggcggaaccacgcgcgggagctggtgcggtcggaggagctgggccgctgggacgctctggtggtcatgtctggagacgggctgatgcacgaggtggtgaacgggctcatggagcggcctgactgggagaccgccatccagaagcccctgtgtagcctcccagcaggctctggcaacgcgctggcagcttccttgaaccattatgctggctatgagcaggtcaccaatgaagacctcctgaccaactgcacgctattgctgtgccgccggctgctgtcacccatgaacctgctgtctctgcayacggcttcggggctgcgcctcttctctgtgctcagcctggcctggggcttcattgctgatgtggacctagagagtgagaagtatcggcgtctgggggagatgcgcttcactctgggcaccttcctgcgtctggcagccctgcgcacctaccgcggccgactggcctacctccctgtaggaagagtgggttccaagacacctgcctcccccgttgtggtccagcagggcccggtagatgcacaccttgtgccactggaggagccagtgccctctcactggacagtggtgcccgacgaggactttgtgctagtcctggcactgctgcactcgcacctgggcagtgagatgtttgctgcacccatgggccrctgtgcagctggcgtcatgcatctgttctacgtgcgggcgggagtgtctcgtgccatgctgctgcgcctcttcctggccatggagaagggcaggcatatggagtatgaatgcccctacttggtataygtgcccgtggtcgccttccgcttggagcccaaggatgggaaaggtgtgtttgcagtggatggggaattgatggttagcgaggccgtgcagggccaggtgcacccaaactacttctggatggtcagyggttgcgtggagcccccgcccagctggaagccccakyagatgccaccgccagaagagcccttatgacccctgggccrcgctgtgccttagtgtctacttgcaggacccttcctccttccctagggctgcagggcctgtccacagctcctgtgggggtggaggagactcctctggagaagggtgagaaggtggaggctatgctttggggggacaggccagaatgaagtcctgggtcaggagcccagctggctgggcccagctgcctatgtaaggccttctagtttgttctgagacccccaccccacgaaccaaatccaaataaagtgacattcccagcctgctc

SEQ ID NO: 5730 - DNA, 1866 bp, Homo sapiens
agtgccctccccgctccgcggcgccggctgcgaagttgagcgaaaagtttgaggccggagggagcgaggccggggagtccgctccagcggggcgctycagtccctcagacgtgggctgagcttgggacgagctgcgttccgccccaggccactgtagggaacggcggtggcgcctccccagcaaaccggaccgactgggtccagccgccgcagggaatgacrccggtgctcctrcagccacggctccgggcggggaaggcgagccccacagccggccctgcgacgcccgcctgggcagcaccgataaggagctgaaggcaggagccgccgccacgggcagcgcccccacagcgccagggaccccctggcagcgggagccgcgggtcgaggttatggatccagtggtcggttgcggacgtggcctctttggttttgttttctcagcgggcggcccccggggcgtgctcccgcggccctgccgcgtgctggtgctgctgaacccgcgcggcggcaagggcaaggccttgcagctcttccggagtcacgtgcagccccttttggctgaggctgaaatctccttcacgctgatgctcactgagcggcggaaccacgcgcgggagctggtgcggtcggaggagctgggccgctgggacgctctggtggtcatgtctggagacgggctgatgcacgaggtggtgaacgggctcatggagcggcctgactgggagaccgccatccagaagcccctgtgtagcctcccagcaggctctggcaacgcgctggcagcttccttgaaccattatgctggctatgagcaggtcaccaatgaagacctcctgaccaactgcacgctattgctgtgccgccggctgctgtcacccatgaacctgctgtctctgcayacggcttcggggctgcgcctcttctctgtgctcagcctggcctggggcttcattgctgatgtggacctagagagtgagaagtatcggcgtctgggggagatgcgcttcactctgggcaccttcctgcgtctggcagccctgcgcacctaccgcggccgactggcctacctccctgtaggaagagtgggttccaagacacctgcctcccccgttgtggtccagcagggcccggtagatgcacaccttgtgccactggaggagccagtgccctctcactggacagtggtgcccgacgaggactttgtgctagtcctggcactgctgcactcgcacctgggcagtgagatgtttgctgcacccatgggccrctgtgcagctggcgtcatgcatctgttctacgtgcgggcgggagtgtctcgtgccatgctgctgcgcctcttcctggccatggagaagggcaggcatatggagtatgaatgcccctacttggtataygtgcccgtggtcgccttccgcttggagcccaaggatgggaaaggtgtgtttgcagtggatggggaattgatggttagcgaggccgtgcagggccaggtgcacccaaactacttctggatggtcagyggttgcgtggagcccccgcccagctggaagccccakyagatgccaccgccagaagagcccttatgacccctgggccrcgctgtgccttagtgtctacttgcaggacccttcctccttccctagggctgcagggcctgtccacagctcctgtgggggtggaggagactcctctggagaagggtgagaaggtggaggctatgctttggggggacaggccagaatgaagtcctgggtcaggagcccagctggctgggcccagctgcctatgtaaggccttctagtttgttctgagacccccaccccacgaaccaaatccaaataaagtgacattcccagcctgctc

SEQ ID NO: 5731 - DNA, 1836 bp, Homo sapiens
caaagtgctaggattacaggagtgagccactgcgcccggcctgctgcttcctcctcctcagggagacgccacagctctgcggcaagcaatccaccaggcaccagatccccagatacctgcccttcagggagaaatagcctgggatacagagaggcccagaggggagctctggctggacttggcttctcagcgtggggtctgggttcacaggtccagccgccgcagggaatgacrccggtgctcctrcagccacggctccgggcggggaaggcgagccccacagccggccctgcgacgcccgcctgggcagcaccgataaggagctgaaggcaggagccgccgccacgggcagcgcccccacagcgccagggaccccctggcagcgggagccgcgggtcgaggttatggatccagcgggcggcccccggggcgtgctcccgcggccctgccgcgtgctggtgctgctgaacccgcgcggcggcaagggcaaggccttgcagctcttccggagtcacgtgcagccccttttggctgaggctgaaatctccttcacgctgatgctcactgagcggcggaaccacgcgcgggagctggtgcggtcggaggagctgggccgctgggacgctctggtggtcatgtctggagacgggctgatgcacgaggtggtgaacgggctcatggagcggcctgactgggagaccgccatccagaagcccctgtgtagcctcccagcaggctctggcaacgcgctggcagcttccttgaaccattatgctggctatgagcaggtcaccaatgaagacctcctgaccaactgcacgctattgctgtgccgccggctgctgtcacccatgaacctgctgtctctgcayacggcttcggggctgcgcctcttctctgtgctcagcctggcctggggcttcattgctgatgtggacctagagagtgagaagtatcggcgtctgggggagatgcgcttcactctgggcaccttcctgcgtctggcagccctgcgcacctaccgcggccgactggcctacctccctgtaggaagagtgggttccaagacacctgcctcccccgttgtggtccagcagggcccggtagatgcacaccttgtgccactggaggagccagtgccctctcactggacagtggtgcccgacgaggactttgtgctagtcctggcactgctgcactcgcacctgggcagtgagatgtttgctgcacccatgggccrctgtgcagctggcgtcatgcatctgttctacgtgcgggcgggagtgtctcgtgccatgctgctgcgcctcttcctggccatggagaagggcaggcatatggagtatgaatgcccctacttggtataygtgcccgtggtcgccttccgcttggagcccaaggatgggaaaggtgtgtttgcagtggatggggaattgatggttagcgaggccgtgcagggccaggtgcacccaaactacttctggatggtcagyggttgcgtggagcccccgcccagctggaagccccakyagatgccaccgccagaagagcccttatgacccctgggccrcgctgtgccttagtgtctacttgcaggacccttcctccttccctagggctgcagggcctgtccacagctcctgtgggggtggaggagactcctctggagaagggtgagaaggtggaggctatgctttggggggacaggccagaatgaagtcctgggtcaggagcccagctggctgggcccagctgcctatgtaaggccttctagtttgttctgagacccccaccccacgaaccaaatccaaataaagtgacattcccagcctgctc

SEQ ID NO: 5732 - DNA, 2167 bp, Homo sapiens
ctctcagggtctttgaaggaagaaggctggagtgggaacctgtgaggagcaacaatagctgtggagaaacgggagtgacaggtcttgatggtttccatgtagttggttttagaattgcttttactccacagtgcccaatagagtgacaattaacagtcaaggcttctttgatacatactcaagcacttaatattacttgaaaaaaaaaaaaggcttccataatgactgttgtcgtttagtaggagacctgggggccggagccgcctgtggacaaccatccgccagcttctctcgctccgtcgattaggaggagtggtggcgacctcggccttcagtgtctccaatgaagtgaaatggcggcagcggcggggatgatgttgctgggcttgctgcaggcggggtgggtcggtgctgggccaggcgatggagaaggtgacaggaggcaacctcttgtccatgctgctgatcgcctgcaccttcaccctcagcctggtctacctgttccgtctggccgccggccacttggtccagctgcccgcaggggcgaaaagtcctccatacgttttctccccagttccattccctgggcatgccatagcatttgggaaaagtccagttgaatttctagaaatgcatatgagaagtatggacctgtatttagttttaccatggtaggcmagacatttacttaccttctggggagtgatgctgctgcgctgctttttaatagtaaaaatgaagacctgaatgcagaagatgtctacagtcacctgacgacacctgtgtttgggaagggagttgcatacgatgtgcctaatccagttttcttggagcagaagaaaatgttaaaaagtggccttaacaaagcccactttaaacagcatgtttcattgaaaaagaaacaaaggagtactttcagagttggggagaaagtggagaaaaaaatgtgtttgaagctctttctgagctcataattttaacagctagccactgtttgcatggaaaggaaatcagaagtcaactcaatcctggctcttaccaggttggctgcctttgcctagtttcagatgcagggacagagctcattgggaaatcaaggatattttctataaggcaatccagaaacgcagacagtctcaagaaaaaattgatgacattctccaaactttactagatgctacatacaaggatgggcgtcctttgactgatgatgaagtagcagggatgcttattggattactcttggcagggcagcattcatcctcaactactagtgcttggatggacttctttttggccagagacaaaacacttcaagaaaaatgttatttagaacagaaaacagtctgtggagagaatctgcctcctttaacttatgaccaactcaaggatctaaatttacttgatcgctgtataaaagaaacattaagacttagacctcctataatgatcatgatgagaatggccagaactcctcagactgtggtagggtataccattcctccaggacatcaggataacccagcatcaggggaaaagtttgcctatgtgccatttggagctgggtgtcatcgttgaattggggaaaattttgcctatgttcaaattaagacaatttggtccactatgcttcgtttatatgaatttgatctcattgatggatattttcccatcgtgaattatacaactatgattcacacccctgaaaacccacttatccattacaaacgaagatcaaaatgaaaaaggttgcaaggaaccaatatatgtgatcatcactgtaagccacaaaggcattcgaagagaatgaagtgtacaaaacaactcttgtagtgtactgttttttttgagtgtgtaattctaaaagccagtttatgatttagtattttgttaactgaatggttctatcaaatataatagcatttgaaacattttctaatagctatgatacttatacatgtgctttcaggaagttcattagtaaaacaattgttcaggaggatctaggtaattggcagattctaaataatataatttccaggtagtaattttaagagtactcttagctcttgccaaataagttcagggtattcaaatcttggactagtcctgcaaggtataaagaataaaaatcccggtgagatacttggaaacctcaggttattat

SEQ ID NO: 5733 - DNA, 3396 bp, Homo sapiens
ctctcagggtctttgaaggaagaaggctggagtgggaacctgtgaggagcaacaatagctgtggagaaacgggagtgacaggtcttgatggtttccatgtagttggttttagaattgcttttactccacagtgcccaatagagtgacaattaacagtcaaggcttctttgatacatactcaagcacttaatattacttgaaaaaaaaaaaaggcttccataatgactgttgtcgtttagtaggagacctgggggccggagccgcctgtggacaaccatccgccagcttctctcgctccgtcgattaggaggagtggtggcgacctcggccttcagtgtctccaatgaagtgaaatggcggcagcggcggggatgatgttgctgggcttgctgcaggcggggtgggtcggtgctgggccaggcgatggagaaggtgacaggaggcaacctcttgtccatgctgctgatcgcctgcaccttcaccctcagcctggtctacctgttccgtctggccgccggccacttggtccagctgcccgcaggggcgaaaagtcctccatacgttttctccccagttccattccctgggcatgccatagcatttgggaaaagtccagttgaatttctagaaatgcatatgagaagtatggacctgtatttagttttaccatggtaggcmagacatttacttaccttctggggagtgatgctgctgcgctgctttttaatagtaaaaatgaagacctgaatgcagaagatgtctacagtcacctgacgacacctgtgtttgggaagggagttgcatacgatgtgcctaatccagttttcttggagcagaagaaaatgttaaaaagtggccttaacaaagcccactttaaacagcatgtttcattgaaaaagaaacaaaggagtactttcagagttggggagaaagtggagaaaaaaatgtgtttgaagctctttctgagctcataattttaacagctagccactgtttgcatggaaaggaaatcagaagtcaactcaatgaaaaggtagcacagctgtatgcagatttggatggaggtttcagccatgcagcctggctcttaccaggttggctgcctttgcctagtttcagatgcagggacagagctcattgggaaatcaaggatattttctataaggcaatccagaaacgcagacagtctcaagaaaaaattgatgacattctccaaactttactagatgctacatacaaggatgggcgtcctttgactgatgatgaagtagcagggatgcttattggattactcttggcagggcagcattcatcctcaactactagtgcttggatggacttctttttggccagagacaaaacacttcaagaaaaatgttatttagaacagaaaacagtctgtggagagaatctgcctcctttaacttatgaccaactcaaggatctaaatttacttgatcgctgtataaaagaaacattaagacttagacctcctataatgatcatgatgagaatggccagaactcctcagactgtggtagggtataccattcctccaggacatcaggtgtgtgtttctcccactgtcaatcaaagacctaaagactcatgggtagaacgcctggactttaatcctgattgctacttacaggataacccagcatcaggggaaaagtttgcctatgtgccatttggagctgggtgtcatcgttgaattggggaaaattttgcctatgttcaaattaagacaatttggtccactatgcttcgtttatatgaatttgatctcattgatggatattttcccatcgtgaattatacaactatgattcacacccctgaaaacccacttatccattacaaacgaagatcaaaatgaaaaaggttgcaaggaaccaatatatgtgatcatcactgtaagccacaaaggcattcgaagagaatgaagtgtacaaaacaactcttgtagtgtactgttttttttgagtgtgtaattctaaaagccagtttatgatttagtattttgttaactgaatggttctatcaaatataatagcatttgaaacattttctaatagctatgatacttatacatgtgctttcaggaagttcattagtaaaacaattgttcaggaggatctaggtaattggcagattctaaataatataatttccaggtagtaattttaagagtactcttagctcttgccaaataagttcagggtattcaaatcttggactagtcctgcaaggtataaagaataaaaatcccggtgagatacttggaaacctcaggttattatttatctgggcaattattgtgtgggtgaggatggaagggcagggaataattgaacatctaaagccttgaatgagagaatactaattcttttggtatgatgatactcagaaatggagatgttgtagaaaaaaaatatcctttggaattttaactaaaatcactgaatataggaaattaagagatccgggaccatatttgataagatttcctaaaaataatgtaattattaatgccaaaaactgctcatgtatcttgatctaattacgaaataattacatatttacctgataaatatgtatctaggtcttcaaggtcacatttatgtggaagtccaaagtcaagtccttaggggataattttgttttggctcagttgttccctgcttcctctctctctctttttttttttttttttttttgagatggagtctcgctctgtcgcccaggctggagtgcagtggcgcgatctcagctcactgcatcctccgcctcccgggtttaagcaattstctacatcagcctcctgagtagttgggattacaggcacctgccaccacgcctggctaatttttgtatttttagtagagacagggtttcactcttttggctaggctggtcttgaactcctgacctcgtgatccacccgcctcggcctcccaaagtgctgggattacaggcatgagccacatgcctggccctccctgcttcctctctagaatccaattagggatgtttgttactacttatgttgattaaaacagttaacaaactttttttctttttaaaatgtgagatcagtgaactctggttttaatataatctgaaacaaggtccttgggagtaatataattggtcacattctgtaaagcacattctgtttaggaatcacttatctcaaattataactcagggcctaactatatgagatggctgaaaaaataccacattgtctgttttcactagatgatgccaaaatattttgctttacgtatattacagttctttttaaaacactggaagactcatgttaaactctaattgtgaaggcagaaactctgctaatttttcacattaaaattctctttgaaaaaatac

SEQ ID NO: 5734 - DNA, 3232 bp, Homo sapiens
ccaaggaagtatcgcctggggatgctggaggagaggctagttccgatgggatcaaaggcacgaaaagcaaagaaccctattggctgccttgctgacaggtgtaaatcaggagtacccatcaatatggtttggtggaacagagtcacagaaaacaatttacagattcaaggcaagtccaccactactggccatctgatctacaaatgtggwggaatcaacaaaagaatcattgaaaaattggaaaaggaggctgctgagatgggaaagggctccttcaagtattcctgggtcttggataaactgaaagctgagcatgaatgtggacacagagacttcatcaaaaacatgattactgggacatctcaggctgactgtgctgtactgattattgctgctggtgttggtgaaattgaagctagtagctccaagaatgggcaggctggcgaccatgcccttctggcttacacactgggtgtgaaacaactaattgttggtgttaacaaaatgkattccactgagccaacttacagccagaagagatatgaggaaatcattaaggaagtcagcacttatattaataaaattggctacaatcctgacacagtagcatttgtgccatttgctggttggaattgtgacaacatgctggagccaagtgctaacatgccttggttcaagggatggaaagtcacccataaagatggcagcaccagtggaaccacactgcttgaggctctggactgcatcctcccactagcttgtccaactgacaagtccttgcaccagcctctccagggtgtctacaaaattggtggtattggtactgtgtctgtggaccgagtggagactggtgttctcaaacccgttatggtggtcacctttgctccagtcaacgttacaactgaagtctattgaaatgcaccatggagctttgagtgaagctcttcttggagacattatgggcttcaatgttatgaatgtgtctgtcaaagatgttcgttgggggagtgttgctgttgacagcaaaaatgacccacgaatgaaggcagttggcctcactgctcagtttgctgagctgaaggtaaagatttattgccattttggtaataagctggaagatggccctaaattcttgaagtctggtgatgccgccattgttgatatagttcctggcaagcccatgtgtgctgagagcttctcagaccatcctcttctgagttgttttgctgttggtgatgtgagacagacagttgctgtgggtgtcatcaaagcagtggacaagaaggctgctggagctggcaagacaccaaatcctactgcaagcgagtttattcctaaaggaggatcaacctccaggctgagtaacgtgtcccagtcaaatatgtctgccttctctcaagttttctctcacccatccatgggaagccctgctactgctggattagcgccagttgggaatttcaggaaactgaggcgagacgtttatggcgcagagagggatgtggctgctgcagctggcttggagacctgtcagacttgttctctaaaaccaattattgctccattaagaaacatttttacatcttcttcaggaatgtcgttgtctgctgggtcttcccctcttcattcccccaagattactccacatacttctcctgctcccagaagaagaagtcacactccaaatccagcaagttacatggtgccttctagtgcctctacatctgttaataatcctgtttctcagactccgtcttctggtcaggtgatccaaaaggaaactgttggtgggacgacttacttctatacagacacaactccagcacctttgactggaatggtgtttccaaactatcatatttatcctccaactgcacctcacgttgcttatatgcaaccgaaagcaaacgcaccttccttcttcatggctgatgaactccgacaggagctgatcaacagacatttaataacaatggctcaaattgatcaagcagatatgccagaaccactgccacctcccaaccggatacagaaatcaagtaattttggatatattacatcttgctacaaagctgtaaacagcaaagatgatctgccatattgccttcggaggatacatgctcttgtgtttgcatatgatttccatgctggaggagaaactatgatgagcagacactttaatgaccctaatgctgatgcctacttcaccaagagaaagtggggtcagcacgagggaccattgcccaggcagcatgctggattattgccagaatctcttatttgggcatatattgtccaactaagttctgcattgcgtaccattcatacagcaggtttggcatgtcgagttatggatccaacaaagattctgataactggcaaaacaaggttgcgagtaaattgtgttggagtttttgatgttttaacatttgataacagtcaaaataataatccattggcattaatggcccagtaccagcaagcagatctgatatcattaggaaaagttgtgttggctttggcttgcaactctttggcaggaattcagcgagagaatttacagaaagccatggaactggtgacaatcaactattcctctgacctgaaraatctgattttgtatttgttgactgaccaaaacaggatgcgaagtgtaaatgacatcatgcccatgattggtgctcgattttatactcaattggatgctgctcaaatgagaaatgatgtcatagaggaagaccttgcaaagctagatgctggtgtgccagaaaaaataagcctgatttccagagatgagaagagtgtacttgtggtgacctacagtgacttaaagcgctgctttgaaaatacttttcaagaactgattgcagctgcaaatggtcagttgtagtatttgctaaaaaagcacgcaggacatggctaaagaccttaaccaatagcaaattgcactacagctgaacttttcatcatctcattcacatttgggaaacgaacaggagatgagcaaagctgcttgcacttcagtcaggtacactgttacttgaaaggaagaatgtttcacttacccaagagctatggctgccattggaggctgttatctgtgaagaatttattttagatttaggagcaccatcaggtgaatgatgttcctgcttttgttttttccacttgtatatgcactaattttaattttttaaagactttttctgatctttgaacttttgccacattg

SEQ ID NO: 5735 - DNA, 1651 bp, Homo sapiens
gctgatcaacagacatttaataacaatggctcaaattgatcaagcagatatgccagcagttcctacagaggttgacagctaccatagcctattccctctagaaccactgccacctcccaaccggatacagaaatcaagtaattttggatatattacatcttgctacaaagctgtaaacagcaaagatgatctgccatattgccttcggaggatacatggttttcgtcttgttaacacaaagtgcatggtgttggtcgacatgtggaagaaaattcaacactcaaatatcgtaactttgcgtgaagtatttaccactaaagcatttgctgagccctctcttgtgtttgcatatgatttccatgctggaggagaaactatgatgagcagacactttaatgaccctaatgctgatgcctacttcaccaagagaaagtggggtcagcacgagggaccattgcccaggcagcatgctggattattgccagaatctcttatttgggcatatattgtccaactaagttctgcattgcgtaccattcatacagcaggtttggcatgtcgagttatggatccaacaaagattctgataactggcaaaacaaggttgcgagtaaattgtgttggagtttttgatgttttaacatttgataacagtcaaaataataatccattggcattaatggcccagtaccagcaagcagatctgatatcattaggaaaagttgtgttggctttggcttgcaactctttggcaggaattcagcgagagaatttacagaaagccatggaactggtgacaatcaactattcctctgacctgaaraatctgattttgtatttgttgactgaccaaaacaggatgcgaagtgtaaatgacatcatgcccatgattggtgctcgattttatactcaattggatgctgctcaaatgagaaatgatgtcatagaggaagaccttgcaaaggaggttcaaaatggaagactgtttaggctcctagcaaaattgggaacaatcaatgagaggccggagtttcagaaggatcccacttggtcagagactggagaccgttatctgttgaaactctttagggatcatctttttcatcaggtgacagaagcaggtgctccctggattgacctcagtcatataatttcttgtcttaacaagctagatgctggtgtgccagaaaaaataagcctgatttccagagatgagaagagtgtacttgtggtgacctacagtgacttaaagcgctgctttgaaaatacttttcaagaactgattgcagctgcaaatggtcagttgtagtatttgctaaaaaagcacgcaggacatggctaaagaccttaaccaatagcaaattgcactacagctgaacttttcatcatctcattcacatttgggaaacgaacaggagatgagcaaagctgcttgcacttcagtcaggtacactgttacttgaaaggaagaatgtttcacttacccaagagctatggctgccattggaggctgttatctgtgaagaatttattttagatttaggagcaccatcaggtgaatgatgttcctgcttttgttttttccacttgtatatgcactaattttaattttttaaagactttttctgatctttgaacttttgccacattg

SEQ ID NO: 5736 - DNA, 5272 bp, Homo sapiens
aggtgacagctggagggaggagcgggggtggagccgggggaagggtggggaggggatgggctggagctccgggcagtgtgcgaggcgcacgcacaggagcctgcactctgcgtcccgcaccccagcagccgcgccatgagccggagtctcttgctcyggttcttgctgttcctgctcctgctcccgccgctccccgtcctgctcgcggacccaggggcgcccacgccagtgaatccctgttgttactatccatgccarcaccagggcatctgtgtccgcttcggccttgaccgctaccagtgtgactgcacccgcacgggctattccggccccaactgcaccatccctggcctgtggacctggctccggaattcactgcggcccagcccctctttcacccacttcctgctcactcacgggcgctggttctgggagtttgtcaatgccaccttcatccragagatgctcatgcgcctggtactcacagtgcgctccaaccttatccccagtccccccacctacaactcagcacatgactacatcagctgggagtctttctccaacgtgagctattacactcgtattctgccctctgtgcctaaagattgccccacacccatgggaaccaaagggaagaagcagttgccagatgcccagctcctggcccgccgcttcctgctcaggaggamgttcatacctgacccccaaggcaccaacctcatgtttgccttctttgcacaacacttcacccaccagttcttcaaaacttctggmaagatgggtcctggcttcaccaaggccttgggccatggggtagacctcggccacatttatggagacaatmtggagcgtcagtatcaactgcggctctttaaggatgggaaactcaagtaccaggtgctggatggagaaatgtacccgccctcggtagaagaggcgcctgtgttgatgcactacccccgaggcatcccgccccagagccagatggctgtgggccaggaggtgtttgggctgcttcctgggctcatgctgtatgccacgctctggctacgtgagcacaaccgtgtgtgtgacctgctgaaggcygagcaccccacctggggcgatgagcagcttttccagacgacccgcctcatcctcataggggagaccatcaagattgtcatcgaggagtacgtgcagcagctgagtggctatttcctgcagctgaratttgacccagagctgctgttcggtgtccagttccaataccgcaaccgcattgccatggagttcaaccatctctaccactggcaccccctcatgcctgactccttcaaggtgggctcccaggagtacagctacgagcagttcttgttcaacacctccatgttggtggactatggggttgaggccctggtggatgccttctctcgccagattgctggccggatcggtgggggcaggaacatggaccaccacrtcctgcatgtggctgtggatgtcatcagggagtctcgggagatgcggctgcagcccttcaatgagtaccgcragaggtttggcatgaaaccctacacctcyttccaggagctcgtaggagagaaggagatggcagcagagttggaggaattgtatggagacattgatgcrttggagttctacccyggactgcttcttgaaaagtgccatccaaactctatctttggggagagtatgatagagattggggctcccttttccctcaagggtctcctagggaatcccatctgttctccggagtactggaagccgagcacatttggcggcgaggtgggctttaacattgtcaagacggccacactgaagaagctggtctgcctcaacaccaagacctgtccctacgtttccttccgtgtgccggatgccagtcaggatgatgggcctgctgtggagcgaccatccacagagctctgaggggcaggaaagcagcattctggaggggagagctttgtgcttgtcattccagagtgctgaggccagggctgatggtcttaaatgctcattttctggtttggcatggtgagtgttggggytgacatttagaactttaagtctcacccattatctggaatatygtgattctgtttattcttccagaatgctgaactccttgttagcccttcagattgttaggagtggttctcatttggtctgccagaatackgggttcttagttgacaacctagaatgtcagatttctggttgatttgtaacacagtcattctaggatgtggagctactgatgaaatctgctagaaagttagggggttcttattttgcattccagaatcttgactttctgattggtgattcaaagtgttgtgttcctggctgatgatccagaacagtggctcgtatcccaaatctgtcagcatctggctgtctagaatgtggatttgattcattttcctgttcagtgagatatcatagagacggagatcctaaggtccaacaagaatgcattccctgaatctgtgcctgcactgagagggcaaggargtggggtgttcttcttgggacccccactaagaccctggtctgaggatgtagagagaacaggtgggctgtattcacgccattggttggaagctaccagagctctatccccatccaggtcttgactcatggcagctgtttctcatgaagctaataaaattcgctttctaaagttacctgttatatatctcttttggtcccatcctctaaagcagaggcaacactggaacatggctagcctttcttgtagccatggctgggcgtgctagaggttgcagcatgagactttctgctgggatccttgggcccatcactgtatagacatgctaccactggtacttcctttctccctgcgggccaggcactgcccttttcaggaagctctcttaaaatacccattgccccagacctggaagatataacattcagttcccaccatctgattaaaacaacttcctcccttacagagcatacaacagagggggcacccggggaggagagcacatactgtgttccaatttcacgcttttaattctcatttgttctcacaccaacagtgtgaagtgcgtggtataatctccatttcaaaaccaaggaagcagcctcagagtggtcgagtgacacacctcacgcaggctgagtccagagcttgtgctcctcttgattcctggtttgactcagttccaggcctgatcttgcctgtctggctcagggtcaaagacagaatggtggagtgtagcctccacctgatattcaggctactcattcagtcccaaatatgtattttcctaagtgtttactatgtgccagttcctgtaacaggtgtggggacacagcagtgagtaatcaatacagacaaggttctgcccttatggagctcacactccagtggcagacaaacagaccataaataaggaaacgatgaaataagatatatacaaggtgagtgtgacttcccttctaaccccctctgctctgtcctcccctattgcgctctcaagaccagagacccaacagcagtgatctcagggcagacagccctccactccagctctgagacccttttctcaggacctctgtaggcagcagagagagaggacagaggggtaagatgaggggttgagggaaggttcttcatgatccacactttgggcttagtatttctcaggaagagctatggcccagaaacaacaggggaaactagagttcggtctgacagtccttggggttaagtctcctgtcttatggtccagaaactcctgtttctccttagttggctggaaactgctcccatcattccttctggcctctgctgaatgcagggaatgcaatccttccctgctcttgcagttgctctgacgtagaaagatccttcgggtgctggaagtctccatgaagagcttgtgtcctgtcctttcttgcagattctatttcccctcttctgctaatacctcttactttgcttgagaatcctctcctttcttattaatttcagtcttggtggttctatcaggggtgcattctggccaaggggtgggcctgtgaatcaatcctgggcaatcagacaccctctccttaaaaactggcccgtggagactgagatcactgactctgactcatccccacagctggctctgacaagatggtccatttgttcctgcttccgagatccccagggcagcctggatccctgcccttctcaagactttagcttttccttccatccggtggcctattccaggaattcctcttttgcttaaatcagttggagtttgtgtctgttgcttgtaatmaagcctttatggctgctgggctgagtgacacaagcactttaatggcctggagggacttttaatcagtgaagatgcaatcagacaagtgttttggaaagagcaccctcgagaagggtggatgacagggcagagcaggaaggacaggaagctggcagaacggaggaggctgcagccgtggtccaaccaggagctgatggcagctggggctaggggaagggctttgagggtggaaggatgggatgggttccagaggtattcctctcttaaatgcaagtgcctagattaggtagactttgcttagtattgacaackgcacatgaaagttttgcaaagggaaacaggctaaatgcaccaagaaagcttcttcagagtgaagaatcttaatgcttgtaatttaaacatttgttcctggagttttgatttggtggatgtgatggttggttttatttgtcagtttggttgggctatagcacacagttatttaatcaaacagtaatctaggtgtggctgtgaaggtatkttgtagatgtgattaacatctacaatcagttgactttaagtgaaagagattacttaaataatttgggtgagctgcacctgattagttgaaaggcctcaagaacaaacactgcagtttcctggaaaagaagaaactttgcctcaagactatagccatcgactcctgcctgagtttccagcctgctagtctgccctatggatttgaagtttgccaaccccaacaattgtgtgaattaatttctaaaaataaagctatatacagccatcctttggtatttgtgggggatttgtttcaggatctctacagataccaaaatctgtggttcctcaagtcctttatatgaagtggtatagtatttgcatataacctatgtgcaatctcctgtataacttcaatcatctctagattacttataatacctaatacagtgtaaatgctagtt

SEQ ID NO: 5737 - DNA, 5161 bp, Homo sapiens
aggtgacagctggagggaggagcgggggtggagccgggggaagggtggggaggggatgggctggagctccgggcagtgtgcgaggcgcacgcacaggagcctgcactctgcgtcccgcaccccagcagccgcgccatgagccggagtctcttgctcyggttcttgctgttcctgctcctgctcccgccgctccccgtcctgctcgcggacccaggggcgcccacgccagtgaatccctgttgttactatccatgccarcaccagggcatctgtgtccgcttcggccttgaccgctaccagtgtgactgcacccgcacgggctattccggccccaactgcaccatccctggcctgtggacctggctccggaattcactgcggcccagcccctctttcacccacttcctgctcactcacgggcgctggttctgggagtttgtcaatgccaccttcatccragagatgctcatgcgcctggtactcacagtgcgctccaaccttatccccagtccccccacctacaactcagcacatgactacatcagctgggagtctttctccaacgtgagctattacactcgtattctgccctctgtgcctaaagattgccccacacccatgggaaccaaagggaagaagcagttgccagatgcccagctcctggcccgccgcttcctgctcaggaggamgttcatacctgacccccaaggcaccaacctcatgtttgccttctttgcacaacacttcacccaccagttcttcaaaacttctggmaagatgggtcctggcttcaccaaggccttgggccatggggtagacctcggccacatttatggagacaatmtggagcgtcagtatcaactgcggctctttaaggatgggaaactcaagtaccaggtgctggatggagaaatgtacccgccctcggtagaagaggcgcctgtgttgatgcactacccccgaggcatcccgccccagagccagatggctgtgggccaggaggtgtttgggctgcttcctgggctcatgctgtatgccacgctctggctacgtgagcacaaccgtgtgtgtgacctgctgaaggcygagcaccccacctggggcgatgagcagcttttccagacgacccgcctcatcctcataggggagaccatcaagattgtcatcgaggagtacgtgcagcagctgagtggctatttcctgcagctgaratttgacccagagctgctgttcggtgtccagttccaataccgcaaccgcattgccatggagttcaaccatctctaccactggcaccccctcatgcctgactccttcaagatcggtgggggcaggaacatggaccaccacrtcctgcatgtggctgtggatgtcatcagggagtctcgggagatgcggctgcagcccttcaatgagtaccgcragaggtttggcatgaaaccctacacctcyttccaggagctcgtaggagagaaggagatggcagcagagttggaggaattgtatggagacattgatgcrttggagttctacccyggactgcttcttgaaaagtgccatccaaactctatctttggggagagtatgatagagattggggctcccttttccctcaagggtctcctagggaatcccatctgttctccggagtactggaagccgagcacatttggcggcgaggtgggctttaacattgtcaagacggccacactgaagaagctggtctgcctcaacaccaagacctgtccctacgtttccttccgtgtgccggatgccagtcaggatgatgggcctgctgtggagcgaccatccacagagctctgaggggcaggaaagcagcattctggaggggagagctttgtgcttgtcattccagagtgctgaggccagggctgatggtcttaaatgctcattttctggtttggcatggtgagtgttggggytgacatttagaactttaagtctcacccattatctggaatatygtgattctgtttattcttccagaatgctgaactccttgttagcccttcagattgttaggagtggttctcatttggtctgccagaatackgggttcttagttgacaacctagaatgtcagatttctggttgatttgtaacacagtcattctaggatgtggagctactgatgaaatctgctagaaagttagggggttcttattttgcattccagaatcttgactttctgattggtgattcaaagtgttgtgttcctggctgatgatccagaacagtggctcgtatcccaaatctgtcagcatctggctgtctagaatgtggatttgattcattttcctgttcagtgagatatcatagagacggagatcctaaggtccaacaagaatgcattccctgaatctgtgcctgcactgagagggcaaggargtggggtgttcttcttgggacccccactaagaccctggtctgaggatgtagagagaacaggtgggctgtattcacgccattggttggaagctaccagagctctatccccatccaggtcttgactcatggcagctgtttctcatgaagctaataaaattcgctttctaaagttacctgttatatatctcttttggtcccatcctctaaagcagaggcaacactggaacatggctagcctttcttgtagccatggctgggcgtgctagaggttgcagcatgagactttctgctgggatccttgggcccatcactgtatagacatgctaccactggtacttcctttctccctgcgggccaggcactgcccttttcaggaagctctcttaaaatacccattgccccagacctggaagatataacattcagttcccaccatctgattaaaacaacttcctcccttacagagcatacaacagagggggcacccggggaggagagcacatactgtgttccaatttcacgcttttaattctcatttgttctcacaccaacagtgtgaagtgcgtggtataatctccatttcaaaaccaaggaagcagcctcagagtggtcgagtgacacacctcacgcaggctgagtccagagcttgtgctcctcttgattcctggtttgactcagttccaggcctgatcttgcctgtctggctcagggtcaaagacagaatggtggagtgtagcctccacctgatattcaggctactcattcagtcccaaatatgtattttcctaagtgtttactatgtgccagttcctgtaacaggtgtggggacacagcagtgagtaatcaatacagacaaggttctgcccttatggagctcacactccagtggcagacaaacagaccataaataaggaaacgatgaaataagatatatacaaggtgagtgtgacttcccttctaaccccctctgctctgtcctcccctattgcgctctcaagaccagagacccaacagcagtgatctcagggcagacagccctccactccagctctgagacccttttctcaggacctctgtaggcagcagagagagaggacagaggggtaagatgaggggttgagggaaggttcttcatgatccacactttgggcttagtatttctcaggaagagctatggcccagaaacaacaggggaaactagagttcggtctgacagtccttggggttaagtctcctgtcttatggtccagaaactcctgtttctccttagttggctggaaactgctcccatcattccttctggcctctgctgaatgcagggaatgcaatccttccctgctcttgcagttgctctgacgtagaaagatccttcgggtgctggaagtctccatgaagagcttgtgtcctgtcctttcttgcagattctatttcccctcttctgctaatacctcttactttgcttgagaatcctctcctttcttattaatttcagtcttggtggttctatcaggggtgcattctggccaaggggtgggcctgtgaatcaatcctgggcaatcagacaccctctccttaaaaactggcccgtggagactgagatcactgactctgactcatccccacagctggctctgacaagatggtccatttgttcctgcttccgagatccccagggcagcctggatccctgcccttctcaagactttagcttttccttccatccggtggcctattccaggaattcctcttttgcttaaatcagttggagtttgtgtctgttgcttgtaatmaagcctttatggctgctgggctgagtgacacaagcactttaatggcctggagggacttttaatcagtgaagatgcaatcagacaagtgttttggaaagagcaccctcgagaagggtggatgacagggcagagcaggaaggacaggaagctggcagaacggaggaggctgcagccgtggtccaaccaggagctgatggcagctggggctaggggaagggctttgagggtggaaggatgggatgggttccagaggtattcctctcttaaatgcaagtgcctagattaggtagactttgcttagtattgacaackgcacatgaaagttttgcaaagggaaacaggctaaatgcaccaagaaagcttcttcagagtgaagaatcttaatgcttgtaatttaaacatttgttcctggagttttgatttggtggatgtgatggttggttttatttgtcagtttggttgggctatagcacacagttatttaatcaaacagtaatctaggtgtggctgtgaaggtatkttgtagatgtgattaacatctacaatcagttgactttaagtgaaagagattacttaaataatttgggtgagctgcacctgattagttgaaaggcctcaagaacaaacactgcagtttcctggaaaagaagaaactttgcctcaagactatagccatcgactcctgcctgagtttccagcctgctagtctgccctatggatttgaagtttgccaaccccaacaattgtgtgaattaatttctaaaaataaagctatatacagccatcctttggtatttgtgggggatttgtttcaggatctctacagataccaaaatctgtggttcctcaagtcctttatatgaagtggtatagtatttgcatataacctatgtgcaatctcctgtataacttcaatcatctctagattacttataatacctaatacagtgtaaatgctagtt

SEQ ID NO: 5738 - DNA, 303 bp, Homo sapiens
ggacatgcttgtgacccgccttctggaaggaagtggctaactctggtgaccgccatggagcagtgggttctggtggagatggtacaggcgctttacgaggctcctgattaccatcttattttggaagggattctgatactctggataatcagacttcttttctctaagacttacaaattacaagaacgatctgatcttacagtcaaggaaaaagaagaactcattgaagagtggcaaccagaacctcttgttcctcctgtcccaaaagaccatcctgctctcaactayaacattgttttagga

SEQ ID NO: 5739 - DNA, 4661 bp, Homo sapiens
tccgtgcgcccggttgcagcgtggacgccggatgagttgcttttaggcttgctggcccgcggggctgtccaggcacgcgaggcccctcaggtacgccctctcttccctgcaggatccggccctcaaagacgagggtcacgcacgcgttacaaccccgaaacagtagcacaagatttaatttttaaaagagcgtgtttcttcggggcttgccgttcgttcgtttccagcctcaggaatttatggtcgcctttttgaatgagcaacaaaatgcttcaacaagttccagaaaacataaattttcctgctgaagaagagaaaatcttggagttttggactgaatttaattgttttcaggaatgcttaaagcaatcaaaacataaaccaaaatttaccttctatgatggtcctccttttgcaactggactgcctcactatggacatatacttgcgggtacaattaaagatatagttacaagatatgctcaccagagtgggtttcatgttgacagaagatttggatgggattgccatggcttacctgtggaatatgaaattgataagacactgggaatcagaggaccagaggatgtggccaaaatggggattacagagtataacaatcagtgccgagcaattgtgatgagatattctgctgagtggaagtctactgttagcagacttggccgatggattgactttgacaatgactataaaactctgtatccacaattcatggaatcagtctggtgggtcttcaaacaactctatgataaaggccttgtttatagaggtgtgaaagtcatgcccttctctacggcatgtaacactccactttccaacttcgagtcacaccagaattataaggatgttcaagatccttcagtatttgtaactttccctttggaagaagatgaaactgtatctttagttgcttggacaaccactccctggactctacctagtaaccttgctgtgtgtgttaatccagaaatgcaatatgtgaaaattaaagatgttgccagaggacgattactcattttaatggaagccagattgtcagccctctataaattggagagtgactatgagatccttgaaagatttcctggtgcctatcttaaaggcaagaagtacaggcccctgtttgactatttcctgaagtgtaaagagaatggcgctttcactgtgcttgttgacaactatgtgaaggaagaagaaggcacaggggttgtccaccaagctccttacttcggtgctgaggactatcgggtctgtatggactttaacattattcggaaagactcactccctgtttgccctgtggatgcttcaggctgcttcacaacggaggtgacagatttcgcaggacagtatgtgaaggatgctgacaaaagtatcatcaggactttgaaggaacaaggccgacttctggttgccaccaccttcactcacagctaccctttttgctggagatcagacactcctctaatttacaaagcagtgcccagctggtttgtgcgagtggagaacatggtggaccagctcctaaggaacaatgacctgtgctactgggtcccagagttggtacgagaaaaacgatttggaaattggctgaaagatgcacgtgactggacaatttccagaaacagatactggggcacccccatcccactgtgggtcagcgatgactttgaggaggtggtatgcattgggtcagtggcggaacttgaagaactgtcaggagcaaagatctcagatctccacagagagagtgttgaccacctgaccattccttcacgctgtgggaagggatccttgcaccgcatctctgaagtgtttgactgttggtttgagagtggcagcatgccctatgctcaggttcattacccgtttgaaaacaagagggagtttgaggatgcttttcctgcagatttcattgccgagggcatcgaccaaaccagaggatggttttataccctgctggtgctggccacggccctctttggacaaccgcctttcaagaacgtaattgtgaatgggcttgtcctggcaagtgatggccaaaaaatgagcaaacggaaaaagaattatccagatccagtttccatcatccagaagtatggtgctgatgccctcagattatatctgattaactcccctgtggtgagagcagaaaacctccgctttaaagaagagggtgtgcgggacgtccttaaggatgtactgctcccatggtacaatgcctatcgcttcttaatccagaacgttctgaggctccagaaggaggaagaaatagaatttctctacaatgagaacayggttagagaaagccccaacattacagaccggtggatcctgtccttcatgcagtctctcattggcttctttgagactgaaatggcagcttataggctttatactgtggtgcctcgcctggtcaagtttgtagatattctgaccaattggtatgttagaatgaaccgcagaagattaaagggtgaaaatgggatggaggattgtgtcatggccctagaaaccttgtttagtgttctgctttctctttgcagacttatggctccctacacaccttttctcactgaattgatgtaccagaatctaaaggtgctgattgaccctgtttctgttcaggacaaggacacactcagcattcactacctcatgctgccccgtgttcgagaagaattgattgacaagaaaacagagagtgcagtatctcagatgcagtctgtgattgaacttggaagagtgatcagagaccgaaaaactattcccataaagtatcctttgaaagaaattgtggttatccatcaagatccagaagctcttaaagatatcaagtctttggagaagtatatcattgaggaactcaatgttcgaaaagttacactgtctacagataaaaacaagtatggcattcggctaagggcagaaccagatcacatggtcctggggaagcgtctgaagggagcctttaaggcagtgatgacgtccatcaagcagttgagcagtgaggagctggagcagttccagaagactgggaccattgttgtggaaggccatgaattgcacgatgaagacatccgcctcatgtacacctttgatcaggccacaggtgggactgcgcaatttgaagcacactcagatgctcaggctttggtcctcttagatgtcactcctgaccagtcaatggtagatgaaggaatggckcgggaagtcatcaatcgcatacagaaacttcgcaaaaagtgcaatctggttccaactgatgaaatcacagtgtactataaagcaaagtctgaaggaacatatctgaatagtgttattgaaagccacacagagttcatatttaccaccataaaggctcccttgaaaccatatccartttctccatcggataaagtccttattcaagaaaaaacacagttgaagggatctgaactggaaattacactcaccagaggatcttcccttcctggtcctgcttgtgcatatgtcaatcttaacatttgtgcaaatggcagtgaacaaggtggagtattgctcctggaaaatccaaaaggtgacaataggttggaccttttaaagctgaagagtgttgtcactagcatttttggtgtgaaaaatacagagctggctgtcttccatgatgaaacagaaatacaaaaccaaactgacttactgagtcttagtggaaaaacactttgtgtgactgcaggatcggctccctctctgatcaacagttctagtactcttctttgtcagtatatcaacctacagctcctgaatgcaragccacaagagtgtttaatggggacagtgggcactctcctgcttgaaaacccacttgggcagaatggactcacccaccaaggtcttctgtatgaagcagccaaggtgtttggccttcggagcaggaagctaaagctgtttctgaatgagacccaaacgcaggaaattacagaagacatccccgtgaagactttgaatatgaagactgtgtatgtttctgtgttaccaacaacagcagacttctagcatgtacttatcaatgttgttcggtcagcccttccctaattacacctatcccctacacatacatgcacatagacacacacatgaacacactgaagatatttccttcaggtgtgtgtaaaataygctgcttggattgaaattcaaatgggattgattagtcaagtaacttgagwcctcacagtaatcttcacacttaaccttagacacctatgcagtcatgttgggagyaggttacaatgttacttcagcccacagtttatttctatacttgagttcttaagtacagaagatagaagtgatttaaatggcatagtatatatatcattttctggccttttaaaatttatttgagacctcttgatgaaatgracatattatatatttctgccacctggattttcctggataatttgatggaatattttaagtttcagtaaatcagaacaataaacaaactcagatataaatgtgttgaaagtaattcattctcccatagataaatgaaacttgaaatgtgtaaactttgaagaacataaaaacttcatggtggtttcttattaagacagtggactagacatctaataaaacttctttccaaaatcccr

SEQ ID NO: 5740 - DNA, 4525 bp, Homo sapiens
agcgcgttgcatcacctccgtgcgcccggttgcagcgtggacgccggatgagttgcttttaggcttgctggcccgcggggctgtccaggcacgcgaggcccctcagcaacaaaatgcttcaacaagttccagaaaacataaattttcctgctgaagaagagaaaatcttggagttttggactgaatttaattgttttcaggaatgcttaaagcaatcaaaacataaaccaaaatttaccttctatgatggtcctccttttgcaactggactgcctcactatggacatatacttgcgggtacaattaaagatatagttacaagatatgctcaccagagtgggtttcatgttgacagaagatttggatgggattgccatggcttacctgtggaatatgaaattgataagacactgggaatcagaggaccagaggatgtggccaaaatggggattacagagtataacaatcagtgccgagcaattgtgatgagatattctgctgagtggaagtctactgttagcagacttggccgatggattgactttgacaatgactataaaactctgtatccacaattcatggaatcagtctggtgggtcttcaaacaactctatgataaaggccttgtttatagaggtgtgaaagtcatgcccttctctacggcatgtaacactccactttccaacttcgagtcacaccagaattataaggatgttcaagatccttcagtatttgtaactttccctttggaagaagatgaaactgtatctttagttgcttggacaaccactccctggactctacctagtaaccttgctgtgtgtgttaatccagaaatgcaatatgtgaaaattaaagatgttgccagaggacgattactcattttaatggaagccagattgtcagccctctataaattggagagtgactatgagatccttgaaagatttcctggtgcctatcttaaaggcaagaagtacaggcccctgtttgactatttcctgaagtgtaaagagaatggcgctttcactgtgcttgttgacaactatgtgaaggaagaagaaggcacaggggttgtccaccaagctccttacttcggtgctgaggactatcgggtctgtatggactttaacattattcggaaagactcactccctgtttgccctgtggatgcttcaggctgcttcacaacggaggtgacagatttcgcaggacagtatgtgaaggatgctgacaaaagtatcatcaggactttgaaggaacaaggccgacttctggttgccaccaccttcactcacagctaccctttttgctggagatcagacactcctctaatttacaaagcagtgcccagctggtttgtgcgagtggagaacatggtggaccagctcctaaggaacaatgacctgtgctactgggtcccagagttggtacgagaaaaacgatttggaaattggctgaaagatgcacgtgactggacaatttccagaaacagatactggggcacccccatcccactgtgggtcagcgatgactttgaggaggtggtatgcattgggtcagtggcggaacttgaagaactgtcaggagcaaagatctcagatctccacagagagagtgttgaccacctgaccattccttcacgctgtgggaagggatccttgcaccgcatctctgaagtgtttgactgttggtttgagagtggcagcatgccctatgctcaggttcattacccgtttgaaaacaagagggagtttgaggatgcttttcctgcagatttcattgccgagggcatcgaccaaaccagaggatggttttataccctgctggtgctggccacggccctctttggacaaccgcctttcaagaacgtaattgtgaatgggcttgtcctggcaagtgatggccaaaaaatgagcaaacggaaaaagaattatccagatccagtttccatcatccagaagtatggtgctgatgccctcagattatatctgattaactcccctgtggtgagagcagaaaacctccgctttaaagaagagggtgtgcgggacgtccttaaggatgtactgctcccatggtacaatgcctatcgcttcttaatccagaacgttctgaggctccagaaggaggaagaaatagaatttctctacaatgagaacayggttagagaaagccccaacattacagaccggtggatcctgtccttcatgcagtctctcattggcttctttgagactgaaatggcagcttataggctttatactgtggtgcctcgcctggtcaagtttgtagatattctgaccaattggtatgttagaatgaaccgcagaagattaaagggtgaaaatgggatggaggattgtgtcatggccctagaaaccttgtttagtgttctgctttctctttgcagacttatggctccctacacaccttttctcactgaattgatgtaccagaatctaaaggtgctgattgaccctgtttctgttcaggacaaggacacactcagcattcactacctcatgctgccccgtgttcgagaagaattgattgacaagaaaacagagagtgcagtatctcagatgcagtctgtgattgaacttggaagagtgatcagagaccgaaaaactattcccataaagtatcctttgaaagaaattgtggttatccatcaagatccagaagctcttaaagatatcaagtctttggagaagtatatcattgaggaactcaatgttcgaaaagttacactgtctacagataaaaacaagtatggcattcggctaagggcagaaccagatcacatggtcctggggaagcgtctgaagggagcctttaaggcagtgatgacgtccatcaagcagttgagcagtgaggagctggagcagttccagaagactgggaccattgttgtggaaggccatgaattgcacgatgaagacatccgcctcatgtacacctttgatcaggccacaggtgggactgcgcaatttgaagcacactcagatgctcaggctttggtcctcttagatgtcactcctgaccagtcaatggtagatgaaggaatggckcgggaagtcatcaatcgcatacagaaacttcgcaaaaagtgcaatctggttccaactgatgaaatcacagtgtactataaagcaaagtctgaaggaacatatctgaatagtgttattgaaagccacacagagttcatatttaccaccataaaggctcccttgaaaccatatccartttctccatcggataaagtccttattcaagaaaaaacacagttgaagggatctgaactggaaattacactcaccagaggatcttcccttcctggtcctgcttgtgcatatgtcaatcttaacatttgtgcaaatggcagtgaacaaggtggagtattgctcctggaaaatccaaaaggtgacaataggttggaccttttaaagctgaagagtgttgtcactagcatttttggtgtgaaaaatacagagctggctgtcttccatgatgaaacagaaatacaaaaccaaactgacttactgagtcttagtggaaaaacactttgtgtgactgcaggatcggctccctctctgatcaacagttctagtactcttctttgtcagtatatcaacctacagctcctgaatgcaragccacaagagtgtttaatggggacagtgggcactctcctgcttgaaaacccacttgggcagaatggactcacccaccaaggtcttctgtatgaagcagccaaggtgtttggccttcggagcaggaagctaaagctgtttctgaatgagacccaaacgcagggtaaggagattgtggaccaaattacagaagacatccccgtgaagactttgaatatgaagactgtgtatgtttctgtgttaccaacaacagcagacttctagcatgtacttatcaatgttgttcggtcagcccttccctaattacacctatcccctacacatacatgcacatagacacacacatgaacacactgaagatatttccttcaggtgtgtgtaaaataygctgcttggattgaaattcaaatgggattgattagtcaagtaacttgagwcctcacagtaatcttcacacttaaccttagacacctatgcagtcatgttgggagyaggttacaatgttacttcagcccacagtttatttctatacttgagttcttaagtacagaagatagaagtgatttaaatggcatagtatatatatcattttctggccttttaaaatttatttgagacctcttgatgaaatgracatattatatatttctgccacctggattttcctggataatttgatggaatattttaagtttcagtaaatcagaacaataaacaaactcagatataaatgtgttgaaagtaattcattctcccatagataaatgaaacttgaaatgtgtaaactttgaagaacataaaaacttcatggtggtttcttattaagacagtggactagacatctaataaaacttctttccaaaatcccr

SEQ ID NO: 5741 - DNA, 4507 bp, Homo sapiens
agcgcgttgcatcacctccgtgcgcccggttgcagcgtggacgccggatgagttgcttttaggcttgctggcccgcggggctgtccaggcacgcgaggcccctcagcaacaaaatgcttcaacaagttccagaaaacataaattttcctgctgaagaagagaaaatcttggagttttggactgaatttaattgttttcaggaatgcttaaagcaatcaaaacataaaccaaaatttaccttctatgatggtcctccttttgcaactggactgcctcactatggacatatacttgcgggtacaattaaagatatagttacaagatatgctcaccagagtgggtttcatgttgacagaagatttggatgggattgccatggcttacctgtggaatatgaaattgataagacactgggaatcagaggaccagaggatgtggccaaaatggggattacagagtataacaatcagtgccgagcaattgtgatgagatattctgctgagtggaagtctactgttagcagacttggccgatggattgactttgacaatgactataaaactctgtatccacaattcatggaatcagtctggtgggtcttcaaacaactctatgataaaggccttgtttatagaggtgtgaaagtcatgcccttctctacggcatgtaacactccactttccaacttcgagtcacaccagaattataaggatgttcaagatccttcagtatttgtaactttccctttggaagaagatgaaactgtatctttagttgcttggacaaccactccctggactctacctagtaaccttgctgtgtgtgttaatccagaaatgcaatatgtgaaaattaaagatgttgccagaggacgattactcattttaatggaagccagattgtcagccctctataaattggagagtgactatgagatccttgaaagatttcctggtgcctatcttaaaggcaagaagtacaggcccctgtttgactatttcctgaagtgtaaagagaatggcgctttcactgtgcttgttgacaactatgtgaaggaagaagaaggcacaggggttgtccaccaagctccttacttcggtgctgaggactatcgggtctgtatggactttaacattattcggaaagactcactccctgtttgccctgtggatgcttcaggctgcttcacaacggaggtgacagatttcgcaggacagtatgtgaaggatgctgacaaaagtatcatcaggactttgaaggaacaaggccgacttctggttgccaccaccttcactcacagctaccctttttgctggagatcagacactcctctaatttacaaagcagtgcccagctggtttgtgcgagtggagaacatggtggaccagctcctaaggaacaatgacctgtgctactgggtcccagagttggtacgagaaaaacgatttggaaattggctgaaagatgcacgtgactggacaatttccagaaacagatactggggcacccccatcccactgtgggtcagcgatgactttgaggaggtggtatgcattgggtcagtggcggaacttgaagaactgtcaggagcaaagatctcagatctccacagagagagtgttgaccacctgaccattccttcacgctgtgggaagggatccttgcaccgcatctctgaagtgtttgactgttggtttgagagtggcagcatgccctatgctcaggttcattacccgtttgaaaacaagagggagtttgaggatgcttttcctgcagatttcattgccgagggcatcgaccaaaccagaggatggttttataccctgctggtgctggccacggccctctttggacaaccgcctttcaagaacgtaattgtgaatgggcttgtcctggcaagtgatggccaaaaaatgagcaaacggaaaaagaattatccagatccagtttccatcatccagaagtatggtgctgatgccctcagattatatctgattaactcccctgtggtgagagcagaaaacctccgctttaaagaagagggtgtgcgggacgtccttaaggatgtactgctcccatggtacaatgcctatcgcttcttaatccagaacgttctgaggctccagaaggaggaagaaatagaatttctctacaatgagaacayggttagagaaagccccaacattacagaccggtggatcctgtccttcatgcagtctctcattggcttctttgagactgaaatggcagcttataggctttatactgtggtgcctcgcctggtcaagtttgtagatattctgaccaattggtatgttagaatgaaccgcagaagattaaagggtgaaaatgggatggaggattgtgtcatggccctagaaaccttgtttagtgttctgctttctctttgcagacttatggctccctacacaccttttctcactgaattgatgtaccagaatctaaaggtgctgattgaccctgtttctgttcaggacaaggacacactcagcattcactacctcatgctgccccgtgttcgagaagaattgattgacaagaaaacagagagtgcagtatctcagatgcagtctgtgattgaacttggaagagtgatcagagaccgaaaaactattcccataaagtatcctttgaaagaaattgtggttatccatcaagatccagaagctcttaaagatatcaagtctttggagaagtatatcattgaggaactcaatgttcgaaaagttacactgtctacagataaaaacaagtatggcattcggctaagggcagaaccagatcacatggtcctggggaagcgtctgaagggagcctttaaggcagtgatgacgtccatcaagcagttgagcagtgaggagctggagcagttccagaagactgggaccattgttgtggaaggccatgaattgcacgatgaagacatccgcctcatgtacacctttgatcaggccacaggtgggactgcgcaatttgaagcacactcagatgctcaggctttggtcctcttagatgtcactcctgaccagtcaatggtagatgaaggaatggckcgggaagtcatcaatcgcatacagaaacttcgcaaaaagtgcaatctggttccaactgatgaaatcacagtgtactataaagcaaagtctgaaggaacatatctgaatagtgttattgaaagccacacagagttcatatttaccaccataaaggctcccttgaaaccatatccartttctccatcggataaagtccttattcaagaaaaaacacagttgaagggatctgaactggaaattacactcaccagaggatcttcccttcctggtcctgcttgtgcatatgtcaatcttaacatttgtgcaaatggcagtgaacaaggtggagtattgctcctggaaaatccaaaaggtgacaataggttggaccttttaaagctgaagagtgttgtcactagcatttttggtgtgaaaaatacagagctggctgtcttccatgatgaaacagaaatacaaaaccaaactgacttactgagtcttagtggaaaaacactttgtgtgactgcaggatcggctccctctctgatcaacagttctagtactcttctttgtcagtatatcaacctacagctcctgaatgcaragccacaagagtgtttaatggggacagtgggcactctcctgcttgaaaacccacttgggcagaatggactcacccaccaaggtcttctgtatgaagcagccaaggtgtttggccttcggagcaggaagctaaagctgtttctgaatgagacccaaacgcaggaaattacagaagacatccccgtgaagactttgaatatgaagactgtgtatgtttctgtgttaccaacaacagcagacttctagcatgtacttatcaatgttgttcggtcagcccttccctaattacacctatcccctacacatacatgcacatagacacacacatgaacacactgaagatatttccttcaggtgtgtgtaaaataygctgcttggattgaaattcaaatgggattgattagtcaagtaacttgagwcctcacagtaatcttcacacttaaccttagacacctatgcagtcatgttgggagyaggttacaatgttacttcagcccacagtttatttctatacttgagttcttaagtacagaagatagaagtgatttaaatggcatagtatatatatcattttctggccttttaaaatttatttgagacctcttgatgaaatgracatattatatatttctgccacctggattttcctggataatttgatggaatattttaagtttcagtaaatcagaacaataaacaaactcagatataaatgtgttgaaagtaattcattctcccatagataaatgaaacttgaaatgtgtaaactttgaagaacataaaaacttcatggtggtttcttattaagacagtggactagacatctaataaaacttctttccaaaatcccr

SEQ ID NO: 5742 - DNA, 1614 bp, Homo sapiens
cgcctgcgcccccgccggcgcgcccctgggagggtgagccggcgcckggcccaggcccggacctggtgggaggcggggggaggtggggacgaggcctggggaggcgggccccgcccatctgcaggtggctgtgaacgctgagcggctccaggcgggggccgggcccgggggcggggtctgtggcgcgcgtccccgccacgtgtccccggtcaccggccctgcccccgggccctgtgcttataacctgggatgggcacccctgccagtcctgctctgccgcctgccaccgctgcccgagcccgagtggttcactgcactgtgaaaacagattccagacgccgggaactcacgcctccaatcccagacgctatgtccagcaaaggctccgtggttctggcctacagtggcrgcctggacacctygtgcatcctcgtgtggctgaaggaacaaggctatgacgtcattgcctatctggccaacattggccagaaggaagacttcgaggaagccaggaagaaggcactgaagcttggggccaaaaaggtcattgctccctggaggatgcctgaattctacaaccggttcaagggccgcaatgacctgatggagtacgcaaagcaacaygggattcccatcccggtcactcccaagaacccgtggagcatggatgagaacctcatgcacatyagctacgaggctggaatcctggagaaccccaagaaccaagcgcctccaggtctctacrcgaagacccaggacccagccaaagcccccaacacccctgacattctcgagatygagttcaaaaaaggggtccctgtgaaggtgaccaacgtcaaggatggcaccacccaccagacctccttggagctcttcatgtacctgaacgaagtcgcgggcaagcatggcgtgggccgtattgacatcgtggagaaccgcttcattggaatgaagtcccgaggtatctacgagaccccagcaggcaccatcctttaccaygctcatttagacatcgaggccttcaccatggacygggaagtgcgcaaaatcaaacaaggcctgggcttgaaatttgctgagctggtgtataccggtttctggcacagccctgagtgtgaatttgtccgccactgcatcgccaagtcccaggagcgagtggaagggaaagtgcaggtgtccgtcctcaagggccaggtgtacatcctcggccgggagtccccactgtctctctacaatgaggagctggtgagcatgaacgtgcagggtgattatgagccaactgatgccaccgggttcatcaacatcaattccctcaggctgaaggaatatcatcgtctccagagcaaggtcactgccaaatagacccgtgtacaatgaggagctggggcctcctcaatttgcagatcccccaagtacaggcgctaattgttgtgataatttgtaattgtgacttgttctccccggctggcagcgtagtggggctgccaggccccagctttgttccctggtccccctgaagcctgcaaacgttgtcatcgaarggaagggtggggggcagctgcggtggggagctataaaaatgacaattaaaagagacactagtcttttatttct

SEQ ID NO: 5743 - DNA, 1860 bp, Homo sapiens
cgcctgcgcccccgccggcgcgcccctgggagggtgagccggcgcckggcccaggcccggacctggtgggaggcggggggaggtggggacgaggcctggggaggcgggccccgcccatctgcaggtggctgtgaacgctgagcggctccaggcgggggccgggcccgggggcggggtctgtggcgcgcgtccccgccacgtgtccccggtcaccggccctgcccccgggccctgtgcttataacctgggatgggcacccctgccagtcctgctctgccgcctgccaccgctgcccgagcccgagtggttcactgcactgtgaaaacagattccagacgccgggaactcacgcctccaatcccagacgctatgtccagcaaaggctccgtggttctggcctacagtggcrgcctggacacctygtgcatcctcgtgtggctgaaggaacaaggctatgacgtcattgcctatctggccaacattggccagaaggaagacttcgaggaagccaggaagaaggcactgaagcttggggccaaaaaggtgttcattgaggatgtcagcagggagtttgtggaggagttcatctggccggccatccagtccagcgcactgtatgaggacygctacctcctgggcacctctcttgccaggccctgcatcgcccgcaaacaagtggaaatcgcccagckggagggggccaagtatgtgtcccacggygccacaggaaaggggaacgatcaggtccggtttgagctcagctgctactcactggccccccagataaaggtcattgctccctggaggatgcctgaattctacaaccggttcaagggccgcaatgacctgatggagtacgcaaagcaacaygggattcccatcccggtcactcccaagaacccgtggagcatggatgagaacctcatgcacatyagctacgaggctggaatcctggagaaccccaagaaccaagcgcctccaggtctctacrcgaagacccaggacccagccaaagcccccaacacccctgacattctcgagatygagttcaaaaaaggggtccctgtgaaggtgaccaacgtcaaggatggcaccacccaccagacctccttggagctcttcatgtacctgaacgaagtcgcgggcaagcatggcgtgggccgtattgacatcgtggagaaccgcttcattggaatgaagtcccgaggtatctacgagaccccagcaggcaccatcctttaccaygctcatttagacatcgaggccttcaccatggacygggaagtgcgcaaaatcaaacaaggcctgggcttgaaatttgctgagctggtgtataccggtttctggcacagccctgagtgtgaatttgtccgccactgcatcgccaagtcccaggagcgagtggaagggaaagtgcaggtgtccgtcctcaagggccaggtgtacatcctcggccgggagtccccactgtctctctacaatgaggagctggtgagcatgaacgtgcagggtgattatgagccaactgatgccaccgggttcatcaacatcaattccctcaggctgaaggaatatcatcgtctccagagcaaggtcactgccaaatagacccgtgtacaatgaggagctggggcctcctcaatttgcagatcccccaagtacaggcgctaattgttgtgataatttgtaattgtgacttgttctccccggctggcagcgtagtggggctgccaggccccagctttgttccctggtccccctgaagcctgcaaacgttgtcatcgaarggaagggtggggggcagctgcggtggggagctataaaaatgacaattaaaagagacactagtcttttatttct

SEQ ID NO: 5744 - DNA, 1558 bp, Homo sapiens
agtggttcactgcactgtgaaaacagattccagacgccgggaactcacgcctccaatcccagacgctatgtccagcaaaggctccgtggttctggcctacagtggcrgcctggacacctygtgcatcctcgtgtggctgaaggaacaaggctatgacgtcattgcctatctggccaacattggccagaaggaagacttcgaggaagccaggaagaaggcactgaagcttggggccaaaaaggtgttcattgaggatgtcagcagggagtttgtggaggagttcatctggccggccatccagtccagcgcactgtatgaggacygctacctcctgggcacctctcttgccaggccctgcatcgcccgcaaacaagtggaaatcgcccagckggagggggccaagtatgtgtcccacggygccacaggaaaggggaacgatcaggtccggtttgagctcagctgctactcactggccccccagataaaggtcattgctccctggaggatgcctgaattctacaaccggttcaagggccgcaatgacctgatggagtacgcaaagcaacaygggattcccatcccggtcactcccaagaacccgtggagcatggatgagaacctcatgcacatyagctacgaggctggaatcctggagaaccccaagaaccaagcgcctccaggtctctacrcgaagacccaggacccagccaaagcccccaacacccctgacattctcgagatygagttcaaaaaaggggtccctgtgaaggtgaccaacgtcaaggatggcaccacccaccagacctccttggagctcttcatgtacctgaacgaagtcgcgggcaagcatggcgtgggccgtattgacatcgtggagaaccgcttcattggaatgaagtcccgaggtatctacgagaccccagcaggcaccatcctttaccaygctcatttagacatcgaggccttcaccatggacygggaagtgcgcaaaatcaaacaaggcctgggcttgaaatttgctgagctggtgtataccggtttctggcacagccctgagtgtgaatttgtccgccactgcatcgccaagtcccaggagcgagtggaagggaaagtgcaggtgtccgtcctcaagggccaggtgtacatcctcggccgggagtccccactgtctctctacaatgaggagctggtgagcatgaacgtgcagggtgattatgagccaactgatgccaccgggttcatcaacatcaattccctcaggctgaaggaatatcatcgtctccagagcaaggtcactgccaaatagacccgtgtacaatgaggagctggggcctcctcaatttgcagatcccccaagtacaggcgctaattgttgtgataatttgtaattgtgacttgttctccccggctggcagcgtagtggggctgccaggccccagctttgttccctggtccccctgaagcctgcaaacgttgtcatcgaarggaagggtggggggcagctgcggtggggagctataaaaatgacaattaaaagagacactagtcttttatttct

SEQ ID NO: 5745 - DNA, 1623 bp, Homo sapiens
ctcagccgccttccctcgatgctggaggatcaggtccaagagatgcctctccccgaccagcctaggactgcagtcagcattcccaggccccagtgtggtctgtggggctgtgtgcagagtgtgcgagacgctatgtccagcaaaggctccgtggttctggcctacagtggcrgcctggacacctygtgcatcctcgtgtggctgaaggaacaaggctatgacgtcattgcctatctggccaacattggccagaaggaagacttcgaggaagccaggaagaaggcactgaagcttggggccaaaaaggtgttcattgaggatgtcagcagggagtttgtggaggagttcatctggccggccatccagtccagcgcactgtatgaggacygctacctcctgggcacctctcttgccaggccctgcatcgcccgcaaacaagtggaaatcgcccagckggagggggccaagtatgtgtcccacggygccacaggaaaggggaacgatcaggtccggtttgagctcagctgctactcactggccccccagataaaggtcattgctccctggaggatgcctgaattctacaaccggttcaagggccgcaatgacctgatggagtacgcaaagcaacaygggattcccatcccggtcactcccaagaacccgtggagcatggatgagaacctcatgcacatyagctacgaggctggaatcctggagaaccccaagaaccaagcgcctccaggtctctacrcgaagacccaggacccagccaaagcccccaacacccctgacattctcgagatygagttcaaaaaaggggtccctgtgaaggtgaccaacgtcaaggatggcaccacccaccagacctccttggagctcttcatgtacctgaacgaagtcgcgggcaagcatggcgtgggccgtattgacatcgtggagaaccgcttcattggaatgaagtcccgaggtatctacgagaccccagcaggcaccatcctttaccaygctcatttagacatcgaggccttcaccatggacygggaagtgcgcaaaatcaaacaaggcctgggcttgaaatttgctgagctggtgtataccggtttctggcacagccctgagtgtgaatttgtccgccactgcatcgccaagtcccaggagcgagtggaagggaaagtgcaggtgtccgtcctcaagggccaggtgtacatcctcggccgggagtccccactgtctctctacaatgaggagctggtgagcatgaacgtgcagggtgattatgagccaactgatgccaccgggttcatcaacatcaattccctcaggctgaaggaatatcatcgtctccagagcaaggtcactgccaaatagacccgtgtacaatgaggagctggggcctcctcaatttgcagatcccccaagtacaggcgctaattgttgtgataatttgtaattgtgacttgttctccccggctggcagcgtagtggggctgccaggccccagctttgttccctggtccccctgaagcctgcaaacgttgtcatcgaarggaagggtggggggcagctgcggtggggagctataaaaatgacaattaaaagagacactagtcttttatttct

SEQ ID NO: 5746 - DNA, 1624 bp, Homo sapiens
ggtctgtggcgcgcgtccccgccacgtgtccccggtcaccggccctgcccccgggccctgtgcttataacctgggatgggcacccctgccagtcctgctctgccgcctgccaccgctgcccgagcccgacgctatgtccagcaaaggctccgtggttctggcctacagtggcrgcctggacacctygtgcatcctcgtgtggctgaaggaacaaggctatgacgtcattgcctatctggccaacattggccagaaggaagacttcgaggaagccaggaagaaggcactgaagcttggggccaaaaaggtgttcattgaggatgtcagcagggagtttgtggaggagttcatctggccggccatccagtccagcgcactgtatgaggacygctacctcctgggcacctctcttgccaggccctgcatcgcccgcaaacaagtggaaatcgcccagckggagggggccaagtatgtgtcccacggygccacaggaaaggggaacgatcaggtccggtttgagctcagctgctactcactggccccccagataaaggtcattgctccctggaggatgcctgaattctacaaccggttcaagggccgcaatgacctgatggagtacgcaaagcaacaygggattcccatcccggtcactcccaagaacccgtggagcatggatgagaacctcatgcacatyagctacgaggctggaatcctggagaaccccaagaaccaagcgcctccaggtctctacrcgaagacccaggacccagccaaagcccccaacacccctgacattctcgagatygagttcaaaaaaggggtccctgtgaaggtgaccaacgtcaaggatggcaccacccaccagacctccttggagctcttcatgtacctgaacgaagtcgcgggcaagcatggcgtgggccgtattgacatcgtggagaaccgcttcattggaatgaagtcccgaggtatctacgagaccccagcaggcaccatcctttaccaygctcatttagacatcgaggccttcaccatggacygggaagtgcgcaaaatcaaacaaggcctgggcttgaaatttgctgagctggtgtataccggtttctggcacagccctgagtgtgaatttgtccgccactgcatcgccaagtcccaggagcgagtggaagggaaagtgcaggtgtccgtcctcaagggccaggtgtacatcctcggccgggagtccccactgtctctctacaatgaggagctggtgagcatgaacgtgcagggtgattatgagccaactgatgccaccgggttcatcaacatcaattccctcaggctgaaggaatatcatcgtctccagagcaaggtcactgccaaatagacccgtgtacaatgaggagctggggcctcctcaatttgcagatcccccaagtacaggcgctaattgttgtgataatttgtaattgtgacttgttctccccggctggcagcgtagtggggctgccaggccccagctttgttccctggtccccctgaagcctgcaaacgttgtcatcgaarggaagggtggggggcagctgcggtggggagctataaaaatgacaattaaaagagacactagtcttttatttct

SEQ ID NO: 5747 - DNA, 1567 bp, Homo sapiens
ggtctgtggcgcgcgtccccgccacgtgtccccggtcaccggccctgcccccgggccctgtgcttataacctgggatgggcacccctgccagtcctgctctgccgcctgccaccgctgcccgagcccgacgctatgtccagcaaaggctccgtggttctggcctacagtggcrgcctggacacctygtgcatcctcgtgtggctgaaggaacaaggctatgacgtcattgcctatctggccaacattggccagaaggaagacttcgaggaagccaggaagaaggcactgaagcttggggccaaaaaggtgttcattgaggatgtcagcagggagtttgtggaggagttcatctggccggccatccagtccagcgcactgtatgaggacygctacctcctgggcacctctcttgccaggccctgcatcgcccgcaaacaagtggaaatcgcccagckggagggggccaagtatgtgtcccacggygccacaggaaaggtcattgctccctggaggatgcctgaattctacaaccggttcaagggccgcaatgacctgatggagtacgcaaagcaacaygggattcccatcccggtcactcccaagaacccgtggagcatggatgagaacctcatgcacatyagctacgaggctggaatcctggagaaccccaagaaccaagcgcctccaggtctctacrcgaagacccaggacccagccaaagcccccaacacccctgacattctcgagatygagttcaaaaaaggggtccctgtgaaggtgaccaacgtcaaggatggcaccacccaccagacctccttggagctcttcatgtacctgaacgaagtcgcgggcaagcatggcgtgggccgtattgacatcgtggagaaccgcttcattggaatgaagtcccgaggtatctacgagaccccagcaggcaccatcctttaccaygctcatttagacatcgaggccttcaccatggacygggaagtgcgcaaaatcaaacaaggcctgggcttgaaatttgctgagctggtgtataccggtttctggcacagccctgagtgtgaatttgtccgccactgcatcgccaagtcccaggagcgagtggaagggaaagtgcaggtgtccgtcctcaagggccaggtgtacatcctcggccgggagtccccactgtctctctacaatgaggagctggtgagcatgaacgtgcagggtgattatgagccaactgatgccaccgggttcatcaacatcaattccctcaggctgaaggaatatcatcgtctccagagcaaggtcactgccaaatagacccgtgtacaatgaggagctggggcctcctcaatttgcagatcccccaagtacaggcgctaattgttgtgataatttgtaattgtgacttgttctccccggctggcagcgtagtggggctgccaggccccagctttgttccctggtccccctgaagcctgcaaacgttgtcatcgaarggaagggtggggggcagctgcggtggggagctataaaaatgacaattaaaagagacactagtcttttatttct

SEQ ID NO: 5748 - DNA, 3032 bp, Homo sapiens
gattcgaggtgctctgtggccgcgagtgcatcttccacgaacctaattcatctctccagcaaaggacacatctctccagcaaaggacacctctctccagcaaaggacacctgcagagatgtccccagtccttcacttctatgttcgtccctctggccatgagggggcagcctctggacacactcggaggaaactgcaagggaaactgccagagctgcagggcgtcgagactgaactgtgctacaacgtgaactggacagctgaggccctccccagtgctgaggagacaaagaagctgatgtggctgtttggttgccccttactgctggatgatgttgctcgggagtcctggctccttcctggctccaatgacctgctgctggaggtcgggcccaggctgaacttctccaccccaacatccaccaacatcgtgtcagtgtgccgcgccactgggctggggcctgtggatcgtgtggagaccacccggcgctaccggctctcgtttgcccaccccccgtcagctgaggtggaagccattgctctggctaccctgcacgaccggatgacagagcagcacttcccccatcccatccagagtttctcccctgagagcatgccggaacccctcaatggccctatcaatatactgggtgagggccggcttgcgctggagaaggccaaccaggagcttggtctggctttagactcttgggacctagacttctacaccaagcgcttccaggagctacagcggaacccgagcactgtggaggcctttgacttggcgcagtccaatagcgagcacagccgacactggttcttcaagggccagctccacgtggatgggcagaagctggtgcactcactgtttgagtccatcatgagcacccaggaatcctcgaaccccaacaacgtcctcaaattctgtgataacagcagtgcaatccagggaaaggaagtccgattcctacggcctgaggaccccacacggccaagccgcttccagcaacagcaagggctgagacatgttgtcttcacagcagagactcacaactttcccacaggagtatgcccctttagtggtgcaaccactggcacagggggccggattcgagatgtccagtgcacaggccgcggggcccacgtggtggctggcactgccggctattgctttggaaatctgcatattccaggttacaatctgccctgggaggatcyaagcttccagtatcctgggaattttgcccggcccctggaggttgccattgaagccagtaatggagcttctgactatggcaacaagtttggggaaccagtgctggctggcttcgcccgctccttgggcctccagctcccagacggccagcggcgtgagtggatcaagcccatcatgtttagtgggggcattgggtccatggaagctgaccacataagcaaggaggccccagagccaggcatggaagttgtaaaggttggaggtcccgtctacaggattggagttggaggtggagctrcttcatctgtgcaggtgcagggagataacaccagtgacctggactwtggggctgtgcagcgaggagacccggagatggaacagaaratgaaccgtgtgatcagggcttgtgtggaggcccccaagggaaaccccatctgcagccttcatgatcagggcgctggtggcaatggcaatgtcctaaaagagctgagtgacccagctggagccatcatttacaccagccgcttccagcttggggacccaaccctgaatgccctggaaatctggggggctgagtaccaggaatcaaatgctcttctgctgaggtcccccaaccgggacttcctgactcatgtcagtgcccgtgaacgttgcccggcttgcttcrtgggcaccatcactggagaccggagaatagtgctggtggacgatcgggagtgtcctgtcagaagaaatggccagggggatgcccccccgacaccccygccaacccctgtggacctggagctcgaatgggtgctgggcaagatgcctcggaaggagttcttcctgcagaggaagccccccatgctgcagcctctggccttgcccccagggctgagcgtgcaccaggctctggagagggttctgaggctgcccgccgtggccagcaagcgctacctcaccaataaggtggaccgctcygtgggaggcctggtggcccagcagcagtgcgtggggcccctgcaaactcctctggcagatgtagcggttgtggcactgagccatgaggagctcataggggctgccacagccttgggagaacagccagtcaagagcctgctggacccaaaagtcgccgcccggctggccgtggccgaagccctcaccaacctggtgtttgctctggtcactgacctccgggatgtgaagtgtagcgggaactggatgtgggcagccaagctcccaggggagggcgcagctttggcggatgcctgtgaggctatggtggcagtgatggcagccctgggtgtggcagtggatggtggcaaggactccctcagcatggctgctcgggttggcactgagaccgtgcgggctcctgggtcactggtcatctcagcctcccgagtagctgggactacagacacgtgccaccatgtctggctaatttttatatttttatttattttattttattttattatttttgagagggagtctctgtcgcccaagctggagtgcagtggcgcgataatttttatatttttagtagagacagtttcgccatgttgatcaggatggtcttgaactcctgacctcttgatctgcccgcctcggcctcccaaagtgctgggattacgggcgtgagctactgtgcccggcctgaattgtttctttgatcaaagatctgtctccctgttagtgtgtaagttccatggataggagacccatttttgctccccaccgtgtcctaatacctagcacagtgcccggcacctagtaggtgctcaataaatatatgctgaacaaattaatacatatgaatgttaaaatta

SEQ ID NO: 5749 - DNA, 4851 bp, Homo sapiens
gattcgaggtgctctgtggccgcgagtgcatcttccacgaacctaattcatctctccagcaaaggacacatctctccagcaaaggacacctctctccagcaaaggacacctgcagagatgtccccagtccttcacttctatgttcgtccctctggccatgagggggcagcctctggacacactcggaggaaactgcaagggaaactgccagagctgcagggcgtcgagactgaactgtgctacaacgtgaactggacagctgaggccctccccagtgctgaggagacaaagaagctgatgtggctgtttggttgccccttactgctggatgatgttgctcgggagtcctggctccttcctggctccaatgacctgctgctggaggtcgggcccaggctgaacttctccaccccaacatccaccaacatcgtgtcagtgtgccgcgccactgggctggggcctgtggatcgtgtggagaccacccggcgctaccggctctcgtttgcccaccccccgtcagctgaggtggaagccattgctctggctaccctgcacgaccggatgacagagcagcacttcccccatcccatccagagtttctcccctgagagcatgccggaacccctcaatggccctatcaatatactgggtgagggccggcttgcgctggagaaggccaaccaggagcttggtctggctttagactcttgggacctagacttctacaccaagcgcttccaggagctacagcggaacccgagcactgtggaggcctttgacttggcgcagtccaatagcgagcacagccgacactggttcttcaagggccagctccacgtggatgggcagaagctggtgcactcactgtttgagtccatcatgagcacccaggaatcctcgaaccccaacaacgtcctcaaattctgtgataacagcagtgcaatccagggaaaggaagtccgattcctacggcctgaggaccccacacggccaagccgcttccagcaacagcaagggctgagacatgttgtcttcacagcagagactcacaactttcccacaggagtatgcccctttagtggtgcaaccactggcacagggggccggattcgagatgtccagtgcacaggccgcggggcccacgtggtggctggcactgccggctattgctttggaaatctgcatattccaggttacaatctgccctgggaggatcyaagcttccagtatcctgggaattttgcccggcccctggaggttgccattgaagccagtaatggagcttctgactatggcaacaagtttggggaaccagtgctggctggcttcgcccgctccttgggcctccagctcccagacggccagcggcgtgagtggatcaagcccatcatgtttagtgggggcattgggtccatggaagctgaccacataagcaaggaggccccagagccaggcatggaagttgtaaaggttggaggtcccgtctacaggattggagttggaggtggagctrcttcatctgtgcaggtgcagggagataacaccagtgacctggactwtggggctgtgcagcgaggagacccggagatggaacagaaratgaaccgtgtgatcagggcttgtgtggaggcccccaagggaaaccccatctgcagccttcatgatcagggcgctggtggcaatggcaatgtcctaaaagagctgagtgacccagctggagccatcatttacaccagccgcttccagcttggggacccaaccctgaatgccctggaaatctggggggctgagtaccaggaatcaaatgctcttctgctgaggtcccccaaccgggacttcctgactcatgtcagtgcccgtgaacgttgcccggcttgcttcrtgggcaccatcactggagaccggagaatagtgctggtggacgatcgggagtgtcctgtcagaagaaatggccagggggatgcccccccgacaccccygccaacccctgtggacctggagctcgaatgggtgctgggcaagatgcctcggaaggagttcttcctgcagaggaagccccccatgctgcagcctctggccttgcccccagggctgagcgtgcaccaggctctggagagggttctgaggctgcccgccgtggccagcaagcgctacctcaccaataaggtggaccgctcygtgggaggcctggtggcccagcagcagtgcgtggggcccctgcaaactcctctggcagatgtagcggttgtggcactgagccatgaggagctcataggggctgccacagccttgggagaacagccagtcaagagcctgctggacccaaaagtcgccgcccggctggccgtggccgaagccctcaccaacctggtgtttgctctggtcactgacctccgggatgtgaagtgtagcgggaactggatgtgggcagccaagctcccaggggagggcgcagctttggcggatgcctgtgaggctatggtggcagtgatggcagccctgggtgtggcagtggatggtggcaaggactccctcagcatggctgctcgggttggcactgagaccgtgcgggctcctgggtcactggtcatctcagcctatgccgtctgcccagacatcacagccactgtgaccccagacctcaagcatcctgaagggagaggccatctgctctatgtggctctgagccctgggcagcaccggctcgggggcacagctctggcccagtgcttctcccagcttggggaacaccctccagacctggaccttcctgagaacttggtgcgggccttcagcatcactcaggggctgctgaaagaccgcctcctctgctcaggccacgatgtcagtgacggaggcctcgtcacatgcctgctggagatggcctttgctggaaattgcgggctacaggtggatgtgcctgtccccagggttgatgtcctgtctgtgctgttcgctgaggagccaggcctcgtgctggaggtgcaggagccagacctggcccaggtgctgaagcgttaccgggatgctggcctccattgcctggagctgggccacacaggcgaggccgggccccacgccatggtccgggtgtcagtgaacggggctgtggttctggaggagcctgttggggagctgcgagccctctgggaggagacgagtttccagctggaccggctacaggcagagcctcgctgtgtggcagaggaggaacggggcctgagggagcggatggggcccagctattgcctgccccccacctttcccaaagcctccgtgccccgtgagcctggtggtcccagcccccgagtcgccatcttgcgagaggagggcagtaatggagaccgggagatggccgatgccttccacttagctgggtttgaggtatgggacrtgaccatgcaggacctctgctctggggcaattgggctggacactttccgtggcgtggccttcgtgggcggcttcagctatgcagatgtcctgggctctgccaaagggtgggcagctgctgtgacctttcatcccagggctggggctgagctgaggcgcttccggaagcggccagacaccttcagcctgggcgtgtgtaatggctgtcaactgctggctctgctcggctgggtgggaggcgaccccaatgaggatgctgcaragatgggccctgactcccagccagcccggccaggccttctgctacgccacaacctgtctgggcgctacgagtctcgctgggccagcgtgcgtgtggggcctgggccagccctgatgctgcgagggatggagggcgccgtgctgcccgtgtggagtgcgcacggggaaggttacgtagcattttcttctccggaactccaagctcagattgaggccaggggcttggctccactgcactgggctgatgatgacgggaaccccacagagcagtaccctctgaatcccaatgggtccccagggggcgtggctggcatctgctcctgtgatggccgccacctggctgtcatgcctcaccctgagcgggccgttaggccttggcagtgggcatggcgaccccctccatktgatactctgaccacctccccctggctccagctctttatcaatgcccgaaactggaccctggaagggagctgctgactggccacaggggctcacctgggccccatggcttttcrcctaagtgggtcctgccccctcccccatgaccttcaggagcaccccatattatttccaaaaatatcttggacagacaaggaccaaaatgccaaaatctcagcggactcgatratctgcctgctgatgttccttctgtggctgtgtctattttcagttctgctctaacatggcatgccctttctcagcccaggaaacagcatgtggttcagagaaaagagcgacaaggaaaagttaggactcctgaggtccgaacaggggcttctgttgcccacttcacaacacccagtgatcaccggtgtgcaattgcctccttggctctgagggatgttttgcgctcccttttctcatcattggggttagcgggtgcagacaaattcagcaatagtatgcagatcagcccctcaccacctcattgttctcatctggaactgaaactttctggatttctcttgaagtgctacactgcactgaatgtaaggaattgttgcttgtggaagtttctcagcgtttctggctgtcttagggctggcctcagaacccagcattcctgttatttgcttctaaattagcagctctctttttttttttttttttgaggcagtctcactctgtcacccaggcagaggttgtggtgagccgagatggagccattgcattccagcctgagcaacaagagtg

SEQ ID NO: 5750 - DNA, 3362 bp, Homo sapiens
gcaggtgccctgtgctcatctctgcctgggaatggggaggaacagatcttgggggacattggggagtgggcggacaagcactccagggcatcagtccgggccgctgaccaggcggagggcagtgtcccaattatacaggcgttacctccttttctccatctcagcatctgatccctccctccgcagtggaacccakgctsctgatatccatctgggtgagccagccagagggaccggctgtgtcagaggcaagcaaacaagtattagagtgcaagactgtgggcggagagaggaagcccgagccgccagcagggagcttcggagagagaaagcccaggaacatcccagagagagctgggcccatcctcagccctacccagccccgcagcccctagccctccgcccagaaacccagccctgtccggcgtgccgctcttctcctccaggccggytgctgctgcggccagcgttgccggggcatcccttcctccttcccatcatggcagtgtaccgcctgtgtgtgaccactggtccctacctgagggccggcacactggacaacatctctgtcacactggtgggcacgtgtggtgaaagccccaagcagcggctagatcgaatgggcagggacttcgcccctggatcggtacagaagtacaaggtgcgttgcacagcggagctgggtgagctcttgctgctgcgtgtacacaaggagcgctacgctttcttccgcaaggactcttggtactgtagccgcatctgtgtcaccgaaccggatggtagtgtatcccacttcccctgctatcagtggattgaaggctactgcaccgtggagctgaggccaggaacagcaagaactatttgtcaggactctcttcccctcctcctggatcacaggacacgggagctccgggcccgacaagaatgctaccgctggaagatctatgcccctggcttcccctgcatggtagacgtcaacagctttcaggagatggagtcagacaagaaatttgccttgacaaagacgacaacttgtgtagaccagggtgacagcagtgggaatcggtacctgcccggcttccccatgaaaattgacatcccatccctgatgtacatggagcccaatgttcgatactcagccaccaagacgatctcgctgctcttcaatgccatccctgcgtccttgggaatgaagcttygagggctgttggatcgcaagggctcctggaagaagctggatgacatgcagaacatcttctggtgccataagaccttcacgacaaagtatgtcacagagcactggtgtgaagatcacttctttgggtaccagtacctgaatggtgtcaatcccgtcatgctccactgcatctctagcttgcccagcaagctgcctgtcaccaatgacatggtggcccccttgctgggacaggacacatgcctgcagacagagctagagagggggaacatcttcctagcggactactggatcctggcggaggcccccacccactgcctaaacggccgccagcagtacgtggccgccccactgtgcctgctgtggctcagcccccagggggcgctggtgcccttggccatccagctcagccagacccccgggcctgacagccccatcttcctgcccactgactccgaatgggactggctgctggccaagacgtgggtgmgcaactctgagttcctggtgcacgaaaacaacacgcactttctgtgcacgcattkgctgtgcgaggccttcgccatggccacgctgcgccagctgccgctctgccaccccatctacaagctcctactcccccacactcgatacacgctgcaggtgaacaccatcgcgagggccacgctgctcaaccccgagggcctcgtggaccaggtcacgtccatcgggaggcaaggcctcatctacctcatgagcacgggcctggcccacttcacctacaccaatttctgccttccggacagcctgcgggcccgcggcktcctggctatccccaactaccactaccgagacgacggcctgaagrtctgggcggccattgagagctttgtctcagaaatcgtgggctactattatcccagtgacgcatctgtgcagcaggattcggagctgcaggcctggactggcgagatttttgctcaggcgttcctgggccgggaaagctcaggtttcccaagccggctgtgcaccccaggagagatggtgaagttcctcactgcaatcatcttcaattgctctgcccagcacgctgctgtcaacagtgggcagcatgactttggggcctggatgcccaatgctccatcatccatgaggcagcccccaccccagaccaaggggaccaccaccctgaagacttacctagacaccctmcctgaagtgaacatcagctgtaacaacctcctcctcttctggttggttagccaagaacccaaggaccagaggcccctgggcacctacccagatgagcacttcacagaggaggccccgaggcggagcatcgccgccttccagagccgcctggcccagatctcaagggacatccaggagcggaaccagggtctggcactgccctacacctacctggaccctcccctcattgagaacagygtctccatctaaccacccccaaataccacccaagargaaagaaaggtccaagcatgaggaggaccagttcctcaggtcctccagacccttccatcctccctgttctcagttcacctgaacctyctcttctgcacatggagacttttgcagccragatggctctgacatcatacaaactgggccctgagctgtgagagaccagcacagcagcgtccaggttaaaagccgctgaccaaagtccaatgcacaatagcccctccgaaaggaaggaaccgcttcacttcttgccccacttggggcagcctcttgttccagcctcttggaatgcccagcttgggtttctgagcttttctccctcatcctccccmatccccaaactccttctcctaccatgcctttctacgttctctttcttccaagcctagagccaccagcccagcttccttctctggaaaagcctggaaactgggcacagaaggactgtgtgcctgggtctaacatgtggtcccctttgtccctagcacctttaaggggaggggaagaattggagggcagcttgcctggacccctaacggctgttctcaggaacaggttcccaggcctggggtgtttgtggagatctgtctttctccaaagatttcatccaactcccctttcatcccactccctttcatcccatttttttctttctgtccttgagcccagtgagttcaataaaaaccaaaatatttggctctca

SEQ ID NO: 5751 - DNA, 3312 bp, Homo sapiens
ctgggctcccgcccaggatcctgcaggcccagggcggtcctggagcggaaagaatgccacgcggggcattcagaccctgtttgcyggcgctgtatttcgctttcctgacctgccctactccagagcagagaatgagtggaacccakgctsctgatatccatctgggtgagccagccagagggaccggctgtgtcagaggcaagcaaacaagtattagagtgcaagactgtgggcggagagaggaagcccgagccgccagcagggagcttcggagagagaaagcccaggaacatcccagagagagctgggcccatcctcagccctacccagccccgcagcccctagccctccgcccagaaacccagccctgtccggcgtgccgctcttctcctccaggccggytgctgctgcggccagcgttgccggggcatcccttcctccttcccatcatggcagtgtaccgcctgtgtgtgaccactggtccctacctgagggccggcacactggacaacatctctgtcacactggtgggcacgtgtggtgaaagccccaagcagcggctagatcgaatgggcagggacttcgcccctggatcggtacagaagtacaaggtgcgttgcacagcggagctgggtgagctcttgctgctgcgtgtacacaaggagcgctacgctttcttccgcaaggactcttggtactgtagccgcatctgtgtcaccgaaccggatggtagtgtatcccacttcccctgctatcagtggattgaaggctactgcaccgtggagctgaggccaggaacagcaagaactatttgtcaggactctcttcccctcctcctggatcacaggacacgggagctccgggcccgacaagaatgctaccgctggaagatctatgcccctggcttcccctgcatggtagacgtcaacagctttcaggagatggagtcagacaagaaatttgccttgacaaagacgacaacttgtgtagaccagggtgacagcagtgggaatcggtacctgcccggcttccccatgaaaattgacatcccatccctgatgtacatggagcccaatgttcgatactcagccaccaagacgatctcgctgctcttcaatgccatccctgcgtccttgggaatgaagcttygagggctgttggatcgcaagggctcctggaagaagctggatgacatgcagaacatcttctggtgccataagaccttcacgacaaagtatgtcacagagcactggtgtgaagatcacttctttgggtaccagtacctgaatggtgtcaatcccgtcatgctccactgcatctctagcttgcccagcaagctgcctgtcaccaatgacatggtggcccccttgctgggacaggacacatgcctgcagacagagctagagagggggaacatcttcctagcggactactggatcctggcggaggcccccacccactgcctaaacggccgccagcagtacgtggccgccccactgtgcctgctgtggctcagcccccagggggcgctggtgcccttggccatccagctcagccagacccccgggcctgacagccccatcttcctgcccactgactccgaatgggactggctgctggccaagacgtgggtgmgcaactctgagttcctggtgcacgaaaacaacacgcactttctgtgcacgcattkgctgtgcgaggccttcgccatggccacgctgcgccagctgccgctctgccaccccatctacaagctcctactcccccacactcgatacacgctgcaggtgaacaccatcgcgagggccacgctgctcaaccccgagggcctcgtggaccaggtcacgtccatcgggaggcaaggcctcatctacctcatgagcacgggcctggcccacttcacctacaccaatttctgccttccggacagcctgcgggcccgcggcktcctggctatccccaactaccactaccgagacgacggcctgaagrtctgggcggccattgagagctttgtctcagaaatcgtgggctactattatcccagtgacgcatctgtgcagcaggattcggagctgcaggcctggactggcgagatttttgctcaggcgttcctgggccgggaaagctcaggtttcccaagccggctgtgcaccccaggagagatggtgaagttcctcactgcaatcatcttcaattgctctgcccagcacgctgctgtcaacagtgggcagcatgactttggggcctggatgcccaatgctccatcatccatgaggcagcccccaccccagaccaaggggaccaccaccctgaagacttacctagacaccctmcctgaagtgaacatcagctgtaacaacctcctcctcttctggttggttagccaagaacccaaggaccagaggcccctgggcacctacccagatgagcacttcacagaggaggccccgaggcggagcatcgccgccttccagagccgcctggcccagatctcaagggacatccaggagcggaaccagggtctggcactgccctacacctacctggaccctcccctcattgagaacagygtctccatctaaccacccccaaataccacccaagargaaagaaaggtccaagcatgaggaggaccagttcctcaggtcctccagacccttccatcctccctgttctcagttcacctgaacctyctcttctgcacatggagacttttgcagccragatggctctgacatcatacaaactgggccctgagctgtgagagaccagcacagcagcgtccaggttaaaagccgctgaccaaagtccaatgcacaatagcccctccgaaaggaaggaaccgcttcacttcttgccccacttggggcagcctcttgttccagcctcttggaatgcccagcttgggtttctgagcttttctccctcatcctccccmatccccaaactccttctcctaccatgcctttctacgttctctttcttccaagcctagagccaccagcccagcttccttctctggaaaagcctggaaactgggcacagaaggactgtgtgcctgggtctaacatgtggtcccctttgtccctagcacctttaaggggaggggaagaattggagggcagcttgcctggacccctaacggctgttctcaggaacaggttcccaggcctggggtgtttgtggagatctgtctttctccaaagatttcatccaactcccctttcatcccactccctttcatcccatttttttctttctgtccttgagcccagtgagttcaataaaaaccaaaatatttggctctca

SEQ ID NO: 5752 - DNA, 3765 bp, Homo sapiens
ctgctcattatttcaaaccacactagggtacagagctcgtgcttcgggatggaaacctatggttatctgcagagggagtcatgctttcaaggacctcatgaactctattttaagaacctctcaaaacgaaacaagcaaatcatggagaagaatggaaataaccgaaagctgcgggtttgtgttgctacttgtaaccgtgcagattattctaaacttgccccgatcatgtttggcattaaaaccgaacytgagttctttgaacttgatgttgtggtacttggctctcacctgatagatgactatggaaatacatatcgaatgattgaacaagatgactttgacattaacaccaggctacacacaattgtgaggggagaagatgaggcagccatggtggagtcagtaggcctggccctagtgaagctgccagatgtccttaatcgcctgaagcctgatatcatgattgttcatggagacaggtttgatgccctggctctggccacatctgctgccttgatgaacatccgaatccttcacattgaaggtggggaagtcagtgggaccattgatgactctatcagacatgccataacaaaactggctcattatcatgtgtgctgcacccgcagtgcagagcagcacctgatatccatgtgtgaggaccatgatcgcatccttttggcaggctgcccttcctatgacaaacttctctcagccaagaacaaagactacatgagcatyattcgcatgtggctaggtgatgakgtaaaatctaaagattacattgttgcactacagcaccctgtgaccactracattaagcattccataaaaatgtttgaattaacattggatgcacttatctcatttaacaagcggaccctagtcctgtttccaaatattgacgcagggagcaaagagatggttckagtgatgcggaagaagggcattgagcatcatcccaactttcgtgcagttaaacacgtcccatttgaccagtttatacagttggttgcccatgctggctgtatgattgggaacagcagctgwggggttcgagaagttggagcttttggaacacctgtgatcaacctgggaacacgtcagattggaagagaaacaggggagaatgttcttcatgtccgggatgctgacacccaagacaaaatattgcaagcactgcaccttcagtttggtaaacagtacccttgttcaaagatatatggggatggaaatgctgttccaaggattttgaagtttctcaaatctatckatcttcaagagccactgcaaaagaaattctgctttcctcctgtgaaggagaatatctctcaagatattgaccatattcttgaaactctaagtgccttggccgttgatcttggcgggacgaacctccgagttgcartagtcagcatgaagggtgaaatagttaagaagtatactcagttcaatcctaaaacctatgaagagaggattaatttaatcctacagatgtgtgtggaagctgcagcagaagctgtaaaactgaactgcagaattttgggagtaggcatttccacaggtggccgtgtaaatcctcgggaaggaattgtgctgcattcaaccaaactgatccaagagtggaactctgtggaccttaggacccccctttctgacactttgcatctccctgtgtgggtagacaatgatggcaactgtgctgccctggcggaaaggaaatktggccaaggaaagggactggaaaactttgttacacttatcacaggcacaggaatcggtggtggaattatccatcagcatgaattgatccacggaagctccttctgtgctgcagaactgggccaccttgttstgtctctggatgrgcctgattgttcctgtggaagccatgggtgcaytgaagcatacgcctctggaatggccttgcagagggaggcaaaaaagctccatgatgaggacctgctcttggtggaagggatgtcagtgccaaaagatgaggctgtgggtgcgctccatctcatccaagctrygaaacttggcaatgcgaaggcccagagcatcctaagaacagctggaacagctttgggtcttggggttgtgaacatcctccataccatgaatccctcccttgtgatcctctccggagtcctggccagtcactatatccacattgtcaaagacgtcattcgccagcaggccttgtcctccgtgcaggacgtggatrtggtggtttcggatttggttgaccccgccctgctgggtgctgccagcayggttctggactacacaacacgcaggatctactagacctccaggaacagacatggaccttctctccagagctcctgagtggaatcaagttcttgtctttaggatgaccgtttcttaacaatcaaatctggtattgaactgcaggtgactttggcagagaaatgttttcacttttggtctcctcttccagagtcacctttccccactcctatttttgtagatgctattctttctgatgtcttcttactaggggtcattttagctcaaaccctgtaagttacagtcacaattttctgtgccaaagcagctacaataatagagaggaagccttcttagaactctgcttactaatgtattaataccactgagaccttcaggccttgcctgggatatcacttcatcctgaagtttgcattaataatccttccaggccgggcacagtggctcacgcctgtaatcccagcactttgggaggccgaggcgggcggatcacgaggtcaggagatcgagaccgccctggctaacatggtgaaacatggtgaaaccccgtctctactaaaaatacaaaaaattagctgggtgtggtggcgggtcccagctactcgggaggctgaggcaggagaatggcatgaaccagggaggctggagtgcagtggctcaatgcaacctctgccccccaagttcaagtgattctcctgcctcagcctcttgagtagctgsgattacaggcacatgcaccacgcccggctgatttttttttgtatttttagtagacagggtttcaccatgttggccaggctggtcttgaactcctgacctcaggtgatccgcccgcctctgcctcccaaagtgctgggattacaggtgtaagccatcacacctggccctagtgacaggtttttatgggtacttttagatgatctaagaaatcatgtgcatatatctttcagatttytattttgggaaaatgaaggtttctacaacatattgtttcagtgttcaaataaactgaaggactcaacattacatttgaactatatccttcctagtgggttagtgtgaaaaagagtttggctgattcctaaaactctgccagccctgcagtaatctccagggcctggttattgttcagacattccatggtgattcctgggaaggaagcttggctgctcagtttctgagtctggggtgagataatgttctgggaagggacatctgttctttggtgtaatctctcatggtgaaatctgctctgtacatcagacaattgcattgctaccaagtttcataccaaatatttgaaaggatggtattgaatctaaaaccaaatattagtttttattaaactcatgggaaggctaatatattccaacgtaaattattacatatggttaagtaattgcatgttaatttattttaatgtaaatatttttgttactgttctgagccaaattctaaagaaaaaataaatacatttccttgttgaaatcc

SEQ ID NO: 5753 - DNA, 4788 bp, Homo sapiens
atggctaaaggtgaccccaagaaaccacagggcaagatgtctgcttatgccttctctgtgcagacatgctgcaaattttccaagaaatgctctgggaggtggaagacaatgtccagtaaagagaaatttaaatttggtgaaatggcaaaggcggatgaagtgtgctatgatcgggaaatgaaggattatggaccagctaagggaggcaagaagaaggatcctaatgcccccaaaaggccaccatctggattcttcctgttctgttcagaattccgccccaagatcaaatccacaaaccccggcatctctattggagacgtggcaaaaaagttgggtgagatgtggaataacttaaatgacagtgaaaagcagccttacgtcactaaggcggcaaagctgaaggagaagtatgagaaggatgttgttgactgcctcgggactggctgggagttccctgtagtggaggccgccgctgaactgattataaagatgagagaggctctgccatgccttggtcatcaattcacactccaccagtgtcttctagcagtcacggcaagggttaacgtcagggaccgctgtggggtggccgcgctacacgacagtatagttgcggtcctggtttatgaaataactgagggaacaagaggcgcaagaaatccctccttgggtgcaagaccaaaacaactacccagcgggaagactcgggcttcagtgcgtgtgtcgccagtggaggaggacgcttcggggcgggagcacaagctggcaggacagccccgcagcagctccagcgcggcagaggccatggaagatggtccgctggtcagcaccctgcctgcgcctcaaaataccgccgggaaggtgggggacggggacgggagcagccaatcacrcgagctctctcgggtggcgtcagggcgcgatcgcggattcggcactccgggtgggcgtggctgggcgagcgaggagtggggacaaggtcgagcgacgagtcgtctacccgcgcgcccgagcgcggaaaccgaggggcaggctcgcgctctgcctgcttcgtggcgcttggttcgtccctcgcccgaggagcgcggtggcggcgtgggagggagcctctgacggcgtctggaactctattttaagaacctctcaaaacgaaacaagcaaatcatggagaagaatggaaataaccgaaagctgcgggtttgtgttgctacttgtaaccgtgcagattattctaaacttgccccgatcatgtttggcattaaaaccgaacytgagttctttgaacttgatgttgtggtacttggctctcacctgatagatgactatggaaatacatatcgaatgattgaacaagatgactttgacattaacaccaggctacacacaattgtgaggggagaagatgaggcagccatggtggagtcagtaggcctggccctagtgaagctgccagatgtccttaatcgcctgaagcctgatatcatgattgttcatggagacaggtttgatgccctggctctggccacatctgctgccttgatgaacatccgaatccttcacattgaaggtggggaagtcagtgggaccattgatgactctatcagacatgccataacaaaactggctcattatcatgtgtgctgcacccgcagtgcagagcagcacctgatatccatgtgtgaggaccatgatcgcatccttttggcaggctgcccttcctatgacaaacttctctcagccaagaacaaagactacatgagcatyattcgcatgtggctaggtgatgakgtaaaatctaaagattacattgttgcactacagcaccctgtgaccactracattaagcattccataaaaatgtttgaattaacattggatgcacttatctcatttaacaagcggaccctagtcctgtttccaaatattgacgcagggagcaaagagatggttckagtgatgcggaagaagggcattgagcatcatcccaactttcgtgcagttaaacacgtcccatttgaccagtttatacagttggttgcccatgctggctgtatgattgggaacagcagctgwggggttcgagaagttggagcttttggaacacctgtgatcaacctgggaacacgtcagattggaagagaaacaggggagaatgttcttcatgtccgggatgctgacacccaagacaaaatattgcaagcactgcaccttcagtttggtaaacagtacccttgttcaaagatatatggggatggaaatgctgttccaaggattttgaagtttctcaaatctatckatcttcaagagccactgcaaaagaaattctgctttcctcctgtgaaggagaatatctctcaagatattgaccatattcttgaaactctaagtgccttggccgttgatcttggcgggacgaacctccgagttgcartagtcagcatgaagggtgaaatagttaagaagtatactcagttcaatcctaaaacctatgaagagaggattaatttaatcctacagatgtgtgtggaagctgcagcagaagctgtaaaactgaactgcagaattttgggagtaggcatttccacaggtggccgtgtaaatcctcgggaaggaattgtgctgcattcaaccaaactgatccaagagtggaactctgtggaccttaggacccccctttctgacactttgcatctccctgtgtgggtagacaatgatggcaactgtgctgccctggcggaaaggaaatktggccaaggaaagggactggaaaactttgttacacttatcacaggcacaggaatcggtggtggaattatccatcagcatgaattgatccacggaagctccttctgtgctgcagaactgggccaccttgttstgtctctggatgrgcctgattgttcctgtggaagccatgggtgcaytgaagcatacgcctctggaatggccttgcagagggaggcaaaaaagctccatgatgaggacctgctcttggtggaagggatgtcagtgccaaaagatgaggctgtgggtgcgctccatctcatccaagctrygaaacttggcaatgcgaaggcccagagcatcctaagaacagctggaacagctttgggtcttggggttgtgaacatcctccataccatgaatccctcccttgtgatcctctccggagtcctggccagtcactatatccacattgtcaaagacgtcattcgccagcaggccttgtcctccgtgcaggacgtggatrtggtggtttcggatttggttgaccccgccctgctgggtgctgccagcayggttctggactacacaacacgcaggatctactagacctccaggaacagacatggaccttctctccagagctcctgagtggaatcaagttcttgtctttaggatgaccgtttcttaacaatcaaatctggtattgaactgcaggtgactttggcagagaaatgttttcacttttggtctcctcttccagagtcacctttccccactcctatttttgtagatgctattctttctgatgtcttcttactaggggtcattttagctcaaaccctgtaagttacagtcacaattttctgtgccaaagcagctacaataatagagaggaagccttcttagaactctgcttactaatgtattaataccactgagaccttcaggccttgcctgggatatcacttcatcctgaagtttgcattaataatccttccaggccgggcacagtggctcacgcctgtaatcccagcactttgggaggccgaggcgggcggatcacgaggtcaggagatcgagaccgccctggctaacatggtgaaacatggtgaaaccccgtctctactaaaaatacaaaaaattagctgggtgtggtggcgggtcccagctactcgggaggctgaggcaggagaatggcatgaaccagggaggctggagtgcagtggctcaatgcaacctctgccccccaagttcaagtgattctcctgcctcagcctcttgagtagctgsgattacaggcacatgcaccacgcccggctgatttttttttgtatttttagtagacagggtttcaccatgttggccaggctggtcttgaactcctgacctcaggtgatccgcccgcctctgcctcccaaagtgctgggattacaggtgtaagccatcacacctggccctagtgacaggtttttatgggtacttttagatgatctaagaaatcatgtgcatatatctttcagatttytattttgggaaaatgaaggtttctacaacatattgtttcagtgttcaaataaactgaaggactcaacattacatttgaactatatccttcctagtgggttagtgtgaaaaagagtttggctgattcctaaaactctgccagccctgcagtaatctccagggcctggttattgttcagacattccatggtgattcctgggaaggaagcttggctgctcagtttctgagtctggggtgagataatgttctgggaagggacatctgttctttggtgtaatctctcatggtgaaatctgctctgtacatcagacaattgcattgctaccaagtttcataccaaatatttgaaaggatggtattgaatctaaaaccaaatattagtttttattaaactcatgggaaggctaatatattccaacgtaaattattacatatggttaagtaattgcatgttaatttattttaatgtaaatatttttgttactgttctgagccaaattctaaagaaaaaataaatacatttccttgttgaaatcc

SEQ ID NO: 5754 - DNA, 3666 bp, Homo sapiens
gaactctattttaagaacctctcaaaacgaaacaagcaaatcatggagaagaatggaaataaccgaaagctgcgggtttgtgttgctacttgtaaccgtgcagattattctaaacttgccccgatcatgtttggcattaaaaccgaacytgagttctttgaacttgatgttgtggtacttggctctcacctgatagatgactatggaaatacatatcgaatgattgaacaagatgactttgacattaacaccaggctacacacaattgtgaggggagaagatgaggcagccatggtggagtcagtaggcctggccctagtgaagctgccagatgtccttaatcgcctgaagcctgatatcatgattgttcatggagacaggtttgatgccctggctctggccacatctgctgccttgatgaacatccgaatccttcacattgaaggtggggaagtcagtgggaccattgatgactctatcagacatgccataacaaaactggctcattatcatgtgtgctgcacccgcagtgcagagcagcacctgatatccatgtgtgaggaccatgatcgcatccttttggcaggctgcccttcctatgacaaacttctctcagccaagaacaaagactacatgagcatyattcgcatgtggctaggtgatgakgtaaaatctaaagattacattgttgcactacagcaccctgtgaccactracattaagcattccataaaaatgtttgaattaacattggatgcacttatctcatttaacaagcggaccctagtcctgtttccaaatattgacgcagggagcaaagagatggttckagtgatgcggaagaagggcattgagcatcatcccaactttcgtgcagttaaacacgtcccatttgaccagtttatacagttggttgcccatgctggctgtatgattgggaacagcagctgwggggttcgagaagttggagcttttggaacacctgtgatcaacctgggaacacgtcagattggaagagaaacaggggagaatgttcttcatgtccgggatgctgacacccaagacaaaatattgcaagcactgcaccttcagtttggtaaacagtacccttgttcaaagatatatggggatggaaatgctgttccaaggattttgaagtttctcaaatctatckatcttcaagagccactgcaaaagaaattctgctttcctcctgtgaaggagaatatctctcaagatattgaccatattcttgaaactctaagtgccttggccgttgatcttggcgggacgaacctccgagttgcartagtcagcatgaagggtgaaatagttaagaagtatactcagttcaatcctaaaacctatgaagagaggattaatttaatcctacagatgtgtgtggaagctgcagcagaagctgtaaaactgaactgcagaattttgggagtaggcatttccacaggtggccgtgtaaatcctcgggaaggaattgtgctgcattcaaccaaactgatccaagagtggaactctgtggaccttaggacccccctttctgacactttgcatctccctgtgtgggtagacaatgatggcaactgtgctgccctggcggaaaggaaatktggccaaggaaagggactggaaaactttgttacacttatcacaggcacaggaatcggtggtggaattatccatcagcatgaattgatccacggaagctccttctgtgctgcagaactgggccaccttgttstgtctctggatgrgcctgattgttcctgtggaagccatgggtgcaytgaagcatacgcctctggaatggccttgcagagggaggcaaaaaagctccatgatgaggacctgctcttggtggaagggatgtcagtgccaaaagatgaggctgtgggtgcgctccatctcatccaagctrygaaacttggcaatgcgaaggcccagagcatcctaagaacagctggaacagctttgggtcttggggttgtgaacatcctccataccatgaatccctcccttgtgatcctctccggagtcctggccagtcactatatccacattgtcaaagacgtcattcgccagcaggccttgtcctccgtgcaggacgtggatrtggtggtttcggatttggttgaccccgccctgctgggtgctgccagcayggttctggactacacaacacgcaggatctactagacctccaggaacagacatggaccttctctccagagctcctgagtggaatcaagttcttgtctttaggatgaccgtttcttaacaatcaaatctggtattgaactgcaggtgactttggcagagaaatgttttcacttttggtctcctcttccagagtcacctttccccactcctatttttgtagatgctattctttctgatgtcttcttactaggggtcattttagctcaaaccctgtaagttacagtcacaattttctgtgccaaagcagctacaataatagagaggaagccttcttagaactctgcttactaatgtattaataccactgagaccttcaggccttgcctgggatatcacttcatcctgaagtttgcattaataatccttccaggccgggcacagtggctcacgcctgtaatcccagcactttgggaggccgaggcgggcggatcacgaggtcaggagatcgagaccgccctggctaacatggtgaaacatggtgaaaccccgtctctactaaaaatacaaaaaattagctgggtgtggtggcgggtcccagctactcgggaggctgaggcaggagaatggcatgaaccagggaggctggagtgcagtggctcaatgcaacctctgccccccaagttcaagtgattctcctgcctcagcctcttgagtagctgsgattacaggcacatgcaccacgcccggctgatttttttttgtatttttagtagacagggtttcaccatgttggccaggctggtcttgaactcctgacctcaggtgatccgcccgcctctgcctcccaaagtgctgggattacaggtgtaagccatcacacctggccctagtgacaggtttttatgggtacttttagatgatctaagaaatcatgtgcatatatctttcagatttytattttgggaaaatgaaggtttctacaacatattgtttcagtgttcaaataaactgaaggactcaacattacatttgaactatatccttcctagtgggttagtgtgaaaaagagtttggctgattcctaaaactctgccagccctgcagtaatctccagggcctggttattgttcagacattccatggtgattcctgggaaggaagcttggctgctcagtttctgagtctggggtgagataatgttctgggaagggacatctgttctttggtgtaatctctcatggtgaaatctgctctgtacatcagacaattgcattgctaccaagtttcataccaaatatttgaaaggatggtattgaatctaaaaccaaatattagtttttattaaactcatgggaaggctaatatattccaacgtaaattattacatatggttaagtaattgcatgttaatttattttaatgtaaatatttttgttactgttctgagccaaattctaaagaaaaaataaatacatttccttgttgaaatcc

SEQ ID NO: 5755 - DNA, 3761 bp, Homo sapiens
ctgctcattatttcaaaccacactagggtacagagctcgtgcttcgggatggaaacctatggttatctgcagagggagtcatgctttcaaggacctcatgaactctattttaagaacctctcaaaacgaaacaagcaaatcatggagaagaatggaaataaccgaaagctgcgggtttgtgttgctacttgtaaccgtgcagattattctaaacttgccccgatcatgtttggcattaaaaccgaacytgagttctttgaacttgatgttgtggtacttggctctcacctgatagatgactatggaaatacatatcgaatgattgaacaagatgactttgacattaacaccaggctacacacaattgtgaggggagaagatgaggcagccatggtggagtcagtaggcctggccctagtgaagctgccagatgtccttaatcgcctgaagcctgatatcatgattgttcatggagacaggtttgatgccctggctctggccacatctgctgccttgatgaacatccgaatccttcacattgaaggtggggaagtcagtgggaccattgatgactctatcagacatgccataacaaaactggctcattatcatgtgtgctgcacccgcagtgcagagcagcacctgatatccatgtgtgaggaccatgatcgcatccttttggcaggctgcccttcctatgacaaacttctctcagccaagaacaaagactacatgagcatyattcgcatgtggctaggtgatgakgtaaaatctaaagattacattgttgcactacagcaccctgtgaccactracattaagcattccataaaaatgtttgaattaacattggatgcacttatctcatttaacaagcggaccctagtcctgtttccaaatattgacgcagggagcaaagagatggttckagtgatgcggaagaagggcattgagcatcatcccaactttcgtgcagttaaacacgtcccatttgaccagtttatacagttggttgcccatgctggctgtatgattgggaacagcagctgwggggttcgagaagttggagcttttggaacacctgtgatcaacctgggaacacgtcagattggaagagaaacaggggagaatgttcttcatgtccgggatgctgacacccaagacaaaatattgcaagcactgcaccttcagtttggtaaacagtacccttgttcaaagatatatggggatggaaatgctgttccaaggattttgaagtttctcaaatctatckatcttcaagagccactgcaaaagaaattctgctttcctcctgtgaaggagaatatctctcaagatattgaccatattcttgaaactctaagtgccttggccgttgatcttggcgggacgaacctccgagttgcartagtcagcatgaagggtgaaatagttaagaagtatactcagttcaatcctaaaacctatgaagagaggattaatttaatcctacagatgtgtgtggaagctgcagcagaagctgtaaaactgaactgcagaattttgggagtaggcatttccacaggtggccgtgtaaatcctcgggaaggaattgtgctgcattcaaccaaactgatccaagagtggaactctgtggaccttaggacccccctttctgacactttgcatctccctgtgtgggtagacaatgatggcaactgtgctgccctggcggaaaggaaatktggccaaggaaagggactggaaaactttgttacacttatcacaggcacaggaatcggtggtggaattatccatcagcatgaattgatccacggaagctccttctgtgctgcagaactgggccaccttgttstgtctctggatgrgcctgattgttcctgtggaagccatgggtgcaytgaagcatacgcctctggaatggccttgcagagggaggcaaaaaagctccatgatgaggacctgctcttggtggaagggatgtcagtgccaaaagatgaggctgtgggtgcgctccatctcatccaagctrygaaacttggcaatgcgaaggcccagagcatcctaagaacagctggaacagctttgggtcttggggttgtgaacatcctccataccatgaatccctcccttgtgatcctctccggagtcctggccagtcactatatccacattgtcaaagacgtcattcgccagcaggccttgtcctccgtgcaggacgtggatrtggtggtttcggatttggttgaccccgccctgctgggtgctgccagcayggttctggactacacaacacgcaggatctactagacctccaggaacagacatggaccttctctccagagctcctgagtggaatcaagttcttgtctttaggatgaccgtttcttaacaatcaaatctggtattgaactgcaggtgactttggcagagaaatgttttcacttttggtctcctcttccagagtcacctttccccactcctatttttgtagatgctattctttctgatgtcttcttactaggggtcattttagctcaaaccctgtaagttacagtcacaattttctgtgccaaagcagctacaataatagagaggaagccttcttagaactctgcttactaatgtattaataccactgagaccttcaggccttgcctgggatatcacttcatcctgaagtttgcattaataatccttccaggccgggcacagtggctcacgcctgtaatcccagcactttgggaggccgaggcgggcggatcacgaggtcaggagatcgagaccgccctggctaacatggtgaaacatggtgaaaccccgtctctactaaaaatacaaaaaattagctgggtgtggtggcgggtcccagctactcgggaggctgaggcaggagaatggcatgaaccaggctggagtgcagtggctcaatgcaacctctgccccccaagttcaagtgattctcctgcctcagcctcttgagtagctgsgattacaggcacatgcaccacgcccggctgatttttttttgtatttttagtagacagggtttcaccatgttggccaggctggtcttgaactcctgacctcaggtgatccgcccgcctctgcctcccaaagtgctgggattacaggtgtaagccatcacacctggccctagtgacaggtttttatgggtacttttagatgatctaagaaatcatgtgcatatatctttcagatttytattttgggaaaatgaaggtttctacaacatattgtttcagtgttcaaataaactgaaggactcaacattacatttgaactatatccttcctagtgggttagtgtgaaaaagagtttggctgattcctaaaactctgccagccctgcagtaatctccagggcctggttattgttcagacattccatggtgattcctgggaaggaagcttggctgctcagtttctgagtctggggtgagataatgttctgggaagggacatctgttctttggtgtaatctctcatggtgaaatctgctctgtacatcagacaattgcattgctaccaagtttcataccaaatatttgaaaggatggtattgaatctaaaaccaaatattagtttttattaaactcatgggaaggctaatatattccaacgtaaattattacatatggttaagtaattgcatgttaatttattttaatgtaaatatttttgttactgttctgagccaaattctaaagaaaaaataaatacatttccttgttgaaatcc

SEQ ID NO: 5756 - DNA, 4784 bp, Homo sapiens
atggctaaaggtgaccccaagaaaccacagggcaagatgtctgcttatgccttctctgtgcagacatgctgcaaattttccaagaaatgctctgggaggtggaagacaatgtccagtaaagagaaatttaaatttggtgaaatggcaaaggcggatgaagtgtgctatgatcgggaaatgaaggattatggaccagctaagggaggcaagaagaaggatcctaatgcccccaaaaggccaccatctggattcttcctgttctgttcagaattccgccccaagatcaaatccacaaaccccggcatctctattggagacgtggcaaaaaagttgggtgagatgtggaataacttaaatgacagtgaaaagcagccttacgtcactaaggcggcaaagctgaaggagaagtatgagaaggatgttgttgactgcctcgggactggctgggagttccctgtagtggaggccgccgctgaactgattataaagatgagagaggctctgccatgccttggtcatcaattcacactccaccagtgtcttctagcagtcacggcaagggttaacgtcagggaccgctgtggggtggccgcgctacacgacagtatagttgcggtcctggtttatgaaataactgagggaacaagaggcgcaagaaatccctccttgggtgcaagaccaaaacaactacccagcgggaagactcgggcttcagtgcgtgtgtcgccagtggaggaggacgcttcggggcgggagcacaagctggcaggacagccccgcagcagctccagcgcggcagaggccatggaagatggtccgctggtcagcaccctgcctgcgcctcaaaataccgccgggaaggtgggggacggggacgggagcagccaatcacrcgagctctctcgggtggcgtcagggcgcgatcgcggattcggcactccgggtgggcgtggctgggcgagcgaggagtggggacaaggtcgagcgacgagtcgtctacccgcgcgcccgagcgcggaaaccgaggggcaggctcgcgctctgcctgcttcgtggcgcttggttcgtccctcgcccgaggagcgcggtggcggcgtgggagggagcctctgacggcgtctggaactctattttaagaacctctcaaaacgaaacaagcaaatcatggagaagaatggaaataaccgaaagctgcgggtttgtgttgctacttgtaaccgtgcagattattctaaacttgccccgatcatgtttggcattaaaaccgaacytgagttctttgaacttgatgttgtggtacttggctctcacctgatagatgactatggaaatacatatcgaatgattgaacaagatgactttgacattaacaccaggctacacacaattgtgaggggagaagatgaggcagccatggtggagtcagtaggcctggccctagtgaagctgccagatgtccttaatcgcctgaagcctgatatcatgattgttcatggagacaggtttgatgccctggctctggccacatctgctgccttgatgaacatccgaatccttcacattgaaggtggggaagtcagtgggaccattgatgactctatcagacatgccataacaaaactggctcattatcatgtgtgctgcacccgcagtgcagagcagcacctgatatccatgtgtgaggaccatgatcgcatccttttggcaggctgcccttcctatgacaaacttctctcagccaagaacaaagactacatgagcatyattcgcatgtggctaggtgatgakgtaaaatctaaagattacattgttgcactacagcaccctgtgaccactracattaagcattccataaaaatgtttgaattaacattggatgcacttatctcatttaacaagcggaccctagtcctgtttccaaatattgacgcagggagcaaagagatggttckagtgatgcggaagaagggcattgagcatcatcccaactttcgtgcagttaaacacgtcccatttgaccagtttatacagttggttgcccatgctggctgtatgattgggaacagcagctgwggggttcgagaagttggagcttttggaacacctgtgatcaacctgggaacacgtcagattggaagagaaacaggggagaatgttcttcatgtccgggatgctgacacccaagacaaaatattgcaagcactgcaccttcagtttggtaaacagtacccttgttcaaagatatatggggatggaaatgctgttccaaggattttgaagtttctcaaatctatckatcttcaagagccactgcaaaagaaattctgctttcctcctgtgaaggagaatatctctcaagatattgaccatattcttgaaactctaagtgccttggccgttgatcttggcgggacgaacctccgagttgcartagtcagcatgaagggtgaaatagttaagaagtatactcagttcaatcctaaaacctatgaagagaggattaatttaatcctacagatgtgtgtggaagctgcagcagaagctgtaaaactgaactgcagaattttgggagtaggcatttccacaggtggccgtgtaaatcctcgggaaggaattgtgctgcattcaaccaaactgatccaagagtggaactctgtggaccttaggacccccctttctgacactttgcatctccctgtgtgggtagacaatgatggcaactgtgctgccctggcggaaaggaaatktggccaaggaaagggactggaaaactttgttacacttatcacaggcacaggaatcggtggtggaattatccatcagcatgaattgatccacggaagctccttctgtgctgcagaactgggccaccttgttstgtctctggatgrgcctgattgttcctgtggaagccatgggtgcaytgaagcatacgcctctggaatggccttgcagagggaggcaaaaaagctccatgatgaggacctgctcttggtggaagggatgtcagtgccaaaagatgaggctgtgggtgcgctccatctcatccaagctrygaaacttggcaatgcgaaggcccagagcatcctaagaacagctggaacagctttgggtcttggggttgtgaacatcctccataccatgaatccctcccttgtgatcctctccggagtcctggccagtcactatatccacattgtcaaagacgtcattcgccagcaggccttgtcctccgtgcaggacgtggatrtggtggtttcggatttggttgaccccgccctgctgggtgctgccagcayggttctggactacacaacacgcaggatctactagacctccaggaacagacatggaccttctctccagagctcctgagtggaatcaagttcttgtctttaggatgaccgtttcttaacaatcaaatctggtattgaactgcaggtgactttggcagagaaatgttttcacttttggtctcctcttccagagtcacctttccccactcctatttttgtagatgctattctttctgatgtcttcttactaggggtcattttagctcaaaccctgtaagttacagtcacaattttctgtgccaaagcagctacaataatagagaggaagccttcttagaactctgcttactaatgtattaataccactgagaccttcaggccttgcctgggatatcacttcatcctgaagtttgcattaataatccttccaggccgggcacagtggctcacgcctgtaatcccagcactttgggaggccgaggcgggcggatcacgaggtcaggagatcgagaccgccctggctaacatggtgaaacatggtgaaaccccgtctctactaaaaatacaaaaaattagctgggtgtggtggcgggtcccagctactcgggaggctgaggcaggagaatggcatgaaccaggctggagtgcagtggctcaatgcaacctctgccccccaagttcaagtgattctcctgcctcagcctcttgagtagctgsgattacaggcacatgcaccacgcccggctgatttttttttgtatttttagtagacagggtttcaccatgttggccaggctggtcttgaactcctgacctcaggtgatccgcccgcctctgcctcccaaagtgctgggattacaggtgtaagccatcacacctggccctagtgacaggtttttatgggtacttttagatgatctaagaaatcatgtgcatatatctttcagatttytattttgggaaaatgaaggtttctacaacatattgtttcagtgttcaaataaactgaaggactcaacattacatttgaactatatccttcctagtgggttagtgtgaaaaagagtttggctgattcctaaaactctgccagccctgcagtaatctccagggcctggttattgttcagacattccatggtgattcctgggaaggaagcttggctgctcagtttctgagtctggggtgagataatgttctgggaagggacatctgttctttggtgtaatctctcatggtgaaatctgctctgtacatcagacaattgcattgctaccaagtttcataccaaatatttgaaaggatggtattgaatctaaaaccaaatattagtttttattaaactcatgggaaggctaatatattccaacgtaaattattacatatggttaagtaattgcatgttaatttattttaatgtaaatatttttgttactgttctgagccaaattctaaagaaaaaataaatacatttccttgttgaaatcc

SEQ ID NO: 5757 - DNA, 968 bp, Homo sapiens
tgtgtatcagattcaactaggagaaaatcccacctccaggctcyattaatccttccaatggagtggaagtttctctcacagagaaactagtaaggggatccaatgggaaaagaacgttcacacggactagaagacgaaaccaatggaatggaaaattgtcctcgcgttggtagaagcagccaatgagatgaaaagagcccgcctccaaagtggctgcagaggcaatggggtgaatcgtgctcagaggcgcgctccaatggggtagcagggctcgcccggccgccactaccccgcttccccgcgcccggagtccccacccacggccggccgcggagccgagtgctgacccgggtgagaggttcccgcggctcagggaagatggcggcagccgtggtgctggctgctgggttgcgcgcggcgcgcagagccgtggcggccacgggggtgcgcggggggcaggtccgaggagctgcaggtgtgactgatgggaatgaagtggccaaggcccagcaggcaactcctgggggagcagccccaaccatcttctcccggatcctggacaagagcctcccagctgacattctctatgaggaccagcagtgtcttgtgttccgtgatgtggcccctcaggctcctgtgcacttcctggtcattcctaagaagcccattcctcggattagccaggctgaagaagaagaccagcagcttctaggacacctactccttgtggccaagcagacagcaaaggctgagggcctgggagatggataccgacttgtgatcaacgatgggaagctgggtgcacaatctgtgtatcatctgcacattcatgtacttgggggccggcagctccagtggcctccaggttgaacctgccaactgattaaaggacaccagactctggatgcttggatggaaagggaaaaatggaccctgtgatgctaataaaactgttytcccttaattat

SEQ ID NO: 5758 - DNA, 3432 bp, Homo sapiens
atggcgctgccatcactyctgctgttggtggcagccctggcaggtggggtgcgtcctcccggggcgcggaacctgacgctggcggtggtgctgccagaacacaacctgagctatgcctgggcctggccacgggtgggacccgctgtggcactagctgtggaggctctgggccgggcactgcccgtggacctgcggtttgtcarctccgaactggaaggcgcctgctctgagtacctggcaccgctgakcgctgtggacctcaagctgtaccatgaccccgacctgctgttaggtcccggttgcgtgtaccctgctgcctctgtggcccgctttgcctcccactggcgccttcccctgctgactgcgggtgctgtggcctctggtttttcggctaagaatgaccattatcgtaccctggttcgcactggcccctctgctcccaagctgggtgagtttgtggtgacactacacgggcacttcaattggactgyccgtgctgccttgctgtacctggatgctcgcacagatgaccggcctcactacttcaccatcgagggcgtctttgaggccctgcagggcagcaacctcagtgtgcagcaccaggtgtatgcccgagagccagggggccccgagcaggccacccacttcatccgggccaacgggcgcattgtgtatatctgcggccctctggagatgctgcatgagatcctgcttcaggcccagagggagaatctgaccaatggggattatgtcttcttttacctggatgtctttggggagagtctccgtgcaggccccacacgtgctacaggccggccctggcaggacaatcgcacccgggaacaggcccaggccctcagagaggcctttcagactgtattggtgatcacgtaccgagaacccccaaatcctgagtatcaggaattccagaatcgtctgctgataagagcccgggaagactttggtgtggagctgggcccttccctgatgaacctcatcgctggctgcttctatgatgggatcctgctatatgctgaagtcctgaatgagacaatacaggaaggaggcacccgggaggatggacttcgaattgtggaaaagatgcagggacgaagatatcacggtgtaactgggctggttgtcatggacaagaacaatgaccgagagactgactttgtcctctgggccatgggagacctggattctggggactttcagcctgcagcccactactcgggagctgagaagcagatttggtggacgggacggcctattccctgggtgaagggggctcctccctcggacaatcccccctgtgcctttgacttggacgacccatcctgtgataaaactccactttcaaccctggcaattgtggctctgggcacaggaatcaccttcatcatgtttggtgtttccagcttcctaattttccgaaagctgatgctggagaaggagctggctagcatgttgtggcgtattcgctgggaagaactgcagtttggcaactcagagcgttatcacaaaggtgcaggcagtcgcctcacactgtcgctgcggggatccagttacggctcgctcatgacagcccatgggaaataccagatctttgccaacaccggtcacttcaagggaaatgttgtcgccatcaaacatgtgaataagaagcgcattgagctgacccggcaggttctgtttgaactcaaacatatgagagatgttcagttcaaccatctcactcgcttcattggcgcctgcatagaccctcccaacatttgcattgtcactgaataytgtcctcgtgggagtttacaggatattctagaaaatgacagcatcaacttggactggatgtttcgttattcactcattaatgaccttgttaagggcatggcctttctccacaacagcattatttcatcgcatgggagtctcaagtcctccaactgtgtggtggatagtcgttttgtgctcaaratcacagactatggcctggccagcttccgatcaactgctgaacctgatgacagccatgccctctatgccaagaagctgtggactgccccagaactgctcagtgggaaccccttgccaaccacaggcatgcagaaggctgacgtctatagctttgggatcatcctgcaggagatagcacttcgcagtggtcctttctacttggagggcctggacctcagccccaaagagattgtccagaaggtacgaaatggtcagcggccatatttccggccaagcattgaccggacccaactgaatgaagagctagttttgctgatggagcgatgttgggctsaggacccagctgagcggccagactttggacagattaagggcttcattcggcgctttaacaaggagggtggcaccagcatattggacaacctcctgctgcgcatggaacagtatgccaataacttggagaagctggtggaggaacgcacacaggcctatctggaggaaaaacgcaaggctgaagctctgctctaccaaatcctaccccattcagtggcagagcagttaaaacggggagagactgtacaggctgaggcctttgacagtgttaccatctacttcagtgacattgttggcttcacagcattgtcagcagagagcacccccatgcaggtagtgacacttcttaatgacctgtatacctgctttgatgccataattgacaactttgatgtctacaaggtggagacgattggggatgcttacatggtggtatctggcctcccaggccgaaatggtcaacgccatgcaccagaaattgctcgtatggccctagcattactagatgcagtttcttcctttcgcatccgccaccgaccccatgaccagctgaggctacgcataggggtccatactgggccagtctgtgctggggttgttggcctgaagatgccccgttattgtctttttggagacacagtgaacactgcttctcgaatggagtctaatggtcaagcgctgaagatccatgtctcctctaccaccaaggatgccctagatgagctaggatgcttccagctagagcttcggggggatgtggaaatgaagggaaaaggaaagatgcgaacatactggctcttaggagagcggaaaggacctcctggactcctgtaaacccccattctttccaagtcagatagtcttctgctgctggtacctgggtgggcaatggccaccatgtctgcacacaccagaaatggacattttcatatgcaatggaaaacagccacaaaaaaacctaccttatatggaagttgtagccctctgcagctcagccctgtacatatacctgtccctctctggcttggtccccttcctccctactttctgtaaatatctgtatctaaaccagaatattttggtcaaatataaaacaataataaaaaaagttctgatgtcata

SEQ ID NO: 5759 - DNA, 3503 bp, Homo sapiens
atggcgctgccatcactyctgctgttggtggcagccctggcaggtggggtgcgtcctcccggggcgcggaacctgacgctggcggtggtgctgccagaacacaacctgagctatgcctgggcctggccacgggtgggacccgctgtggcactagctgtggaggctctgggccgggcactgcccgtggacctgcggtttgtcarctccgaactggaaggcgcctgctctgagtacctggcaccgctgakcgctgtggacctcaagctgtaccatgaccccgacctgctgttaggtcccggttgcgtgtaccctgctgcctctgtggcccgctttgcctcccactggcgccttcccctgctgactgcgggtgctgtggcctctggtttttcggctaagaatgaccattatcgtaccctggttcgcactggcccctctgctcccaagctgggtgagtttgtggtgacactacacgggcacttcaattggactgyccgtgctgccttgctgtacctggatgctcgcacagatgaccggcctcactacttcaccatcgagggcgtctttgaggccctgcagggcagcaacctcagtgtgcagcaccaggtgtatgcccgagagccagggggccccgagcaggccacccacttcatccgggccaacgggcgcattgtgtatatctgcggccctctggagatgctgcatgagatcctgcttcaggcccagagggagaatctgaccaatggggattatgtcttcttttacctggatgtctttggggagagtctccgtgcaggccccacacgtgctacaggccggccctggcaggacaatcgcacccgggaacaggcccaggccctcagagaggcctttcagactgtattggtgatcacgtaccgagaacccccaaatcctgagtatcaggaattccagaatcgtctgctgataagagcccgggaagactttggtgtggagctgggcccttccctgatgaacctcatcgctggctgcttctatgatgggatcctgctatatgctgaagtcctgaatgagacaatacaggaaggaggcacccgggaggatggacttcgaattgtggaaaagatgcagggacgaagatatcacggtgtaactgggctggttgtcatggacaagaacaatgaccgagagactgactttgtcctctgggccatgggagacctggattctggggactttcagcctgcagcccactactcgggagctgagaagcagatttggtggacgggacggcctattccctgggtgaagggggctcctccctcggacaatcccccctgtgcctttgacttggacgacccatcctgtgataaaactccactttcaaccctggcaattgtggctctgggcacaggaatcaccttcatcatgtttggtgtttccagcttcctaattttccgaaagctgatgctggagaaggagctggctagcatgttgtggcgtattcgctgggaagaactgcagtttggcaactcagagcgttatcacaaaggtgcaggcagtcgcctcacactgtcgctgcggggatccagttacggctcgctcatgacagcccatgggaaataccagatctttgccaacaccggtcacttcaagggaaatgttgtcgccatcaaacatgtgaataagaagcgcattgagctgacccggcaggttctgtttgaactcaaacatatgagagatgttcagttcaaccatctcactcgcttcattggcgcctgcatagaccctcccaacatttgcattgtcactgaataytgtcctcgtgggagtttacaggatattctagaaaatgacagcatcaacttggactggatgtttcgttattcactcattaatgaccttgttaagggcatggcctttctccacaacagcattatttcatcgcatgggagtctcaagtcctccaactgtgtggtggatagtcgttttgtgctcaaratcacagactatggcctggccagcttccgatcaactgctgaacctgatgacagccatgccctctatgccaagaagctgtggactgccccagaactgctcagtgggaaccccttgccaaccacaggcatgcagaaggctgacgtctatagctttgggatcatcctgcaggagatagcacttcgcagtggtcctttctacttggagggcctggacctcagccccaaagagattgtccagaaggtacgaaatggtcagcggccatatttccggccaagcattgaccggacccaactgaatgaagagctagttttgctgatggagcgatgttgggctsaggacccagctgagcggccagactttggacagattaagggcttcattcggcgctttaacaaggagggtggcaccagcatattggacaacctcctgctgcgcatggaacagtatgccaataacttggagaagctggtggaggaacgcacacaggcctatctggaggaaaaacgcaaggctgaagctctgctctaccaaatcctaccccattcagtggcagagcagttaaaacggggagagactgtacaggctgaggcctttgacagtgttaccatctacttcagtgacattgttggcttcacagcattgtcagcagagagcacccccatgcaggtagtgacacttcttaatgacctgtatacctgctttgatgccataattgacaactttgatgtctacaaggtggagacgattggggatgcttacatggtggtatctggcctcccaggccgaaatggtcaacgccatgcaccagaaattgctcgtatggccctagcattactagatgcagtttcttcctttcgcatccgccaccgaccccatgaccagctgaggctacgcataggggtccatactggtaaggctgactctcactccagccctagtctccacctttcccagactctcccaacctgtttcttctcaaagggccagtctgtgctggggttgttggcctgaagatgccccgttattgtctttttggagacacagtgaacactgcttctcgaatggagtctaatggtcaagcgctgaagatccatgtctcctctaccaccaaggatgccctagatgagctaggatgcttccagctagagcttcggggggatgtggaaatgaagggaaaaggaaagatgcgaacatactggctcttaggagagcggaaaggacctcctggactcctgtaaacccccattctttccaagtcagatagtcttctgctgctggtacctgggtgggcaatggccaccatgtctgcacacaccagaaatggacattttcatatgcaatggaaaacagccacaaaaaaacctaccttatatggaagttgtagccctctgcagctcagccctgtacatatacctgtccctctctggcttggtccccttcctccctactttctgtaaatatctgtatctaaaccagaatattttggtcaaatataaaacaataataaaaaaagttctgatgtcata

SEQ ID NO: 5760 - DNA, 3315 bp, Homo sapiens
atggcgctgccatcactyctgctgttggtggcagccctggcaggtggggtgcgtcctcccggggcgcggaacctgacgctggcggtggtgctgccagaacacaacctgagctatgcctgggcctggccacgggtgggacccgctgtggcactagctgtggaggctctgggccgggcactgcccgtggacctgcggtttgtcarctccgaactggaaggcgcctgctctgagtacctggcaccgctgakcgctgtggacctcaagctgtaccatgaccccgacctgctgttaggtcccggttgcgtgtaccctgctgcctctgtggcccgctttgcctcccactggcgccttcccctgctgactgcgggtgctgtggcctctggtttttcggctaagaatgaccattatcgtaccctggttcgcactggcccctctgctcccaagctgggtgagtttgtggtgacactacacgggcacttcaattggactgyccgtgctgccttgctgtacctggatgctcgcacagatgaccggcctcactacttcaccatcgagggcgtctttgaggccctgcagggcagcaacctcagtgtgcagcaccaggtgtatgcccgagagccagggggccccgagcaggccacccacttcatccgggccaacgggcgcattgtgtatatctgcggccctctggagatgctgcatgagatcctgcttcaggcccagagggagaatctgaccaatggggattatgtcttcttttacctggatgtctttggggagagtctccgtgcaggccccacacgtgctacaggccggccctggcaggacaatcgcacccgggaacaggcccaggccctcagagaggcctttcagactgtattggtgatcacgtaccgagaacccccaaatcctgagtatcaggaattccagaatcgtctgctgataagagcccgggaagactttggtgtggagctgggcccttccctgatgaacctcatcgctggctgcttctatgatgggatcctgctatatgctgaagtcctgaatgagacaatacaggaaggaggcacccgggaggatggacttcgaattgtggaaaagatgcagggacgaagatatcacggtgtaactgggctggttgtcatggacaagaacaatgaccgagagactgactttgtcctctgggccatgggagacctggattctggggactttcagcctgcagcccactactcgggagctgagaagcagatttggtggacgggacggcctattccctgggtgaagggggctcctccctcggacaatcccccctgtgcctttgacttggacgacccatcctgtgataaaactccactttcaaccctggcaattgtggctctgggcacaggaatcaccttcatcatgtttggtgtttccagcttcctaattttccgaaagctgatgctggagaaggagctggctagcatgttgtggcgtattcgctgggaagaactgcagtttggcaactcagagcgttatcacaaaggtgcaggcagtcgcctcacactgtcgctgcggggatccagttacggctcgctcatgacagcccatgggaaataccagatctttgccaacaccggtcacttcaagggaaatgttgtcgccatcaaacatgtgaataagaagcgcattgagctgacccggcaggttctgtttgaactcaaacatatgagagatgttcagttcaaccatctcactcgcttcattggcgcctgcatagaccctcccaacatttgcattgtcactgaataytgtcctcgtgggagtttacaggatattctagaaaatgacagcatcaacttggactggatgtttcgttattcactcattaatgaccttgttaagggcatggcctttctccacaacagcattatttcatcgcatgggagtctcaagtcctccaactgtgtggtggatagtcgttttgtgctcaaratcacagactatggcctggccagcttccgatcaactgctgaacctgatgacagccatgccctctatgccaagaagctgtggactgccccagaactgctcagtgggaaccccttgccaaccacaggcatgcagaaggctgacgtctatagctttgggatcatcctgcaggagatagcacttcgcagtggtcctttctacttggagggcctggacctcagccccaaagagattgtccagaaggtacgaaatggtcagcggccatatttccggccaagcattgaccggacccaactgaatgaagagctagttttgctgatggagcgatgttgggctsaggacccagctgagcggccagactttggacagattaagggcttcattcggcgctttaacaaggagggtggcaccagcatattggacaacctcctgctgcgcatggaacagtatgccaataacttggagaagctggtggaggaacgcacacaggcctatctggaggaaaaacgcaaggctgaagctctgctctaccaaatcctaccccattcagtggcagagcagttaaaacggggagagactgtacaggctgaggcctttgacagtgttaccatctacttcagtgacattgttggcttcacagcattgtcagcagagagcacccccatgcaggtagtgacacttcttaatgacctgtatacctgctttgatgccataattgacaactttgatgtctacaaggtggagacgattggggatgcttacatggtggtatctggcctcccaggccgaaatggtcaacgccatgcaccagaaattgctcgtatggccctagcattactagatgcagtttcttcctttcgcatccgccaccgaccccatgaccagctgaggctacgcataggggtccatactgggccagtctgtgctggggttgttggcctgaagatgccccgttattgtctttttggagacacagtgaacactgcttctcgaatggagtctaatggtcaagcgctgaagatccatgtctcctctaccaccaaggatgccctagatgagctaggatgcttccagctagagcttcggggggatgtggaaatgaagggaaaaggaaagatgcgaacatactggctcttaggagagcggaaaggacctcctggactcctgtaaacccccattctttccaagtcagatagtcttctgctgctggtacctgggtgggcaatggccaccatgtctgcacacaccagaaatggacattttcatatgcaatggaaaacaatacctgtccctctctggcttggtccccttcctccctactttctgtaaatatctgtatct

SEQ ID NO: 5761 - DNA, 3386 bp, Homo sapiens
atggcgctgccatcactyctgctgttggtggcagccctggcaggtggggtgcgtcctcccggggcgcggaacctgacgctggcggtggtgctgccagaacacaacctgagctatgcctgggcctggccacgggtgggacccgctgtggcactagctgtggaggctctgggccgggcactgcccgtggacctgcggtttgtcarctccgaactggaaggcgcctgctctgagtacctggcaccgctgakcgctgtggacctcaagctgtaccatgaccccgacctgctgttaggtcccggttgcgtgtaccctgctgcctctgtggcccgctttgcctcccactggcgccttcccctgctgactgcgggtgctgtggcctctggtttttcggctaagaatgaccattatcgtaccctggttcgcactggcccctctgctcccaagctgggtgagtttgtggtgacactacacgggcacttcaattggactgyccgtgctgccttgctgtacctggatgctcgcacagatgaccggcctcactacttcaccatcgagggcgtctttgaggccctgcagggcagcaacctcagtgtgcagcaccaggtgtatgcccgagagccagggggccccgagcaggccacccacttcatccgggccaacgggcgcattgtgtatatctgcggccctctggagatgctgcatgagatcctgcttcaggcccagagggagaatctgaccaatggggattatgtcttcttttacctggatgtctttggggagagtctccgtgcaggccccacacgtgctacaggccggccctggcaggacaatcgcacccgggaacaggcccaggccctcagagaggcctttcagactgtattggtgatcacgtaccgagaacccccaaatcctgagtatcaggaattccagaatcgtctgctgataagagcccgggaagactttggtgtggagctgggcccttccctgatgaacctcatcgctggctgcttctatgatgggatcctgctatatgctgaagtcctgaatgagacaatacaggaaggaggcacccgggaggatggacttcgaattgtggaaaagatgcagggacgaagatatcacggtgtaactgggctggttgtcatggacaagaacaatgaccgagagactgactttgtcctctgggccatgggagacctggattctggggactttcagcctgcagcccactactcgggagctgagaagcagatttggtggacgggacggcctattccctgggtgaagggggctcctccctcggacaatcccccctgtgcctttgacttggacgacccatcctgtgataaaactccactttcaaccctggcaattgtggctctgggcacaggaatcaccttcatcatgtttggtgtttccagcttcctaattttccgaaagctgatgctggagaaggagctggctagcatgttgtggcgtattcgctgggaagaactgcagtttggcaactcagagcgttatcacaaaggtgcaggcagtcgcctcacactgtcgctgcggggatccagttacggctcgctcatgacagcccatgggaaataccagatctttgccaacaccggtcacttcaagggaaatgttgtcgccatcaaacatgtgaataagaagcgcattgagctgacccggcaggttctgtttgaactcaaacatatgagagatgttcagttcaaccatctcactcgcttcattggcgcctgcatagaccctcccaacatttgcattgtcactgaataytgtcctcgtgggagtttacaggatattctagaaaatgacagcatcaacttggactggatgtttcgttattcactcattaatgaccttgttaagggcatggcctttctccacaacagcattatttcatcgcatgggagtctcaagtcctccaactgtgtggtggatagtcgttttgtgctcaaratcacagactatggcctggccagcttccgatcaactgctgaacctgatgacagccatgccctctatgccaagaagctgtggactgccccagaactgctcagtgggaaccccttgccaaccacaggcatgcagaaggctgacgtctatagctttgggatcatcctgcaggagatagcacttcgcagtggtcctttctacttggagggcctggacctcagccccaaagagattgtccagaaggtacgaaatggtcagcggccatatttccggccaagcattgaccggacccaactgaatgaagagctagttttgctgatggagcgatgttgggctsaggacccagctgagcggccagactttggacagattaagggcttcattcggcgctttaacaaggagggtggcaccagcatattggacaacctcctgctgcgcatggaacagtatgccaataacttggagaagctggtggaggaacgcacacaggcctatctggaggaaaaacgcaaggctgaagctctgctctaccaaatcctaccccattcagtggcagagcagttaaaacggggagagactgtacaggctgaggcctttgacagtgttaccatctacttcagtgacattgttggcttcacagcattgtcagcagagagcacccccatgcaggtagtgacacttcttaatgacctgtatacctgctttgatgccataattgacaactttgatgtctacaaggtggagacgattggggatgcttacatggtggtatctggcctcccaggccgaaatggtcaacgccatgcaccagaaattgctcgtatggccctagcattactagatgcagtttcttcctttcgcatccgccaccgaccccatgaccagctgaggctacgcataggggtccatactggtaaggctgactctcactccagccctagtctccacctttcccagactctcccaacctgtttcttctcaaagggccagtctgtgctggggttgttggcctgaagatgccccgttattgtctttttggagacacagtgaacactgcttctcgaatggagtctaatggtcaagcgctgaagatccatgtctcctctaccaccaaggatgccctagatgagctaggatgcttccagctagagcttcggggggatgtggaaatgaagggaaaaggaaagatgcgaacatactggctcttaggagagcggaaaggacctcctggactcctgtaaacccccattctttccaagtcagatagtcttctgctgctggtacctgggtgggcaatggccaccatgtctgcacacaccagaaatggacattttcatatgcaatggaaaacaatacctgtccctctctggcttggtccccttcctccctactttctgtaaatatctgtatct

SEQ ID NO: 5762 - DNA, 1444 bp, Homo sapiens
ttcagaagagggcgtggggccctgggcgtgtggggccctgggcgtgtgtgacccgggccaagtccaagtccgcaggaggctgcgcgggaagctgcttatagctacgacccgcggcccccggcctctagccccaccgccgccaggcaagggcagggacgccaggtcagttacaggctcgggtgcggcagccggcgaccaaaggcactgggcgggaggccggatccaaggggatactgctacgtagctgcagcggaaccggcaggctctgcggcgaaacacactgggacttgtagttctcggctcctctagacgctgtcgcgagcccccagataaagaggcacttcgcggtgacrgggaactacatttcccagaaggccggaatatgttgggggtcaccgggaaagcgccccgactggcggcacttacccggctctataggtccggttccgggggcgcgtggctgcagcggggcccgcgtggtgcctcctgaggcggcccccggatgaagagatctgggaacccgggagccgaggtaacgaacagctcggtggcagggcctgactgctgcggaggcctcggcaatattgattttagacaggcagacttctgcgttatgacccggctgctgggctacgtggaccccctggatccyagctttgtggctgccgtcatcaccatcaccttcaatccgctctactggaatgtggttgcacgatgggaacacaagacccgcaagctgagcagggccttcggatccccctacctggcctgctactctctaagcrtcaccatcctgctcctgaacttcctgcgctcgcactgcttcacgcaggccatgctgagccagcccaggatggagagcctggacacccccgcggcctacagcctgggcctcgcrctcctgggactgggcgtcgtgctcgtgctctccagcttctttgcactggggttcgctggaactttcctaggtgattacttcgggatcctcaaggaggcgagagtgaccgtgttccccttcaacatcctggacaaccccatgtactggggaagcacagccaactacctgggctgggccatcatgcacgccagccccacgggcctgctcctgacggtgctggtggccctcacctacatartggctctcctatacgaagagcccttcaccgctgagatctaccggcagaaagcctccgggtcccacaagaggagctgattgagctgcaacagctttgctgaaggcctggccagcctcctggcctgccccaagtggcaggccctgcgcagggcgagaatggtgcctgctgctcagggctcgcccccggcgtgggctgccccagtgccttggaacctgctgccttggggaccctggacgtgccgacatatggccattgagctccaacccacacattcccattcaccaataaaggcaccctgaccccaacat

SEQ ID NO: 5763 - DNA, 1018 bp, Homo sapiens
tcattccctgaccacagagcgctgctcccgagaaccctgcacccctcaatggagtaaattaccataaagcctcttccttacccatgctttggggtgttaacagctgaggctattcgtcggtgacctgtgggactcgagctattcctgcagctcagcagacctcctggcygtggcagacttctgcgttatgacccggctgctgggctacgtggaccccctggatccyagctttgtggctgccgtcatcaccatcaccttcaatccgctctactggaatgtggttgcacgatgggaacacaagacccgcaagctgagcagggccttcggatccccctacctggcctgctactctctaagcrtcaccatcctgctcctgaacttcctgcgctcgcactgcttcacgcaggccatgctgagccagcccaggatggagagcctggacacccccgcggcctacagcctgggcctcgcrctcctgggactgggcgtcgtgctcgtgctctccagcttctttgcactggggttcgctggaactttcctaggtgattacttcgggatcctcaaggaggcgagagtgaccgtgttccccttcaacatcctggacaaccccatgtactggggaagcacagccaactacctgggctgggccatcatgcacgccagccccacgggcctgctcctgacggtgctggtggccctcacctacatartggctctcctatacgaagagcccttcaccgctgagatctaccggcagaaagcctccgggtcccacaagaggagctgattgagctgcaacagctttgctgaaggcctggccagcctcctggcctgccccaagtggcaggccctgcgcagggcgagaatggtgcctgctgctcagggctcgcccccggcgtgggctgccccagtgccttggaacctgctgccttggggaccctggacgtgccgacatatggccattgagctccaacccacacattcccattcaccaataaaggcaccctgaccccaacat

SEQ ID NO: 5764 - DNA, 1617 bp, Homo sapiens
gcgcgtgttcctttagggaccgcgcgcgccgcggcctcgctctggggccggtacttgcgcgcccgcaccccgcgctccccgccccgctccccgtcccgcgctccacgcgcgccccagcgttgggggcttctcctccgcggcgggaatgtctggccggctccggcagcacggcgcggcccaggtccccgcgcccacgacgggccagcgcgctgggccatgatccggctgggcggctggtgtgcgcggcggctctgcagcgcggcggttcccgcggggcggcgcggggcggcgggcgggctgggcctggcgggaggccgcgccctacgggtgctggtggacatggacggcgtgctggctgacttcgagggcggattcctcaggaagttccgcgcgcgctttcccgaccagcccttcatcgcgctggaggaccggcgcggcttctgggtgtcggagcagtacggccgcctgcggccagggctgagcgagaaggccatcagcatttgggagtcaaagaatttcttttttgaacttgagcctctgccaggggccgtggaagctgtcaaggagatggccagcctacaaaacactgacgtcttcatctgcacaagccccatcaagatgttcaagtactgtccctatgagaagtatgcctgggtggagaagtactttggccctgactttctggagcagattgtgctgaccagagacaagaccgtggtctctgctgaccttctcatagacgaccggccggacatcacaggggccgagccaacccccagctgggagcatgtcctcttcacyrcctgccacaaccagcacctgcagctgcagcccccccgccgcaggctgcactcgtgggcggacgactggaaggccattctggacagcaagcggccctgctgagctggactgtgcttcgggctcctctgtggggctctgacctcagggctcccagctcggggcctgtggggccagtatgctggtctgggagtccctcctagactcctgggccccatgacctcctgctgcatgtcccttcccttccccagccctgccaggccttaacctgatcacggggcagggctgggccctctgggcgcttggacatagacacgtggtcccaggccgttcagcctgacctcaggcagcaggcaccaagctgccagaagcccaggggctcaggacagggaggagttgaggccactgttcagggggctggtggccgtctccactccctaggcaagttctctgaggcagaagggggttccctgttcccagagtctgcagccatcagcaaggaggaccaggaacccggcgactgaggtgcttccaggtggggacaagcccctyttggtctcagccacagcaccccttattccagctgccctgcccaacctgctcaccccacatgaccttctgtgtattcagcaaacactcactaggtgacagcggccaccaggctctgtgctgggggacgatactggccctggcctcgaccagcttagaggtttctcacacctctgttcccagggccccgctcagggcccagcagagagtccgtaggcttgaacatgtgttgagtgcatgaaaaataaatgctgttcatgtgtgtagctc

SEQ ID NO: 5765 - DNA, 5269 bp, Homo sapiens
gagctcaatccctgggcagggaaaagggggtcctcggggctccccgctcgctgtcctttttctggacaggcagttccttggccacctggtagggccgcgttgyctggcaacggcggggtccttcttggctcggcggcgctcggggcctgaggggagaaaaccgccgcggagggcgctgggggtggcggcggcggtccgggaggtggtcgcgcgactgcgtggagcgccagggcgtccgacctctgcacctgagagaagatgaacacggccgaccaggcccgggtggggcccgcggacgacgggcctgcgccgtctggggaggaggagggagaggggggcggcgaggcgggcgggaaggagccagcagcggacgcggccccggggcccagcgctgcattccgcctcatggtgactcggcgggagccggccgtgaagctgcagtatgcggtgagcggcctggaaccgctggcttggtccgaggaccaccgcgtgtctgtgtccacggcccgcagcatcgctgtgctggagctcatctgcgacgtgcacaacccgggccaggacctggttatccaccgcacctcggtgcccgcaccgctcaacagctgtctcctcaaagttggctcaaaaacagaagttgctgagtgcaaggagaaattcgccgcctccaaggaccccacggtcagtcagactttcatgttggatagggtgttcaaccctgaggggaaggctttaccaccaatgagaggattcaagtacaccagctggtctcccatgggttgcgatgctaatggcaggtgcctcttggcagcactgaccatggacaatcgcctgaccatccaggcaaatctcaacagactgcagtgggtccagctggttgacctgactgagatctatggagaacgtctttatgagaccagttacaggctctctaaaaatgaggccccggaaggaaatctcggggattttgctgagtttcagaggagacacagcatgcagaccccagtcagaatggagtggtcgggcatctgtaccacccagcaggtcaagcataacaacgaatgccgggacgttggcagtgtgctcctggctgtcctctttgaaaacggtaatatcgccgtgtggcagtttcagctgccgtttgtaggaaaagaatccatctcttcatgcaacacaattgagtcaggaatcacctctcccagtgtattgttttggtgggaatatgagcacaataatcgaaaaatgagtggccttattgtggggagtgcttttggacccataaaaattcttcctgtcaatctcaaagcagtcaaaggctatttcactttaaggcagcctgttatcttgtggaaagaaatggaccagttacctgtgcacagtatcaaatgtgtgccactttatcatccttaccagaagtgtagttgcagcttagtagtggctgcaagaggctcttatgtattttggtgtcttcttctgatctccaaagcagggctgaatgttcacaattcccatgtcacaggccttcactcactgccaattgtctccatgactgcagacaaacagaatggaacagtctatacttgctccagtgacggaaaggtgaggcagctgattcccattttcacagatgttgcattgaagtttgaacaccagttgattaaactctcagatgtgtttggctcagtgaggactcacgggatagcagtgagcccctgcggtgcatacctggccatcatcaccactgagggcatgatcaacggcctccaccctgttaacaaaaactaccaggtccaatttgttactctcaaaacctttgaagargcagctgctcagctcctggaatcttcagttcaaaacctttttaagcaggtagatttaatagacctagtacgctggaagattttaaaagataaacatatccctcaatttttacaagaagctttggaaaaaaagattgaaagcagtggagtcacctatttttggcgttttaagcttttcctcctgaggattttatatcagtcaatgcagaaaaccccttcagaagccttgtggaaacccacccatgaggactcaaaaatcttactagtggattcgcctgggatgggcaatgctgacgatgaacagcaggaagaaggcacttcttccaaacaggtggtgaagcaaggcctgcaggagaggagcaaggaaggagatgtagaggagcccactgatgactcrctccccacgactggagatgctggaggccgtgagccaatggaagagaaactcctggaaatccaagggaaaatcgaagctgtggagatgcacttgaccagggaacacatgaagcgagtcttaggagaagtgtatctgcacacctggatcacagaaaacactagcatccccacccgcggactctgtaactttttaatgtctgatgaagagtatgatgacagaactgcacgggtgctgattggacatatctcaaagaagatgaacaaacagactttccctgagcactgtagtttgtgtaaagagatcttgccattcacagatcgcaaacaggcagtctgttccaatggccacatttggctccggtgcttcttaacctaccagtcctgccagagtttgatatatagaaggtgtttgctccatgacagcattgcccggcatccagctccagaagatcccgactggattaagaggttactgcaaagcccctgccctttctgtgattctcctgtcttctaaataatcagtgacgggaagatggaagggcatgatgaactctgccatagaaaacttcctccagcctgaagagaaggatgcactggaggaagccggaccctcacgagtggagagaagtccttggtgattgtaaagagggcccctggagctcatttctgaathgcactctccatttccagagactaaaggatgtcctttgaaatggctggactcagagagttggagtcgttttgagatgagcattagccccagctttgtaaccaatgaggaacacttacttatttttaagtatcttgacagaagcaatttgaacacagtgtcccgtcatttctagaaacagaatggtctcttctagagagcttggataaggaccttgctgggttgagttaggttttaatccttgcyttggtttggaactgccttcgggctccagaacttaaattgcttggtccgtggcatctgatgtaccaacagagattaaaagtgtaaagcaacacatgggctgatgttttgttctcagaaaatagctgctggtctgcatccctccattcttgttttttatgcatatggaaaacattttcctaaaactctatattcttaagttgaagccaagactraaatttaatgtgtcaaatgatctggtgactattataatgaataattgtgacttatttttcattctctcctgggtcatcaggtttcctgacccaactccttaatccgtataaagatgtcaaatactgtagttcacccacgccacagccctgcttcagacttaactgtggtagcctagatgagctatttgtacacagaggaaaaaaagatattttcctcttttagtaataagactttcagtatttttaatgttgacatttccagatgtttcatttagtatccaggggtctgtctggagacttctagagagggacagctcagaagtgagacccttgagctctggtgctgtaarcttgtgcaattaagttgaacagagcctgggaatttctttcctctgcacagtcccttgatatttggaatccaggttctgcccccaacccctacccacccagtggtctgttaagatgtctcagatggggctgggcttggtggctcatgcctgtactctcaacactttgggaagcaaaggcaggcagatcacaaggtcaggagttcagcctaaccaacatggtgaaaccgtgtctctactaaaaatacaaaaattagccaggcgtggtggtgcacacctgtaatcccagcactttgggaggccgaggcagacgggtcacttgaggccaggagttcgagaccagcctgggcaatatggcgagacyccgtctctactamaaatacaaaagttagcctggcatggtggcgcatgcctgtaatctcagttactcaggaggctgaggcaggagcatcacttcaacccaggaggcagaagctgcagtcagccgaggtggcaccactgcacttcagcctgggcaagactggagactgcctcaaaaaaaaaagaaaaaaaatgttggtacttagatgataccatgacggcaacctccccacccccacccmgcattgataggtagtgcagaccagcccttggaggcacttctaaacagtctgctcagaaatgttttctgtttcctattcaaattgctgttttgtctcctatgtttaatcatgtatttgctattctgcttatttttctcatttggtggtaatttcaagaagagcgtttatccactattgattttcaagaaagaaaccaagcagcattgaaatcatgagtaacagaattcakaacattgtatggtggaagtcatttgtgtctgcagctgttttttcactttrcaataaataagagtaaaaattgagatcatgtcaaaaaattattgcagttttaatcattatggcatagtttcacttcccctccccccattagaatcagtggagatttgttcttactagggaattttggactgctgccatttaaaacttaggtttttatttaaagcagttgtgcatttttgagaaaatgtattgggagtarctagagaggatctcccaaatttttttgtatgtctctctaggagtaaacatggcaacagtttttctagaacgtggactcactgcagggactggacccaatggcattgttaagaccctaaaatctagccaccacctgcctcccccargtttccacacacccagttggaaggcctttccctgcccttgtccctgtctcacacccatggaggttaagctacagagctggggaaacaggagattttgagttaatggcagcctcacaaatagtgcttctgaatttctctgagggtcagcatacctcatgggagtgtgttgctcagtgcaaccttggaaaagtgggaatggcaccagacgtttttcaggtgcctcttgcaattcaaacttacatcctctataccgtcctaaaatttgcctgatcttatttggtagatttcaagttgctttcagctgtgaccgtaataactgtttcaggaactggagaaatagtggaagtgctattgcc

SEQ ID NO: 5766 - DNA, 1920 bp, Homo sapiens
ctcttttctgtctggcccgcggccccgctgcctgccctgctccaggctccacctgcgccgccgatcgcccgggtatcgcgggggcccaggccagctgagtccgttttccgcgccggggtggcgcccctccaaccgtcctaacgccgggccggcagcaaggagtgttcctgggacctcagagaccaggctcagagcctgacatccctgcgaggggacagcctcatcygcccaggccrgtgggggtctctacaagtgcccaggctcaggtgcagcccccagcaatgcatcgccggagactggccctgggtctggggttctgcctgttggcgggcacaagcytcagtgtcctgtgggtgtatcttgagaactggctgccagtctcctatgtcccctattatctcccctgcccagagatcttcaacatgaagctgcactacaagagggagaagccactccagcccgtggtatggtcacagtaccctcagcccaagctgctggagcacaggcccacacagcygctgacactcacaccctggttggcgcccatcgtctccgagggaaccttcaacccagagcttctgcagcacatctaccagccactgaacctgaccattggggtcacggtgtttgcygtggggaagtamactcatttcatccagtccttcctggagtcagccgaggagttcttcatgcgtgggtaccgggtgcactactacatcttcactgacaaccctgcagccgttcccggggtcccgctgggtccccaccggcttctcagctccatccccatccagggtcactcccactgggaggaracatccatgcgccggatggagaccatcagccagcacattgctaagagggctcaccgggaggtggactacctcttctgccttgatgtggacatggtgtttcggaacccgtggggccctgagaccttgggagacctggtggctgccattcacccaagctactaygccgttccccgccagcmgttcccctatgagcgcaggcgtgtttccactgcctttgtggcagacagcgaaggggacttctattatggtggggcagtcttcggggggcaggtggccagggtatatgagtttactaggggctgccacatggccatcctggcggacaaggccaatggywtcatggctgcctggcgggaggaaagccacctgaaccgtcacttcatctcaaacaagccgtccaaggtgctgtcccccgagtacctctgggaygacaggaagccccagccacccagcctgaagctgatccgcttttctacactggacaaggatatcagctgcctgaggagctgaccacggagctgggggttgccatggatggggacccaaagacctgcagccaccagtgcttcactagcgtgcagaccagccctgtcccgcctccctgtcagtcaggcgaattcaaccggaaaagggacgtggaaaggccactgtgaactgcagagggctgtgcacacagtagcacacaggatctcacagtaacgcggcatgggaacagtgagacagggggaggggaggcgcagttacaaaggcagggcccggcaggcttgccacgttctgcagccgtgcctttgcggggcaggctctgaagcctcagcccgactcagagtgcctgaaccctgccgcgccagtcccccgtttattgcatattgcccttaacgtagcatttctaataccctggtgtgaaggcgccctagaccccttttctctggtcacaggggtcctgggtcctttgatgtctcccaaccacatgtagccaattcctcactcaggcccccagagtgagcctttgaaatggaacaggtctaggctccctcggtttcctgcaccccaaagtgagccgcactctcaggggactagccacctccttcttaagagggtttggggc

SEQ ID NO: 5767 - DNA, 1938 bp, Homo sapiens
ctcttttctgtctggcccgcggccccgctgcctgccctgctccaggctccacctgcgccgccgatcgcccgggtatcgcgggggcccaggccagctgagtccgttttccgcgccggggtggcgcccctccaaccgtcctaacgccgggccggcagcaaggagtgttcctgggacctcagagaccaggctcagagcctgacatccctgcgaggggacagcctcatcygcccaggccrgtgggggtctctacaagtgcccaggctcaggtgcagcccccagcaatgcatcgccggagactggccctgggtctggggttctgcctgttggcgggcacaagcytcagtgtcctgtgggtgtatcttgagaactggctgccagtctcctatgtcccctattatctcccctgcccagagatcttacccatgatgatggctctttcttgcctctgccaccagcaacatgaagctgcactacaagagggagaagccactccagcccgtggtatggtcacagtaccctcagcccaagctgctggagcacaggcccacacagcygctgacactcacaccctggttggcgcccatcgtctccgagggaaccttcaacccagagcttctgcagcacatctaccagccactgaacctgaccattggggtcacggtgtttgcygtggggaatccttcctggagtcagccgaggagttcttcatgcgtgggtaccgggtgcactactacatcttcactgacaaccctgcagccgttcccggggtcccgctgggtccccaccggcttctcagctccatccccatccagggtcactcccactgggaggaracatccatgcgccggatggagaccatcagccagcacattgctaagagggctcaccgggaggtggactacctcttctgccttgatgtggacatggtgtttcggaacccgtggggccctgagaccttgggagacctggtggctgccattcacccaagctactaygccgttccccgccagcmgttcccctatgagcgcaggcgtgtttccactgcctttgtggcagacagcgaaggggacttctattatggtggggcagtcttcggggggcaggtggccagggtatatgagtttactaggggctgccacatggccatcctggcggacaaggccaatggywtcatggctgcctggcgggaggaaagccacctgaaccgtcacttcatctcaaacaagccgtccaaggtgctgtcccccgagtacctctgggaygacaggaagccccagccacccagcctgaagctgatccgcttttctacactggacaaggatatcagctgcctgaggagctgaccacggagctgggggttgccatggatggggacccaaagacctgcagccaccagtgcttcactagcgtgcagaccagccctgtcccgcctccctgtcagtcaggcgaattcaaccggaaaagggacgtggaaaggccactgtgaactgcagagggctgtgcacacagtagcacacaggatctcacagtaacgcggcatgggaacagtgagacagggggaggggaggcgcagttacaaaggcagggcccggcaggcttgccacgttctgcagccgtgcctttgcggggcaggctctgaagcctcagcccgactcagagtgcctgaaccctgccgcgccagtcccccgtttattgcatattgcccttaacgtagcatttctaataccctggtgtgaaggcgccctagaccccttttctctggtcacaggggtcctgggtcctttgatgtctcccaaccacatgtagccaattcctcactcaggcccccagagtgagcctttgaaatggaacaggtctaggctccctcggtttcctgcaccccaaagtgagccgcactctcaggggactagccacctccttcttaagagggtttggggc

SEQ ID NO: 5768 - DNA, 1735 bp, Homo sapiens
tccaggccgctcaccgcatactgcagcttcacggccggctcccgccgagtcaccatgaggcggaatgcagcgctgggccccggggccgcgtccgctgctggctccttcccgcccgcctcgccgcccccctctccctcctcctccccagacggcgcaggcccgtcgtccgcgggccccacccgggcctggtcggccgtgttcatcttctctcaggtgcagaggtcggacgccctggcgctccacgcagtcgcgcgaccacctcccggaccgccgccgccacccccagcgccctccgcggcggttttctcccctcaggccccgagcgccgccgagccaagaaggaccccgccgttgccagrcaacgcggccctaccaggtggccaaggaactgcctgtccagaaaaaggacagcgagcggggagccccgaggacccccttttccctgcccagggattgagctccagagcctgttagggagctacccagacaggctttagttcctaaagtgctgaggaaacgcacggggcggtaaaggggaggctcgtcggtgagatggcgccggatctcgcttctcagaggcattcagagagcttccccagcgtgaactctcggccgaatgtaattttgccaggccgcgagggacgcagaraggggctgccaccaggcgggggcacgcgcggtagtcttgtccctacccgcccggtgccgccgtccccggctcccctcgggacgagtccgtacagctggagccgttccggacccggaaggggcggtggcgcagggtcctcgcgcgtcccacgtggggtcccgggcccagcagtctgcgcaccgggctcgctgctgcaccacgcgtcacccacgcagaccatggcagccgccgacggttcgctcttcgacaaccccaggacgttctccagacgtcccccagcccaggcgagtcggcaagcaaaggctacgaaaagaaaataccaagcrtccagtgaggctcccccagcgaaacggaggaacgaaacttcatttctcccagccaagaaaactagtgttaaagaaactcagaggacttttaaggggaacgcacaaaaaatgttttctccaaagaagcattcggttagcacaagtgatagaaaccaggaggagagacagtgcattaagacttcatcactgtttaaaaacaaccctgacattccagaactccacagacctgtggtaaagcaggtgcaagaaaaagtgtttacttcagctgcttttcatgagctgggcctccacccacatttaatttccacaataaatacggtcttaaaaatgtctagtatgaccagtgttcagaagcaaagtattcctgtgttgctggaaggcagagatgctctcgtgagatcccagacgggctcaggtaaaactcttgcctattgcatccctgtggtccagtcccttcaagcaatggagtcaaaaatacaggtattactgttatccacattttacgaagaagaacagaggcttaggaaagttaaataaccaaggccatgcagcaagtaatggaggaactggatttctacctcagttctgtttggctgcagagaccaagctccttactcttgtgtgaagacttacagtgaaggttaattcctggctcctgtgctatgtaggggccatgcatctgtgtcttccacagtacctaacgtgggaccttttacagaatggtcactcaataaaggtgatttggttttgcagctatcca

SEQ ID NO: 5769 - DNA, 3888 bp, Homo sapiens
tccaggccgctcaccgcatactgcagcttcacggccggctcccgccgagtcaccatgaggcggaatgcagcgctgggccccggggccgcgtccgctgctggctccttcccgcccgcctcgccgcccccctctccctcctcctccccagacggcgcaggcccgtcgtccgcgggccccacccgggcctggtcggccgtgttcatcttctctcaggtgcagaggtcggacgccctggcgctccacgcagtcgcgcgaccacctcccggaccgccgccgccacccccagcgccctccgcggcggttttctcccctcaggccccgagcgccgccgagccaagaaggaccccgccgttgccagrcaacgcggccctaccaggtggccaaggaactgcctgtccagaaaaaggacagcgagcggggagccccgaggacccccttttccctgcccagggattgagctccagagcctgttagggagctacccagacaggctttagttcctaaagtgctgaggaaacgcacggggcggtaaaggggaggctcgtcggtgagatggcgccggatctcgcttctcagaggcattcagagagcttccccagcgtgaactctcggccgaatgtaattttgccaggccgcgagggacgcagaraggggctgccaccaggcgggggcacgcgcggtagtcttgtccctacccgcccggtgccgccgtccccggctcccctcgggacgagtccgtacagctggagccgttccggacccggaaggggcggtggcgcagggtcctcgcgcgtcccacgtggggtcccgggcccagcagtctgcgcaccgggctcgctgctgcaccacgcgtcacccacgcagaccatggcagccgccgacggttcgctcttcgacaaccccaggacgttctccagacgtcccccagcccaggcgagtcggcaagcaaaggctacgaaaagaaaataccaagcrtccagtgaggctcccccagcgaaacggaggaacgaaacttcatttctcccagccaagaaaactagtgttaaagaaactcagaggacttttaaggggaacgcacaaaaaatgttttctccaaagaagcattcggttagcacaagtgatagaaaccaggaggagagacagtgcattaagacttcatcactgtttaaaaacaaccctgacattccagaactccacagacctgtggtaaagcaggtgcaagaaaaagtgtttacttcagctgcttttcatgagctgggcctccacccacatttaatttccacaataaatacggtcttaaaaatgtctagtatgaccagtgttcagaagcaaagtattcctgtgttgctggaaggcagagatgctctcgtgagatcccagacgggctcaggtaaaactcttgcctattgcatccctgtggtccagtcccttcaagcaatggagtcaaaaatacagcgcagtgatggcccctatgccctggtgctcgtgccaacgagagagctagctctacaaagctttgacactgtccagaaactgcttaagcctttcacctggattgtgcctggagtgttaatgggaggagagaagagaaaatcagaaaaggccagactccgcaaaggaataaatatccttatctcaactcctggacgcctggtggatcatataaaatccacaaagaacattcattttagtcggctgcggtggttggtgtttgatgaagcagacagaatcttggatttgggttttgaaaaggacatcacagtgatacttaatgctgtaaatgctgaatgccaaaaacgacagaatgtcttgctatcagcgacactcacagaaggtgtaacgcggctagctgatatcagtttgcatgatccagtcagtatttctgtcctggacaagagccatgaccagttgaacccaaaggacaaagcggtccaggaggtctgtcctccaccagctggcgacaagctggacagctttgcaataccagagagtctcaagcagcatgtgrctgtggttcccagcaaactgaggcttgtctgcctagcggccttcatccttcagaaatgcaagtttgaggaagaccagaagatggttgtctttttctcaagttgcgagctggtggagttccactacagcctcttcctacagaccctgctgagcagctcaggggcgccggcatcagggcagttgccatctgcctccatgcgattaaaattcctacggctrcatggcggcatggagcaggaggaaagaacagcagtgtttcaggaattttcacattccagaagaggcgtccttctttgcacggatgttgcagctcggggcttagatctccctcaagtcacgtggattgttcagtacaacgctccatcttcacctgcagaatacatccaccggattggaagaaccgcccggattggctgccatgggagcagcctgctcattttggctccttcggaggcagaatatgtcaactcgttggcttctcacaaaatcaacgtttctgagattaagatggaagatattttgtgtgttctgacaagagatgattgttttaaagggaaacgatggggagcccagaaatcccatgctgttggcccccaggaaatccragagcgagccacagtcttgcaracggtatttgaagattacgtgcactccagtgagaggagggtctcctgggcaaagaaagctctgcagtccttcatccaagcctacgccacctaccccagggagctgaagcacatcttccacgtccgatccctccaccttgggcatgtggcgaagagcttcggactaagagatgcccccaggaatcttagtgccttgactagaaaraagaggaaagcacacgtgaaaaggcctgaccttcataagaagacccagartaaacacagcctcgctgaaatcctacgttcggaatactcaagcggcatggaggccgacrtcgccaaggtcaaaaagcaaaacgcacctggagagcctggtggccggcccctgcagcacagtctgcagccgacaccctgctttggccgtgggaaaacattaaaatggagaaaaacccaaaaaggtgtacagcrggacagcaagacttcccagaaagtttaaaatctctctgggtcttcgagtggaacctggaagycccgggtggcagtggattgatgtccagttcttgtcagaggagscttgtgaaaaataactgcgcctttgcctgaataccacgtccccaagaatcagaggggccacagcccttctcctccatgggaggccctggagcctgatagaaatcagtggtgtggggcactgtagagactagccagctcccgacggaaggggtctgtgtcttgtattgatcccatcagtgcccggcactcccttcacccaggtgctgacgtgccggggttgagctggcaccccgggatgtgatgtaagaacgccctgcgcgtcagcctggaacgggcttgattgctgcccttaactgtgttctgaagtttcacagcttggcttcagcctatcagcgcatacattggcatgaattttgtgaattagggtgttaaaaacyggaattgaatttgtacaaaaagagaatatatttatcactaattattttcttaatgtaggaatgtaccgttaaaaaggaccaaaagtttttggtctgggtcaaaaaatacgaatgtgttctcaggctcgtggtccctcttattttcttctggaaacacgaggttgcatttacatgcattgctccctctttcatgtccactgaaaactcactctctcagggctaattgatttactgttggctttttattatttgcctttgaagtcaaaaggcaccagtatcccaagctttttttccctatcgaatcctgtcttgtcttcaagaaaggt

SEQ ID NO: 5770 - DNA, 3164 bp, Homo sapiens
ccgggctcgctgctgcaccacgcgtcacccacgcagaccatggcagccgccgacggttcgctcttcgacaaccccaggacgttctccagacgtcccccagcccaggcgagtcggggatgcgcctggragcggggagtggagcggtgtggaggggcggggagctggctcctgcgcctagaaaagtaaaggaaggaattagaggctgtttcccgtggaagcaagcaaaggctacgaaaagaaaataccaagcrtccagtgaggctcccccagcgaaacggaggaacgaaacttcatttctcccagccaagaaaactagtgttaaagaaactcagaggacttttaaggggaacgcacaaaaaatgttttctccaaagaagcattcggttagcacaagtgatagaaaccaggaggagagacagtgcattaagacttcatcactgtttaaaaacaaccctgacattccagaactccacagacctgtggtaaagcaggtgcaagaaaaagtgtttacttcagctgcttttcatgagctgggcctccacccacatttaatttccacaataaatacggtcttaaaaatgtctagtatgaccagtgttcagaagcaaagtattcctgtgttgctggaaggcagagatgctctcgtgagatcccagacgggctcaggtaaaactcttgcctattgcatccctgtggtccagtcccttcaagcaatggagtcaaaaatacagcgcagtgatggcccctatgccctggtgctcgtgccaacgagagagctagctctacaaagctttgacactgtccagaaactgcttaagcctttcacctggattgtgcctggagtgttaatgggaggagagaagagaaaatcagaaaaggccagactccgcaaaggaataaatatccttatctcaactcctggacgcctggtggatcatataaaatccacaaagaacattcattttagtcggctgcggtggttggtgtttgatgaagcagacagaatcttggatttgggttttgaaaaggacatcacagtgatacttaatgctgtaaatgctgaatgccaaaaacgacagaatgtcttgctatcagcgacactcacagaaggtgtaacgcggctagctgatatcagtttgcatgatccagtcagtatttctgtcctggacaagagccatgaccagttgaacccaaaggacaaagcggtccaggaggtctgtcctccaccagctggcgacaagctggacagctttgcaataccagagagtctcaagcagcatgtgrctgtggttcccagcaaactgaggcttgtctgcctagcggccttcatccttcagaaatgcaagtttgaggaagaccagaagatggttgtctttttctcaagttgcgagctggtggagttccactacagcctcttcctacagaccctgctgagcagctcaggggcgccggcatcagggcagttgccatctgcctccatgcgattaaaattcctacggctrcatggcggcatggagcaggaggaaagaacagcagtgtttcaggaattttcacattccagaagaggcgtccttctttgcacggatgttgcagctcggggcttagatctccctcaagtcacgtggattgttcagtacaacgctccatcttcacctgcagaatacatccaccggattggaagaaccgcccggattggctgccatgggagcagcctgctcattttggctccttcggaggcagaatatgtcaactcgttggcttctcacaaaatcaacgtttctgagattaagatggaagatattttgtgtgttctgacaagagatgattgttttaaagggaaacgatggggagcccagaaatcccatgctgttggcccccaggaaatccragagcgagccacagtcttgcaracggtatttgaagattacgtgcactccagtgagaggagggtctcctgggcaaagaaagctctgcagtccttcatccaagcctacgccacctaccccagggagctgaagcacatcttccacgtccgatccctccaccttgggcatgtggcgaagagcttcggactaagagatgcccccaggaatcttagtgccttgactagaaaraagaggaaagcacacgtgaaaaggcctgaccttcataagaagacccagartaaacacagcctcgctgaaatcctacgttcggaatactcaagcggcatggaggccgacrtcgccaaggtcaaaaagcaaaacgcacctggagagcctggtggccggcccctgcagcacagtctgcagccgacaccctgctttggccgtgggaaaacattaaaatggagaaaaacccaaaaaggtgtacagcrggacagcaagacttcccagaaagtttaaaatctctctgggtcttcgagtggaacctggaagycccgggtggcagtggattgatgtccagttcttgtcagaggagscttgtgaaaaataactgcgcctttgcctgaataccacgtccccaagaatcagaggggccacagcccttctcctccatgggaggccctggagcctgatagaaatcagtggtgtggggcactgtagagactagccagctcccgacggaaggggtctgtgtcttgtattgatcccatcagtgcccggcactcccttcacccaggtgctgacgtgccggggttgagctggcaccccgggatgtgatgtaagaacgccctgcgcgtcagcctggaacgggcttgattgctgcccttaactgtgttctgaagtttcacagcttggcttcagcctatcagcgcatacattggcatgaattttgtgaattagggtgttaaaaacyggaattgaatttgtacaaaaagagaatatatttatcactaattattttcttaatgtaggaatgtaccgttaaaaaggaccaaaagtttttggtctgggtcaaaaaatacgaatgtgttctcaggctcgtggtccctcttattttcttctggaaacacgaggttgcatttacatgcattgctccctctttcatgtccactgaaaactcactctctcagggctaattgatttactgttggctttttattatttgcctttgaagtcaaaaggcaccagtatcccaagctttttttccctatcgaatcctgtcttgtcttcaagaaaggt

SEQ ID NO: 5771 - DNA, 1451 bp, Homo sapiens
tccaggccgctcaccgcatactgcagcttcacggccggctcccgccgagtcaccatgaggcggaatgcagcgctgggccccggggccgcgtccgctgctggctccttcccgcccgcctcgccgcccccctctccctcctcctccccagacggcgcaggcccgtcgtccgcgggccccacccgggcctggtcggccgtgttcatcttctctcaggtgcagaggtcggacgccctggcgctccacgcagtcgcgcgaccacctcccggaccgccgccgccacccccagcgccctccgcggcggttttctcccctcaggccccgagcgccgccgagccaagaaggaccccgccgttgccagrcaacgcggccctaccaggtggccaaggaactgcctgtccagaaaaaggacagcgagcggggagccccgaggacccccttttccctgcccagggattgagctccagagcctgttagggagctacccagacaggctttagttcctaaagtgctgaggaaacgcacggggcggtaaaggggaggctcgtcggtgagatggcgccggatctcgcttctcagaggcattcagagagcttccccagcgtgaactctcggccgaatgtaattttgccaggccgcgagggacgcagaraggggctgccaccaggcgggggcacgcgcggtagtcttgtccctacccgcccggtgccgccgtccccggctcccctcgggacgagtccgtacagctggagccgttccggacccggaaggggcggtggcgcagggtcctcgcgcgtcccacgtggggtcccgggcccagcagtctgcgcaccgggctcgctgctgcaccacgcgtcacccacgcagaccatggcagccgccgacggttcgctcttcgacaaccccaggacgttctccagacgtcccccagcccaggcgagtcggcaagcaaaggctacgaaaagaaaataccaagcrtccagtgaggctcccccagcgaaacggaggaacgaaacttcatttctcccagccaagaaaactagtgttaaagaaactcagaggacttttaaggggaacgcacaaaaaatgttttctccaaagaagcattcggttagcacaagtgatagaaaccaggaggagagacagtgcattaagacttcatcactgtttaaaaacaaccctgacattccagaactccacagacctgtggtaaagcaggtgcaagaaaaagtgtttacttcagctgcttttcatgagctgggcctccacccacatttaatttccacaataaatacggtcttaaaaatgtctagtatgaccaggtaagaacttcaggctcctcttgatttcttaggcattacgtgggtataaccggaygaaacctgtgtgtgcaaggcagagcaaatttgtgtcttggcgttggaacacagtgccaggttatcgaccataaaggg

SEQ ID NO: 5772 - DNA, 7381 bp, Homo sapiens
cccggaagtgggccagaggtacggtccgctcccacctggggcgagtgcgcgcacggccaggttgggtaccgggtgcgcccaggaacccgcgcgaggcgaagtcgctgagactctgcctgcttctcacccagctgcctcggcgctgccccggtcgctcgccgcccctccctttgcccttcacggcgcccggccctccttgggctgcggcttctgtgcgaggctgggcagccagcccttccccttctgtttctccccgtcccctccccscgaccgtagcaccagagtcgcgggtcctgcagtgccccagaagccgcacgtataactccctcggcgggtaactcattcgactgtggagttcttttaattcttatgaaagatttcaaatcctctrgaagccaaaatgggacacagtaaayagattcgaattttacttctgaacgaaatggagaaactggaaaagaccctcttcagacttgaacaagggtatgagctacagttccgattaggcccarctttacagggaaaagcagttaccgtgtatacaaattacccatttcctggagaaacatttaatagagaaaaattccgttctctggattgggaaaayccaacagaaagagaagatgattctgataaatactgtaaacttaatctgcaacaatctggttcatttcagtattatttccttcaaggaaatgagaaaagtggtggaggttacatagttgtggaccccattttacgtgttggtgctgataatcatgtgctaccctwggactgtgttactcttcagacatttttagctaagtgtttgggaccttttgatgaatgggaaagcagacttagggttgcaaaagaatcaggctacaacatgattcattttaccccattgcagactcttggactatctaggtcatgctactcccttgccaatcagttagaattaaatcctgacttttcaagacctaatagaaagtatacctggaatgatgttggacagctagtggaaaaattaaaaaaggaatggaatgttatttgtattactgatgttgtctacaatcatactgctgctaatagtaaatggatccrggaacatccagaatgtgcctataatcttgtgaattctccacacttaaaacctgcctgggtcttagacagagcactttggcgtttctcctgtgatgttgcagaagggaaatacaaagaaaagggaatacctgctttgattgaaaatgatcaccatatgaattccatccgaaaaataatttgggaggatatttttccaaagcttaaactytgggaatttttccaagtagatgtcaacaaagcggttgagcaatttagaagacttcttacacaagaaaataggcgagtaaccaagtctgatccaaaccaacaccttacgattattcaagatcctgaatacagacggtttggctgtactgtagatatgaacattgcactaacgactttcataccacatgacaaggggccagcagcaattgaagaatgctgtaattggtttcataaaagaatggaggaattaaattcagagaakcatcractcattaactatcatcaggaacaggcagttaattgccttttgggaaatgtgttttatgaacgactggctggccatggtccaaaactaggacctgtcactagaaagcatcctttagttaccaggtattttactttcccatttgaagagatagacttctccatggaagaatctatgattcatctgccaaataaagcttgttttctgatggcacacaatggatgggtaatgggagatgatcctcttcgaaactttgctgaaccgggttcagaagtttacctaaggagagaacttatttgctggggagacagtgttaaattacgctatgggaataaaccagaggactgtccttatctctgggcacacatgaaaaaatacactgaaataactgcaacttatttccagggagtacgtcttgataactgccactsaacacctcttcacgtagctgagtacatgttggatgctgctaggaatttgcaacccaatttatatgtagtagctgaactgttcacaggaagtgaagatctggacaatgtctttgttactagactgggcattagttccttaataagagaggcaatgagtgcatataatagtcatgaagagggcagattagtttaccgatatggaggagaacctgttggatcctttgttcagccctgtttgaggcctttaatgccagctattgcacatgccctgtttatggatattacgcatgataatgagtgtcctattgtgcatagatcagcgtatgatgctcttccaagtactacaattgtttctatggcatgttgtgctagtggaagtacaagaggctatgatgaattagtgcctcatcagatttcagtggtttctgaagaacggttttacactaagtggaatcctgaagcattgccttcaaacacaggtgaagttaatttccaaagcggcattattgcakccaggtgtgctatcagtaaacttcatcaggagcttggagccaaggttgttctttctgcttctcaggtgtatgtggatcaagttgatgaagacatagtggcagtaacaagacactcacctagcatccatcagtctgttgtggctgtatctagaactgctttcaggaatcccaagacttcattttacagcaaggaagtgcctcaaatgtgcatccctggcaaaattgaagaagtagttcttgaagctagaactattgagagaaacacgaaaccttataggaaggatgagaattcaatcaatggaacaccagatatcacagtagaaattagagaacatattcagcttaatgaaagtaaaattgttaaacaagctggagttgccacaaaagggcccaatgaatatattcaagaaatagaatttgaaaacttgtctccaggaagtgttattatattcagagttagtcttgatccacatgcacaagtcgctgttggaattcttygaaatcatctgacacaattcagtcctcactttaaatctggcagcctagctgttgacaatgcagatcctatattaaaaattccttttgcttctcttgcctccagattaactttggctgagctaaatcagatcctttaccgatgtgaatcagaagaaaaggaagatggtggagggtgctatgacataccaaactggtcagcccttaaatatgcmggtcttcaaggtttaatgtctgtattggcagaaataagaccaaagaatgacttggggcatcctttttgtaataatttgagatstggagattggatgattgactatgtcagtaaccggcttatttcacgatcaggaactattgctgaagttggtaaatggttgcaggctatgttcttctacctgaagcagatcccacgttaccttatcccatgttactttgatgctatattaattggtgcatataccactcttctggatacagcatggaagcagatgtcaagctttgttcagaatggttcaacctttgtgaaacacctttcattgggttcagttcaactgtgtggagtaggaaaattcccttccctgccaattctttcacctgccctaatggatgtaycttataggttaaatgagatcacaaaagaaaaggagcaatgttgtgtttctctagctgcaggcttacctcatttttcttctggtattttccgctgctggggaagggatacttttattgcacttagaggtatactgctgattactrgacgctatgtagaagccaggaatattattttagcatttgcgggtaccctgaggcatggtctcattcctaatctactgggtgaaggaawttatgccagatasaattgtcgggatgctgtgtggtggtggctgcagtgtatccaggattactgtaaaatggttccaaatggtctagacattctcaagtgcccagtttccagaatgtatcctacagatgattctgctcctttgcctgctggcacactggatcagccattgtttgaagtcatacaggaarcaatgcaaaaacacatgcagggcatacagttcygagaaaggaatgctggtccccagatagatcgaaacatgaaggacgaaggttttaatataactgcaggagttgatgaagaaacaggatttgtttatggaggaaatcgtttcaattgtggcacatggatggataaaatgggagaaagtgacagagctagaaacagaggaatcccagccacaccaagagatgggtctgcygtggaaattgtgggcctgagtaaatctgctgttcgctggttgctggaattatccaaaaaaaatattttcccttatcatgaagtcacagtaaaaagacatggaaaggctataaaggtctcatatgatgagtggaacagaaaaatacaagacaactttgaaaagctatttcatgtttccgaagacccttcagatttaaatgaaaagcatccaaatctggttcacaaacgtggcatatacaaagatagttatggagcttcaagtccttggtgtgactatcagctcaggcctaattttaccatagcaatggttgtggcccctgagctctttactacagaaaaagcatggaaagctttggagattgcagaaaaaaaattgcttggtccccttggcatgaaaactttagatccagatgatatggtttactgtggaatttatgacaatgcattagacaatgacaactacaatcttgctaaaggtttcaattatcaccaasgacctgagtggctgtggcctattgggtattttcttcgtgcaaaattatatttttccagattgatgggcccggagactactgcaaagactatagttttggttaaaaatgttctttcccgacattatgttcatcttgagagatccccttggaaaggacttccagaactgaccaatgagaatgcccagtactgtcctttcagctgtgaaacacaagcctggtcaattgctactattcttgagacactttatgatttatagtttattacagatattaagtatgcaattacttgtattataggatgcaaggtcatcatatgtaaatgccttatatgcacaggctcaagttgttttaaaaatctcatttattataatattgatgctcaattaggtaagattgtaaaagcattgattttttttaatgtacagaggtagatttcaatttgaatcagaaagaaatatcattaccaatgaaatgtgtttgagttcagtaagaattattcaaatgcctagaaatccatagtttggaaaakaaaaatcatgtcatcttctatttgtacagaaatgaaaataaaatatgaaaataatgaaagaaatgaaaagatagcttttaattgtggtatatataatcttcagtaacaatacatactgaatacgctgtggttcattaatattaacaccacgtactatagtattcttaatacagtgctcactgcatttaataaatatttaataaatgatgaatgatagaagtttccatctacaatatatgttcctaaatggagcacagatgttcaaactatgctttcattttttcactgatatattaatttttgtgtaatgaatgccaacagtatattttatatgatttacttatgtgaggaaacatgcaaagcattaggaaatttatttcctaaaaacagttttgtaaaattagtattgagttctattgagtattataagatagcttacattttcaaaatggaaattgtyggtcatatttctagaactttaaagaaaaaagaatgttatattagttttctaaaactcaactatctttagtcatgttcaaaaatctattgctagatcatagtagatactggttttctattaactcaaaacctacattgacaagtttaacattgagaagaatcttaacaaaaatatggatatgaattcagtagatatcttaaattcaataaaatcactggaagtttttcatgataacttattttaagatgccttaaaaatcttaaagtcacaaaaggaaaaaggtttttaacatttayatgagttaacattttttcatagaacttatttcctagatagaattttttactgttttttactgttttcttaagaaaacagttaaatcattatgcattcagttggaagaaagtagtggcaagaattctttcattgctatataatattcagtggctcatttatacctaataaaataatggtattttaaaataatgctaytttcaaagtagcatttttttagttagtttacaggttacatacccaaaaccttaactatgactaagaaattamagaagaaaaccagcaaactaaaacttctgggcagcaaaaatatataaatgcttcagatgtcaaatacccatgcttgaaagctcgtgtaatttactttaagattatctgcctgctcttcttcaaagctgaccttgctttagaaatagttttaactagcttagttttctggtttccaaaactaaaatagattaaatcctacaaatttaaggacagttgtgacagtaatctgaccactatctataaayacattggacattggtttccaaatctccctttcttcttcagttccttccttgttcaatatatacccttctctaaactgtgcgggtaaaaggaatgactgtccttgagagaaccattagtttatcaaaggtttatgtagttttgttgctgtaccctaactttgatattcagggaggtaggaaaggtaacagaaaaccagcatatttaatcaaagcaagaagtaatcgctgacagttaaatgtgaccaaaaaaattaaaagttcacaatttttttaatgtagccatttggggttatctctagtaaggcagatacccacgttggtaaatttttaggatattgtgttgcactagaaaactaagtggttcatatttctaatgaggaagattaatgaaagaacattgttatattctgcgtggtatattttaaagtttaagaaggcatgttaaacattatttcctctatggtagttaaaatacagaattagatttttaacaggtgtcatttgactaaacgtttcggtagaatgcttcatacttgagtgatgctggataaggtattgtatttcaacaatggactatgccttggtttttcactaatcaaaatcaaaattactctttaacatgataaatgaatttaccagtttagtatgctgtggtattttaataagttttcaaagataattgggaaaacatgagactggtcatattgatgaatattgtaacatgtgaattgtgatccatttctgatatgtcttgaactactgtgtctagtrggcaaatgtcattgttacctctgtgtgttaagaaaataaaaatattttytaaaggtctgta

SEQ ID NO: 5773 - DNA, 7170 bp, Homo sapiens
ctgtctacggcagctattccagaggcaacaactgcttccctctgttctcatctccccattggtggctggcgacccgaatttgggaatggggagattgcccacctgttatctttgagcagactaatctcttgggtaactcattcgactgtggagttcttttaattcttatgaaagatttcaaatcctctrgaagccaaaatgggacacagtaaayagattcgaattttacttctgaacgaaatggagaaactggaaaagaccctcttcagacttgaacaagggtatgagctacagttccgattaggcccarctttacagggaaaagcagttaccgtgtatacaaattacccatttcctggagaaacatttaatagagaaaaattccgttctctggattgggaaaayccaacagaaagagaagatgattctgataaatactgtaaacttaatctgcaacaatctggttcatttcagtattatttccttcaaggaaatgagaaaagtggtggaggttacatagttgtggaccccattttacgtgttggtgctgataatcatgtgctaccctwggactgtgttactcttcagacatttttagctaagtgtttgggaccttttgatgaatgggaaagcagacttagggttgcaaaagaatcaggctacaacatgattcattttaccccattgcagactcttggactatctaggtcatgctactcccttgccaatcagttagaattaaatcctgacttttcaagacctaatagaaagtatacctggaatgatgttggacagctagtggaaaaattaaaaaaggaatggaatgttatttgtattactgatgttgtctacaatcatactgctgctaatagtaaatggatccrggaacatccagaatgtgcctataatcttgtgaattctccacacttaaaacctgcctgggtcttagacagagcactttggcgtttctcctgtgatgttgcagaagggaaatacaaagaaaagggaatacctgctttgattgaaaatgatcaccatatgaattccatccgaaaaataatttgggaggatatttttccaaagcttaaactytgggaatttttccaagtagatgtcaacaaagcggttgagcaatttagaagacttcttacacaagaaaataggcgagtaaccaagtctgatccaaaccaacaccttacgattattcaagatcctgaatacagacggtttggctgtactgtagatatgaacattgcactaacgactttcataccacatgacaaggggccagcagcaattgaagaatgctgtaattggtttcataaaagaatggaggaattaaattcagagaakcatcractcattaactatcatcaggaacaggcagttaattgccttttgggaaatgtgttttatgaacgactggctggccatggtccaaaactaggacctgtcactagaaagcatcctttagttaccaggtattttactttcccatttgaagagatagacttctccatggaagaatctatgattcatctgccaaataaagcttgttttctgatggcacacaatggatgggtaatgggagatgatcctcttcgaaactttgctgaaccgggttcagaagtttacctaaggagagaacttatttgctggggagacagtgttaaattacgctatgggaataaaccagaggactgtccttatctctgggcacacatgaaaaaatacactgaaataactgcaacttatttccagggagtacgtcttgataactgccactsaacacctcttcacgtagctgagtacatgttggatgctgctaggaatttgcaacccaatttatatgtagtagctgaactgttcacaggaagtgaagatctggacaatgtctttgttactagactgggcattagttccttaataagagaggcaatgagtgcatataatagtcatgaagagggcagattagtttaccgatatggaggagaacctgttggatcctttgttcagccctgtttgaggcctttaatgccagctattgcacatgccctgtttatggatattacgcatgataatgagtgtcctattgtgcatagatcagcgtatgatgctcttccaagtactacaattgtttctatggcatgttgtgctagtggaagtacaagaggctatgatgaattagtgcctcatcagatttcagtggtttctgaagaacggttttacactaagtggaatcctgaagcattgccttcaaacacaggtgaagttaatttccaaagcggcattattgcakccaggtgtgctatcagtaaacttcatcaggagcttggagccaagggttttattcaggtgtatgtggatcaagttgatgaagacatagtggcagtaacaagacactcacctagcatccatcagtctgttgtggctgtatctagaactgctttcaggaatcccaagacttcattttacagcaaggaagtgcctcaaatgtgcatccctggcaaaattgaagaagtagttcttgaagctagaactattgagagaaacacgaaaccttataggaaggatgagaattcaatcaatggaacaccagatatcacagtagaaattagagaacatattcagcttaatgaaagtaaaattgttaaacaagctggagttgccacaaaagggcccaatgaatatattcaagaaatagaatttgaaaacttgtctccaggaagtgttattatattcagagttagtcttgatccacatgcacaagtcgctgttggaattcttygaaatcatctgacacaattcagtcctcactttaaatctggcagcctagctgttgacaatgcagatcctatattaaaaattccttttgcttctcttgcctccagattaactttggctgagctaaatcagatcctttaccgatgtgaatcagaagaaaaggaagatggtggagggtgctatgacataccaaactggtcagcccttaaatatgcmggtcttcaaggtttaatgtctgtattggcagaaataagaccaaagaatgacttggggcatcctttttgtaataatttgagatstggagattggatgattgactatgtcagtaaccggcttatttcacgatcaggaactattgctgaagttggtaaatggttgcaggctatgttcttctacctgaagcagatcccacgttaccttatcccatgttactttgatgctatattaattggtgcatataccactcttctggatacagcatggaagcagatgtcaagctttgttcagaatggttcaacctttgtgaaacacctttcattgggttcagttcaactgtgtggagtaggaaaattcccttccctgccaattctttcacctgccctaatggatgtaycttataggttaaatgagatcacaaaagaaaaggagcaatgttgtgtttctctagctgcaggcttacctcatttttcttctggtattttccgctgctggggaagggatacttttattgcacttagaggtatactgctgattactrgacgctatgtagaagccaggaatattattttagcatttgcgggtaccctgaggcatggtctcattcctaatctactgggtgaaggaawttatgccagatasaattgtcgggatgctgtgtggtggtggctgcagtgtatccaggattactgtaaaatggttccaaatggtctagacattctcaagtgcccagtttccagaatgtatcctacagatgattctgctcctttgcctgctggcacactggatcagccattgtttgaagtcatacaggaarcaatgcaaaaacacatgcagggcatacagttcygagaaaggaatgctggtccccagatagatcgaaacatgaaggacgaaggttttaatataactgcaggagttgatgaagaaacaggatttgtttatggaggaaatcgtttcaattgtggcacatggatggataaaatgggagaaagtgacagagctagaaacagaggaatcccagccacaccaagagatgggtctgcygtggaaattgtgggcctgagtaaatctgctgttcgctggttgctggaattatccaaaaaaaatattttcccttatcatgaagtcacagtaaaaagacatggaaaggctataaaggtctcatatgatgagtggaacagaaaaatacaagacaactttgaaaagctatttcatgtttccgaagacccttcagatttaaatgaaaagcatccaaatctggttcacaaacgtggcatatacaaagatagttatggagcttcaagtccttggtgtgactatcagctcaggcctaattttaccatagcaatggttgtggcccctgagctctttactacagaaaaagcatggaaagctttggagattgcagaaaaaaaattgcttggtccccttggcatgaaaactttagatccagatgatatggtttactgtggaatttatgacaatgcattagacaatgacaactacaatcttgctaaaggtttcaattatcaccaasgacctgagtggctgtggcctattgggtattttcttcgtgcaaaattatatttttccagattgatgggcccggagactactgcaaagactatagttttggttaaaaatgttctttcccgacattatgttcatcttgagagatccccttggaaaggacttccagaactgaccaatgagaatgcccagtactgtcctttcagctgtgaaacacaagcctggtcaattgctactattcttgagacactttatgatttatagtttattacagatattaagtatgcaattacttgtattataggatgcaaggtcatcatatgtaaatgccttatatgcacaggctcaagttgttttaaaaatctcatttattataatattgatgctcaattaggtaagattgtaaaagcattgattttttttaatgtacagaggtagatttcaatttgaatcagaaagaaatatcattaccaatgaaatgtgtttgagttcagtaagaattattcaaatgcctagaaatccatagtttggaaaakaaaaatcatgtcatcttctatttgtacagaaatgaaaataaaatatgaaaataatgaaagaaatgaaaagatagcttttaattgtggtatatataatcttcagtaacaatacatactgaatacgctgtggttcattaatattaacaccacgtactatagtattcttaatacagtgctcactgcatttaataaatatttaataaatgatgaatgatagaagtttccatctacaatatatgttcctaaatggagcacagatgttcaaactatgctttcattttttcactgatatattaatttttgtgtaatgaatgccaacagtatattttatatgatttacttatgtgaggaaacatgcaaagcattaggaaatttatttcctaaaaacagttttgtaaaattagtattgagttctattgagtattataagatagcttacattttcaaaatggaaattgtyggtcatatttctagaactttaaagaaaaaagaatgttatattagttttctaaaactcaactatctttagtcatgttcaaaaatctattgctagatcatagtagatactggttttctattaactcaaaacctacattgacaagtttaacattgagaagaatcttaacaaaaatatggatatgaattcagtagatatcttaaattcaataaaatcactggaagtttttcatgataacttattttaagatgccttaaaaatcttaaagtcacaaaaggaaaaaggtttttaacatttayatgagttaacattttttcatagaacttatttcctagatagaattttttactgttttttactgttttcttaagaaaacagttaaatcattatgcattcagttggaagaaagtagtggcaagaattctttcattgctatataatattcagtggctcatttatacctaataaaataatggtattttaaaataatgctaytttcaaagtagcatttttttagttagtttacaggttacatacccaaaaccttaactatgactaagaaattamagaagaaaaccagcaaactaaaacttctgggcagcaaaaatatataaatgcttcagatgtcaaatacccatgcttgaaagctcgtgtaatttactttaagattatctgcctgctcttcttcaaagctgaccttgctttagaaatagttttaactagcttagttttctggtttccaaaactaaaatagattaaatcctacaaatttaaggacagttgtgacagtaatctgaccactatctataaayacattggacattggtttccaaatctccctttcttcttcagttccttccttgttcaatatatacccttctctaaactgtgcgggtaaaaggaatgactgtccttgagagaaccattagtttatcaaaggtttatgtagttttgttgctgtaccctaactttgatattcagggaggtaggaaaggtaacagaaaaccagcatatttaatcaaagcaagaagtaatcgctgacagttaaatgtgaccaaaaaaattaaaagttcacaatttttttaatgtagccatttggggttatctctagtaaggcagatacccacgttggtaaatttttaggatattgtgttgcactagaaaactaagtggttcatatttctaatgaggaagattaatgaaagaacattgttatattctgcgtggtatattttaaagtttaagaaggcatgttaaacattatttcctctatggtagttaaaatacagaattagatttttaacaggtgtcatttgactaaacgtttcggtagaatgcttcatacttgagtgatgctggataaggtattgtatttcaacaatggactatgccttggtttttcactaatcaaaatcaaaattactctttaacatgataaatgaatttaccagtttagtatgctgtggtattttaataagttttcaaagataattgggaaaacatgagactggtcatattgatgaatattgtaacatgtgaattgtgatccatttctgatatgtcttgaactactgtgtctagtrggcaaatgtcattgttacctctgtgtgttaagaaaataaaaatattttytaaaggtctgta

SEQ ID NO: 5774 - DNA, 7183 bp, Homo sapiens
tgtataagaatttgcacatcccaagttgctatgtgaataggaatgcgtttccaggggaaggagaaagagacattacagagcagacagctctatgatgtttactatacttgctaaaatgtgaaattcagctaaattggaatacaaagtagtgccaaaacagcattaggtttgcggagttattttaaacataattgaaaaatcaaggttttttaatactttaaataaaacatctgtttttcaatgtggtaatttaagtcctaygatgagtttattaacatgtgctttttatttagggtatgagctacagttccgattaggcccarctttacagggaaaagcagttaccgtgtatacaaattacccatttcctggagaaacatttaatagagaaaaattccgttctctggattgggaaaayccaacagaaagagaagatgattctgataaatactgtaaacttaatctgcaacaatctggttcatttcagtattatttccttcaaggaaatgagaaaagtggtggaggttacatagttgtggaccccattttacgtgttggtgctgataatcatgtgctaccctwggactgtgttactcttcagacatttttagctaagtgtttgggaccttttgatgaatgggaaagcagacttagggttgcaaaagaatcaggctacaacatgattcattttaccccattgcagactcttggactatctaggtcatgctactcccttgccaatcagttagaattaaatcctgacttttcaagacctaatagaaagtatacctggaatgatgttggacagctagtggaaaaattaaaaaaggaatggaatgttatttgtattactgatgttgtctacaatcatactgctgctaatagtaaatggatccrggaacatccagaatgtgcctataatcttgtgaattctccacacttaaaacctgcctgggtcttagacagagcactttggcgtttctcctgtgatgttgcagaagggaaatacaaagaaaagggaatacctgctttgattgaaaatgatcaccatatgaattccatccgaaaaataatttgggaggatatttttccaaagcttaaactytgggaatttttccaagtagatgtcaacaaagcggttgagcaatttagaagacttcttacacaagaaaataggcgagtaaccaagtctgatccaaaccaacaccttacgattattcaagatcctgaatacagacggtttggctgtactgtagatatgaacattgcactaacgactttcataccacatgacaaggggccagcagcaattgaagaatgctgtaattggtttcataaaagaatggaggaattaaattcagagaakcatcractcattaactatcatcaggaacaggcagttaattgccttttgggaaatgtgttttatgaacgactggctggccatggtccaaaactaggacctgtcactagaaagcatcctttagttaccaggtattttactttcccatttgaagagatagacttctccatggaagaatctatgattcatctgccaaataaagcttgttttctgatggcacacaatggatgggtaatgggagatgatcctcttcgaaactttgctgaaccgggttcagaagtttacctaaggagagaacttatttgctggggagacagtgttaaattacgctatgggaataaaccagaggactgtccttatctctgggcacacatgaaaaaatacactgaaataactgcaacttatttccagggagtacgtcttgataactgccactsaacacctcttcacgtagctgagtacatgttggatgctgctaggaatttgcaacccaatttatatgtagtagctgaactgttcacaggaagtgaagatctggacaatgtctttgttactagactgggcattagttccttaataagagaggcaatgagtgcatataatagtcatgaagagggcagattagtttaccgatatggaggagaacctgttggatcctttgttcagccctgtttgaggcctttaatgccagctattgcacatgccctgtttatggatattacgcatgataatgagtgtcctattgtgcatagatcagcgtatgatgctcttccaagtactacaattgtttctatggcatgttgtgctagtggaagtacaagaggctatgatgaattagtgcctcatcagatttcagtggtttctgaagaacggttttacactaagtggaatcctgaagcattgccttcaaacacaggtgaagttaatttccaaagcggcattattgcakccaggtgtgctatcagtaaacttcatcaggagcttggagccaagggttttattcaggtgtatgtggatcaagttgatgaagacatagtggcagtaacaagacactcacctagcatccatcagtctgttgtggctgtatctagaactgctttcaggaatcccaagacttcattttacagcaaggaagtgcctcaaatgtgcatccctggcaaaattgaagaagtagttcttgaagctagaactattgagagaaacacgaaaccttataggaaggatgagaattcaatcaatggaacaccagatatcacagtagaaattagagaacatattcagcttaatgaaagtaaaattgttaaacaagctggagttgccacaaaagggcccaatgaatatattcaagaaatagaatttgaaaacttgtctccaggaagtgttattatattcagagttagtcttgatccacatgcacaagtcgctgttggaattcttygaaatcatctgacacaattcagtcctcactttaaatctggcagcctagctgttgacaatgcagatcctatattaaaaattccttttgcttctcttgcctccagattaactttggctgagctaaatcagatcctttaccgatgtgaatcagaagaaaaggaagatggtggagggtgctatgacataccaaactggtcagcccttaaatatgcmggtcttcaaggtttaatgtctgtattggcagaaataagaccaaagaatgacttggggcatcctttttgtaataatttgagatstggagattggatgattgactatgtcagtaaccggcttatttcacgatcaggaactattgctgaagttggtaaatggttgcaggctatgttcttctacctgaagcagatcccacgttaccttatcccatgttactttgatgctatattaattggtgcatataccactcttctggatacagcatggaagcagatgtcaagctttgttcagaatggttcaacctttgtgaaacacctttcattgggttcagttcaactgtgtggagtaggaaaattcccttccctgccaattctttcacctgccctaatggatgtaycttataggttaaatgagatcacaaaagaaaaggagcaatgttgtgtttctctagctgcaggcttacctcatttttcttctggtattttccgctgctggggaagggatacttttattgcacttagaggtatactgctgattactrgacgctatgtagaagccaggaatattattttagcatttgcgggtaccctgaggcatggtctcattcctaatctactgggtgaaggaawttatgccagatasaattgtcgggatgctgtgtggtggtggctgcagtgtatccaggattactgtaaaatggttccaaatggtctagacattctcaagtgcccagtttccagaatgtatcctacagatgattctgctcctttgcctgctggcacactggatcagccattgtttgaagtcatacaggaarcaatgcaaaaacacatgcagggcatacagttcygagaaaggaatgctggtccccagatagatcgaaacatgaaggacgaaggttttaatataactgcaggagttgatgaagaaacaggatttgtttatggaggaaatcgtttcaattgtggcacatggatggataaaatgggagaaagtgacagagctagaaacagaggaatcccagccacaccaagagatgggtctgcygtggaaattgtgggcctgagtaaatctgctgttcgctggttgctggaattatccaaaaaaaatattttcccttatcatgaagtcacagtaaaaagacatggaaaggctataaaggtctcatatgatgagtggaacagaaaaatacaagacaactttgaaaagctatttcatgtttccgaagacccttcagatttaaatgaaaagcatccaaatctggttcacaaacgtggcatatacaaagatagttatggagcttcaagtccttggtgtgactatcagctcaggcctaattttaccatagcaatggttgtggcccctgagctctttactacagaaaaagcatggaaagctttggagattgcagaaaaaaaattgcttggtccccttggcatgaaaactttagatccagatgatatggtttactgtggaatttatgacaatgcattagacaatgacaactacaatcttgctaaaggtttcaattatcaccaasgacctgagtggctgtggcctattgggtattttcttcgtgcaaaattatatttttccagattgatgggcccggagactactgcaaagactatagttttggttaaaaatgttctttcccgacattatgttcatcttgagagatccccttggaaaggacttccagaactgaccaatgagaatgcccagtactgtcctttcagctgtgaaacacaagcctggtcaattgctactattcttgagacactttatgatttatagtttattacagatattaagtatgcaattacttgtattataggatgcaaggtcatcatatgtaaatgccttatatgcacaggctcaagttgttttaaaaatctcatttattataatattgatgctcaattaggtaagattgtaaaagcattgattttttttaatgtacagaggtagatttcaatttgaatcagaaagaaatatcattaccaatgaaatgtgtttgagttcagtaagaattattcaaatgcctagaaatccatagtttggaaaakaaaaatcatgtcatcttctatttgtacagaaatgaaaataaaatatgaaaataatgaaagaaatgaaaagatagcttttaattgtggtatatataatcttcagtaacaatacatactgaatacgctgtggttcattaatattaacaccacgtactatagtattcttaatacagtgctcactgcatttaataaatatttaataaatgatgaatgatagaagtttccatctacaatatatgttcctaaatggagcacagatgttcaaactatgctttcattttttcactgatatattaatttttgtgtaatgaatgccaacagtatattttatatgatttacttatgtgaggaaacatgcaaagcattaggaaatttatttcctaaaaacagttttgtaaaattagtattgagttctattgagtattataagatagcttacattttcaaaatggaaattgtyggtcatatttctagaactttaaagaaaaaagaatgttatattagttttctaaaactcaactatctttagtcatgttcaaaaatctattgctagatcatagtagatactggttttctattaactcaaaacctacattgacaagtttaacattgagaagaatcttaacaaaaatatggatatgaattcagtagatatcttaaattcaataaaatcactggaagtttttcatgataacttattttaagatgccttaaaaatcttaaagtcacaaaaggaaaaaggtttttaacatttayatgagttaacattttttcatagaacttatttcctagatagaattttttactgttttttactgttttcttaagaaaacagttaaatcattatgcattcagttggaagaaagtagtggcaagaattctttcattgctatataatattcagtggctcatttatacctaataaaataatggtattttaaaataatgctaytttcaaagtagcatttttttagttagtttacaggttacatacccaaaaccttaactatgactaagaaattamagaagaaaaccagcaaactaaaacttctgggcagcaaaaatatataaatgcttcagatgtcaaatacccatgcttgaaagctcgtgtaatttactttaagattatctgcctgctcttcttcaaagctgaccttgctttagaaatagttttaactagcttagttttctggtttccaaaactaaaatagattaaatcctacaaatttaaggacagttgtgacagtaatctgaccactatctataaayacattggacattggtttccaaatctccctttcttcttcagttccttccttgttcaatatatacccttctctaaactgtgcgggtaaaaggaatgactgtccttgagagaaccattagtttatcaaaggtttatgtagttttgttgctgtaccctaactttgatattcagggaggtaggaaaggtaacagaaaaccagcatatttaatcaaagcaagaagtaatcgctgacagttaaatgtgaccaaaaaaattaaaagttcacaatttttttaatgtagccatttggggttatctctagtaaggcagatacccacgttggtaaatttttaggatattgtgttgcactagaaaactaagtggttcatatttctaatgaggaagattaatgaaagaacattgttatattctgcgtggtatattttaaagtttaagaaggcatgttaaacattatttcctctatggtagttaaaatacagaattagatttttaacaggtgtcatttgactaaacgtttcggtagaatgcttcatacttgagtgatgctggataaggtattgtatttcaacaatggactatgccttggtttttcactaatcaaaatcaaaattactctttaacatgataaatgaatttaccagtttagtatgctgtggtattttaataagttttcaaagataattgggaaaacatgagactggtcatattgatgaatattgtaacatgtgaattgtgatccatttctgatatgtcttgaactactgtgtctagtrggcaaatgtcattgttacctctgtgtgttaagaaaataaaaatattttytaaaggtctgta

SEQ ID NO: 5775 - DNA, 7372 bp, Homo sapiens
cccggaagtgggccagaggtacggtccgctcccacctggggcgagtgcgcgcacggccaggttgggtaccgggtgcgcccaggaacccgcgcgaggcgaagtcgctgagactctgcctgcttctcacccagctgcctcggcgctgccccggtcgctcgccgcccctccctttgcccttcacggcgcccggccctccttgggctgcggcttctgtgcgaggctgggcagccagcccttccccttctgtttctccccgtcccctccccscgaccgtagcaccagagtcgcgggtcctgcagtgccccagaagccgcacgtataactccctcggcgggtaactcattcgactgtggagttcttttaattcttatgaaagatttcaaatcctctrgaagccaaaatgggacacagtaaayagattcgaattttacttctgaacgaaatggagaaactggaaaagaccctcttcagacttgaacaagggtatgagctacagttccgattaggcccarctttacagggaaaagcagttaccgtgtatacaaattacccatttcctggagaaacatttaatagagaaaaattccgttctctggattgggaaaayccaacagaaagagaagatgattctgataaatactgtaaacttaatctgcaacaatctggttcatttcagtattatttccttcaaggaaatgagaaaagtggtggaggttacatagttgtggaccccattttacgtgttggtgctgataatcatgtgctaccctwggactgtgttactcttcagacatttttagctaagtgtttgggaccttttgatgaatgggaaagcagacttagggttgcaaaagaatcaggctacaacatgattcattttaccccattgcagactcttggactatctaggtcatgctactcccttgccaatcagttagaattaaatcctgacttttcaagacctaatagaaagtatacctggaatgatgttggacagctagtggaaaaattaaaaaaggaatggaatgttatttgtattactgatgttgtctacaatcatactgctgctaatagtaaatggatccrggaacatccagaatgtgcctataatcttgtgaattctccacacttaaaacctgcctgggtcttagacagagcactttggcgtttctcctgtgatgttgcagaagggaaatacaaagaaaagggaatacctgctttgattgaaaatgatcaccatatgaattccatccgaaaaataatttgggaggatatttttccaaagcttaaactytgggaatttttccaagtagatgtcaacaaagcggttgagcaatttagaagacttcttacacaagaaaataggcgagtaaccaagtctgatccaaaccaacaccttacgattattcaagatcctgaatacagacggtttggctgtactgtagatatgaacattgcactaacgactttcataccacatgacaaggggccagcagcaattgaagaatgctgtaattggtttcataaaagaatggaggaattaaattcagagaakcatcractcattaactatcatcaggaacaggcagttaattgccttttgggaaatgtgttttatgaacgactggctggccatggtccaaaactaggacctgtcactagaaagcatcctttagttaccaggtattttactttcccatttgaagagatagacttctccatggaagaatctatgattcatctgccaaataaagcttgttttctgatggcacacaatggatgggtaatgggagatgatcctcttcgaaactttgctgaaccgggttcagaagtttacctaaggagagaacttatttgctggggagacagtgttaaattacgctatgggaataaaccagaggactgtccttatctctgggcacacatgaaaaaatacactgaaataactgcaacttatttccagggagtacgtcttgataactgccactsaacacctcttcacgtagctgagtacatgttggatgctgctaggaatttgcaacccaatttatatgtagtagctgaactgttcacaggaagtgaagatctggacaatgtctttgttactagactgggcattagttccttaataagagaggcaatgagtgcatataatagtcatgaagagggcagattagtttaccgatatggaggagaacctgttggatcctttgttcagccctgtttgaggcctttaatgccagctattgcacatgccctgtttatggatattacgcatgataatgagtgtcctattgtgcatagatcagcgtatgatgctcttccaagtactacaattgtttctatggcatgttgtgctagtggaagtacaagaggctatgatgaattagtgcctcatcagatttcagtggtttctgaagaacggttttacactaagtggaatcctgaagcattgccttcaaacacaggtgaagttaatttccaaagcggcattattgcakccaggtgtgctatcagtaaacttcatcaggagcttggagccaagggttttattcaggtgtatgtggatcaagttgatgaagacatagtggcagtaacaagacactcacctagcatccatcagtctgttgtggctgtatctagaactgctttcaggaatcccaagacttcattttacagcaaggaagtgcctcaaatgtgcatccctggcaaaattgaagaagtagttcttgaagctagaactattgagagaaacacgaaaccttataggaaggatgagaattcaatcaatggaacaccagatatcacagtagaaattagagaacatattcagcttaatgaaagtaaaattgttaaacaagctggagttgccacaaaagggcccaatgaatatattcaagaaatagaatttgaaaacttgtctccaggaagtgttattatattcagagttagtcttgatccacatgcacaagtcgctgttggaattcttygaaatcatctgacacaattcagtcctcactttaaatctggcagcctagctgttgacaatgcagatcctatattaaaaattccttttgcttctcttgcctccagattaactttggctgagctaaatcagatcctttaccgatgtgaatcagaagaaaaggaagatggtggagggtgctatgacataccaaactggtcagcccttaaatatgcmggtcttcaaggtttaatgtctgtattggcagaaataagaccaaagaatgacttggggcatcctttttgtaataatttgagatstggagattggatgattgactatgtcagtaaccggcttatttcacgatcaggaactattgctgaagttggtaaatggttgcaggctatgttcttctacctgaagcagatcccacgttaccttatcccatgttactttgatgctatattaattggtgcatataccactcttctggatacagcatggaagcagatgtcaagctttgttcagaatggttcaacctttgtgaaacacctttcattgggttcagttcaactgtgtggagtaggaaaattcccttccctgccaattctttcacctgccctaatggatgtaycttataggttaaatgagatcacaaaagaaaaggagcaatgttgtgtttctctagctgcaggcttacctcatttttcttctggtattttccgctgctggggaagggatacttttattgcacttagaggtatactgctgattactrgacgctatgtagaagccaggaatattattttagcatttgcgggtaccctgaggcatggtctcattcctaatctactgggtgaaggaawttatgccagatasaattgtcgggatgctgtgtggtggtggctgcagtgtatccaggattactgtaaaatggttccaaatggtctagacattctcaagtgcccagtttccagaatgtatcctacagatgattctgctcctttgcctgctggcacactggatcagccattgtttgaagtcatacaggaarcaatgcaaaaacacatgcagggcatacagttcygagaaaggaatgctggtccccagatagatcgaaacatgaaggacgaaggttttaatataactgcaggagttgatgaagaaacaggatttgtttatggaggaaatcgtttcaattgtggcacatggatggataaaatgggagaaagtgacagagctagaaacagaggaatcccagccacaccaagagatgggtctgcygtggaaattgtgggcctgagtaaatctgctgttcgctggttgctggaattatccaaaaaaaatattttcccttatcatgaagtcacagtaaaaagacatggaaaggctataaaggtctcatatgatgagtggaacagaaaaatacaagacaactttgaaaagctatttcatgtttccgaagacccttcagatttaaatgaaaagcatccaaatctggttcacaaacgtggcatatacaaagatagttatggagcttcaagtccttggtgtgactatcagctcaggcctaattttaccatagcaatggttgtggcccctgagctctttactacagaaaaagcatggaaagctttggagattgcagaaaaaaaattgcttggtccccttggcatgaaaactttagatccagatgatatggtttactgtggaatttatgacaatgcattagacaatgacaactacaatcttgctaaaggtttcaattatcaccaasgacctgagtggctgtggcctattgggtattttcttcgtgcaaaattatatttttccagattgatgggcccggagactactgcaaagactatagttttggttaaaaatgttctttcccgacattatgttcatcttgagagatccccttggaaaggacttccagaactgaccaatgagaatgcccagtactgtcctttcagctgtgaaacacaagcctggtcaattgctactattcttgagacactttatgatttatagtttattacagatattaagtatgcaattacttgtattataggatgcaaggtcatcatatgtaaatgccttatatgcacaggctcaagttgttttaaaaatctcatttattataatattgatgctcaattaggtaagattgtaaaagcattgattttttttaatgtacagaggtagatttcaatttgaatcagaaagaaatatcattaccaatgaaatgtgtttgagttcagtaagaattattcaaatgcctagaaatccatagtttggaaaakaaaaatcatgtcatcttctatttgtacagaaatgaaaataaaatatgaaaataatgaaagaaatgaaaagatagcttttaattgtggtatatataatcttcagtaacaatacatactgaatacgctgtggttcattaatattaacaccacgtactatagtattcttaatacagtgctcactgcatttaataaatatttaataaatgatgaatgatagaagtttccatctacaatatatgttcctaaatggagcacagatgttcaaactatgctttcattttttcactgatatattaatttttgtgtaatgaatgccaacagtatattttatatgatttacttatgtgaggaaacatgcaaagcattaggaaatttatttcctaaaaacagttttgtaaaattagtattgagttctattgagtattataagatagcttacattttcaaaatggaaattgtyggtcatatttctagaactttaaagaaaaaagaatgttatattagttttctaaaactcaactatctttagtcatgttcaaaaatctattgctagatcatagtagatactggttttctattaactcaaaacctacattgacaagtttaacattgagaagaatcttaacaaaaatatggatatgaattcagtagatatcttaaattcaataaaatcactggaagtttttcatgataacttattttaagatgccttaaaaatcttaaagtcacaaaaggaaaaaggtttttaacatttayatgagttaacattttttcatagaacttatttcctagatagaattttttactgttttttactgttttcttaagaaaacagttaaatcattatgcattcagttggaagaaagtagtggcaagaattctttcattgctatataatattcagtggctcatttatacctaataaaataatggtattttaaaataatgctaytttcaaagtagcatttttttagttagtttacaggttacatacccaaaaccttaactatgactaagaaattamagaagaaaaccagcaaactaaaacttctgggcagcaaaaatatataaatgcttcagatgtcaaatacccatgcttgaaagctcgtgtaatttactttaagattatctgcctgctcttcttcaaagctgaccttgctttagaaatagttttaactagcttagttttctggtttccaaaactaaaatagattaaatcctacaaatttaaggacagttgtgacagtaatctgaccactatctataaayacattggacattggtttccaaatctccctttcttcttcagttccttccttgttcaatatatacccttctctaaactgtgcgggtaaaaggaatgactgtccttgagagaaccattagtttatcaaaggtttatgtagttttgttgctgtaccctaactttgatattcagggaggtaggaaaggtaacagaaaaccagcatatttaatcaaagcaagaagtaatcgctgacagttaaatgtgaccaaaaaaattaaaagttcacaatttttttaatgtagccatttggggttatctctagtaaggcagatacccacgttggtaaatttttaggatattgtgttgcactagaaaactaagtggttcatatttctaatgaggaagattaatgaaagaacattgttatattctgcgtggtatattttaaagtttaagaaggcatgttaaacattatttcctctatggtagttaaaatacagaattagatttttaacaggtgtcatttgactaaacgtttcggtagaatgcttcatacttgagtgatgctggataaggtattgtatttcaacaatggactatgccttggtttttcactaatcaaaatcaaaattactctttaacatgataaatgaatttaccagtttagtatgctgtggtattttaataagttttcaaagataattgggaaaacatgagactggtcatattgatgaatattgtaacatgtgaattgtgatccatttctgatatgtcttgaactactgtgtctagtrggcaaatgtcattgttacctctgtgtgttaagaaaataaaaatattttytaaaggtctgta

SEQ ID NO: 5776 - DNA, 7110 bp, Homo sapiens
ctgtctacggcagctattccagaggcaacaactgcttccctctgttctcatctccccattggtggctggcgacccgaatttgggaatggggagattgcccacctgttatctttgagcagactaatctcttaagccaaartgggacacagtaaayagattcgaattttacttctgaacgaaatggagaaactggaaaagaccctcttcagacttgaacaagggtatgagctacagttccgattaggcccarctttacagggaaaagcagttaccgtgtatacaaattacccatttcctggagaaacatttaatagagaaaaattccgttctctggattgggaaaayccaacagaaagagaagatgattctgataaatactgtaaacttaatctgcaacaatctggttcatttcagtattatttccttcaaggaaatgagaaaagtggtggaggttacatagttgtggaccccattttacgtgttggtgctgataatcatgtgctaccctwggactgtgttactcttcagacatttttagctaagtgtttgggaccttttgatgaatgggaaagcagacttagggttgcaaaagaatcaggctacaacatgattcattttaccccattgcagactcttggactatctaggtcatgctactcccttgccaatcagttagaattaaatcctgacttttcaagacctaatagaaagtatacctggaatgatgttggacagctagtggaaaaattaaaaaaggaatggaatgttatttgtattactgatgttgtctacaatcatactgctgctaatagtaaatggatccrggaacatccagaatgtgcctataatcttgtgaattctccacacttaaaacctgcctgggtcttagacagagcactttggcgtttctcctgtgatgttgcagaagggaaatacaaagaaaagggaatacctgctttgattgaaaatgatcaccatatgaattccatccgaaaaataatttgggaggatatttttccaaagcttaaactytgggaatttttccaagtagatgtcaacaaagcggttgagcaatttagaagacttcttacacaagaaaataggcgagtaaccaagtctgatccaaaccaacaccttacgattattcaagatcctgaatacagacggtttggctgtactgtagatatgaacattgcactaacgactttcataccacatgacaaggggccagcagcaattgaagaatgctgtaattggtttcataaaagaatggaggaattaaattcagagaakcatcractcattaactatcatcaggaacaggcagttaattgccttttgggaaatgtgttttatgaacgactggctggccatggtccaaaactaggacctgtcactagaaagcatcctttagttaccaggtattttactttcccatttgaagagatagacttctccatggaagaatctatgattcatctgccaaataaagcttgttttctgatggcacacaatggatgggtaatgggagatgatcctcttcgaaactttgctgaaccgggttcagaagtttacctaaggagagaacttatttgctggggagacagtgttaaattacgctatgggaataaaccagaggactgtccttatctctgggcacacatgaaaaaatacactgaaataactgcaacttatttccagggagtacgtcttgataactgccactsaacacctcttcacgtagctgagtacatgttggatgctgctaggaatttgcaacccaatttatatgtagtagctgaactgttcacaggaagtgaagatctggacaatgtctttgttactagactgggcattagttccttaataagagaggcaatgagtgcatataatagtcatgaagagggcagattagtttaccgatatggaggagaacctgttggatcctttgttcagccctgtttgaggcctttaatgccagctattgcacatgccctgtttatggatattacgcatgataatgagtgtcctattgtgcatagatcagcgtatgatgctcttccaagtactacaattgtttctatggcatgttgtgctagtggaagtacaagaggctatgatgaattagtgcctcatcagatttcagtggtttctgaagaacggttttacactaagtggaatcctgaagcattgccttcaaacacaggtgaagttaatttccaaagcggcattattgcakccaggtgtgctatcagtaaacttcatcaggagcttggagccaagggttttattcaggtgtatgtggatcaagttgatgaagacatagtggcagtaacaagacactcacctagcatccatcagtctgttgtggctgtatctagaactgctttcaggaatcccaagacttcattttacagcaaggaagtgcctcaaatgtgcatccctggcaaaattgaagaagtagttcttgaagctagaactattgagagaaacacgaaaccttataggaaggatgagaattcaatcaatggaacaccagatatcacagtagaaattagagaacatattcagcttaatgaaagtaaaattgttaaacaagctggagttgccacaaaagggcccaatgaatatattcaagaaatagaatttgaaaacttgtctccaggaagtgttattatattcagagttagtcttgatccacatgcacaagtcgctgttggaattcttygaaatcatctgacacaattcagtcctcactttaaatctggcagcctagctgttgacaatgcagatcctatattaaaaattccttttgcttctcttgcctccagattaactttggctgagctaaatcagatcctttaccgatgtgaatcagaagaaaaggaagatggtggagggtgctatgacataccaaactggtcagcccttaaatatgcmggtcttcaaggtttaatgtctgtattggcagaaataagaccaaagaatgacttggggcatcctttttgtaataatttgagatstggagattggatgattgactatgtcagtaaccggcttatttcacgatcaggaactattgctgaagttggtaaatggttgcaggctatgttcttctacctgaagcagatcccacgttaccttatcccatgttactttgatgctatattaattggtgcatataccactcttctggatacagcatggaagcagatgtcaagctttgttcagaatggttcaacctttgtgaaacacctttcattgggttcagttcaactgtgtggagtaggaaaattcccttccctgccaattctttcacctgccctaatggatgtaycttataggttaaatgagatcacaaaagaaaaggagcaatgttgtgtttctctagctgcaggcttacctcatttttcttctggtattttccgctgctggggaagggatacttttattgcacttagaggtatactgctgattactrgacgctatgtagaagccaggaatattattttagcatttgcgggtaccctgaggcatggtctcattcctaatctactgggtgaaggaawttatgccagatasaattgtcgggatgctgtgtggtggtggctgcagtgtatccaggattactgtaaaatggttccaaatggtctagacattctcaagtgcccagtttccagaatgtatcctacagatgattctgctcctttgcctgctggcacactggatcagccattgtttgaagtcatacaggaarcaatgcaaaaacacatgcagggcatacagttcygagaaaggaatgctggtccccagatagatcgaaacatgaaggacgaaggttttaatataactgcaggagttgatgaagaaacaggatttgtttatggaggaaatcgtttcaattgtggcacatggatggataaaatgggagaaagtgacagagctagaaacagaggaatcccagccacaccaagagatgggtctgcygtggaaattgtgggcctgagtaaatctgctgttcgctggttgctggaattatccaaaaaaaatattttcccttatcatgaagtcacagtaaaaagacatggaaaggctataaaggtctcatatgatgagtggaacagaaaaatacaagacaactttgaaaagctatttcatgtttccgaagacccttcagatttaaatgaaaagcatccaaatctggttcacaaacgtggcatatacaaagatagttatggagcttcaagtccttggtgtgactatcagctcaggcctaattttaccatagcaatggttgtggcccctgagctctttactacagaaaaagcatggaaagctttggagattgcagaaaaaaaattgcttggtccccttggcatgaaaactttagatccagatgatatggtttactgtggaatttatgacaatgcattagacaatgacaactacaatcttgctaaaggtttcaattatcaccaasgacctgagtggctgtggcctattgggtattttcttcgtgcaaaattatatttttccagattgatgggcccggagactactgcaaagactatagttttggttaaaaatgttctttcccgacattatgttcatcttgagagatccccttggaaaggacttccagaactgaccaatgagaatgcccagtactgtcctttcagctgtgaaacacaagcctggtcaattgctactattcttgagacactttatgatttatagtttattacagatattaagtatgcaattacttgtattataggatgcaaggtcatcatatgtaaatgccttatatgcacaggctcaagttgttttaaaaatctcatttattataatattgatgctcaattaggtaagattgtaaaagcattgattttttttaatgtacagaggtagatttcaatttgaatcagaaagaaatatcattaccaatgaaatgtgtttgagttcagtaagaattattcaaatgcctagaaatccatagtttggaaaakaaaaatcatgtcatcttctatttgtacagaaatgaaaataaaatatgaaaataatgaaagaaatgaaaagatagcttttaattgtggtatatataatcttcagtaacaatacatactgaatacgctgtggttcattaatattaacaccacgtactatagtattcttaatacagtgctcactgcatttaataaatatttaataaatgatgaatgatagaagtttccatctacaatatatgttcctaaatggagcacagatgttcaaactatgctttcattttttcactgatatattaatttttgtgtaatgaatgccaacagtatattttatatgatttacttatgtgaggaaacatgcaaagcattaggaaatttatttcctaaaaacagttttgtaaaattagtattgagttctattgagtattataagatagcttacattttcaaaatggaaattgtyggtcatatttctagaactttaaagaaaaaagaatgttatattagttttctaaaactcaactatctttagtcatgttcaaaaatctattgctagatcatagtagatactggttttctattaactcaaaacctacattgacaagtttaacattgagaagaatcttaacaaaaatatggatatgaattcagtagatatcttaaattcaataaaatcactggaagtttttcatgataacttattttaagatgccttaaaaatcttaaagtcacaaaaggaaaaaggtttttaacatttayatgagttaacattttttcatagaacttatttcctagatagaattttttactgttttttactgttttcttaagaaaacagttaaatcattatgcattcagttggaagaaagtagtggcaagaattctttcattgctatataatattcagtggctcatttatacctaataaaataatggtattttaaaataatgctaytttcaaagtagcatttttttagttagtttacaggttacatacccaaaaccttaactatgactaagaaattamagaagaaaaccagcaaactaaaacttctgggcagcaaaaatatataaatgcttcagatgtcaaatacccatgcttgaaagctcgtgtaatttactttaagattatctgcctgctcttcttcaaagctgaccttgctttagaaatagttttaactagcttagttttctggtttccaaaactaaaatagattaaatcctacaaatttaaggacagttgtgacagtaatctgaccactatctataaayacattggacattggtttccaaatctccctttcttcttcagttccttccttgttcaatatatacccttctctaaactgtgcgggtaaaaggaatgactgtccttgagagaaccattagtttatcaaaggtttatgtagttttgttgctgtaccctaactttgatattcagggaggtaggaaaggtaacagaaaaccagcatatttaatcaaagcaagaagtaatcgctgacagttaaatgtgaccaaaaaaattaaaagttcacaatttttttaatgtagccatttggggttatctctagtaaggcagatacccacgttggtaaatttttaggatattgtgttgcactagaaaactaagtggttcatatttctaatgaggaagattaatgaaagaacattgttatattctgcgtggtatattttaaagtttaagaaggcatgttaaacattatttcctctatggtagttaaaatacagaattagatttttaacaggtgtcatttgactaaacgtttcggtagaatgcttcatacttgagtgatgctggataaggtattgtatttcaacaatggactatgccttggtttttcactaatcaaaatcaaaattactctttaacatgataaatgaatttaccagtttagtatgctgtggtattttaataagttttcaaagataattgggaaaacatgagactggtcatattgatgaatattgtaacatgtgaattgtgatccatttctgatatgtcttgaactactgtgtctagtrggcaaatgtcattgttacctctgtgtgttaagaaaataaaaatattttytaaaggtctgta

SEQ ID NO: 5777 - DNA, 7183 bp, Homo sapiens
gggtaactcattcgactgtggagttcttttaattcttatgaaagatttcaaatcctctrgaagccaaaatgggacacagtaaayagattcgaattttacttctgaacgaaatggagaaactggaaaagaccctcttcagacttgaacaagaaactgggtctcactatgttgcccaggttgatattgaactcctggactcaagcaaccctccctctttggcctctgaaagtactgggattacaagcataagccaccgggcatggccccaattctgagcattaatttatttattgggtatgagctacagttccgattaggcccarctttacagggaaaagcagttaccgtgtatacaaattacccatttcctggagaaacatttaatagagaaaaattccgttctctggattgggaaaayccaacagaaagagaagatgattctgataaatactgtaaacttaatctgcaacaatctggttcatttcagtattatttccttcaaggaaatgagaaaagtggtggaggttacatagttgtggaccccattttacgtgttggtgctgataatcatgtgctaccctwggactgtgttactcttcagacatttttagctaagtgtttgggaccttttgatgaatgggaaagcagacttagggttgcaaaagaatcaggctacaacatgattcattttaccccattgcagactcttggactatctaggtcatgctactcccttgccaatcagttagaattaaatcctgacttttcaagacctaatagaaagtatacctggaatgatgttggacagctagtggaaaaattaaaaaaggaatggaatgttatttgtattactgatgttgtctacaatcatactgctgctaatagtaaatggatccrggaacatccagaatgtgcctataatcttgtgaattctccacacttaaaacctgcctgggtcttagacagagcactttggcgtttctcctgtgatgttgcagaagggaaatacaaagaaaagggaatacctgctttgattgaaaatgatcaccatatgaattccatccgaaaaataatttgggaggatatttttccaaagcttaaactytgggaatttttccaagtagatgtcaacaaagcggttgagcaatttagaagacttcttacacaagaaaataggcgagtaaccaagtctgatccaaaccaacaccttacgattattcaagatcctgaatacagacggtttggctgtactgtagatatgaacattgcactaacgactttcataccacatgacaaggggccagcagcaattgaagaatgctgtaattggtttcataaaagaatggaggaattaaattcagagaakcatcractcattaactatcatcaggaacaggcagttaattgccttttgggaaatgtgttttatgaacgactggctggccatggtccaaaactaggacctgtcactagaaagcatcctttagttaccaggtattttactttcccatttgaagagatagacttctccatggaagaatctatgattcatctgccaaataaagcttgttttctgatggcacacaatggatgggtaatgggagatgatcctcttcgaaactttgctgaaccgggttcagaagtttacctaaggagagaacttatttgctggggagacagtgttaaattacgctatgggaataaaccagaggactgtccttatctctgggcacacatgaaaaaatacactgaaataactgcaacttatttccagggagtacgtcttgataactgccactsaacacctcttcacgtagctgagtacatgttggatgctgctaggaatttgcaacccaatttatatgtagtagctgaactgttcacaggaagtgaagatctggacaatgtctttgttactagactgggcattagttccttaataagagaggcaatgagtgcatataatagtcatgaagagggcagattagtttaccgatatggaggagaacctgttggatcctttgttcagccctgtttgaggcctttaatgccagctattgcacatgccctgtttatggatattacgcatgataatgagtgtcctattgtgcatagatcagcgtatgatgctcttccaagtactacaattgtttctatggcatgttgtgctagtggaagtacaagaggctatgatgaattagtgcctcatcagatttcagtggtttctgaagaacggttttacactaagtggaatcctgaagcattgccttcaaacacaggtgaagttaatttccaaagcggcattattgcakccaggtgtgctatcagtaaacttcatcaggagcttggagccaagggttttattcaggtgtatgtggatcaagttgatgaagacatagtggcagtaacaagacactcacctagcatccatcagtctgttgtggctgtatctagaactgctttcaggaatcccaagacttcattttacagcaaggaagtgcctcaaatgtgcatccctggcaaaattgaagaagtagttcttgaagctagaactattgagagaaacacgaaaccttataggaaggatgagaattcaatcaatggaacaccagatatcacagtagaaattagagaacatattcagcttaatgaaagtaaaattgttaaacaagctggagttgccacaaaagggcccaatgaatatattcaagaaatagaatttgaaaacttgtctccaggaagtgttattatattcagagttagtcttgatccacatgcacaagtcgctgttggaattcttygaaatcatctgacacaattcagtcctcactttaaatctggcagcctagctgttgacaatgcagatcctatattaaaaattccttttgcttctcttgcctccagattaactttggctgagctaaatcagatcctttaccgatgtgaatcagaagaaaaggaagatggtggagggtgctatgacataccaaactggtcagcccttaaatatgcmggtcttcaaggtttaatgtctgtattggcagaaataagaccaaagaatgacttggggcatcctttttgtaataatttgagatstggagattggatgattgactatgtcagtaaccggcttatttcacgatcaggaactattgctgaagttggtaaatggttgcaggctatgttcttctacctgaagcagatcccacgttaccttatcccatgttactttgatgctatattaattggtgcatataccactcttctggatacagcatggaagcagatgtcaagctttgttcagaatggttcaacctttgtgaaacacctttcattgggttcagttcaactgtgtggagtaggaaaattcccttccctgccaattctttcacctgccctaatggatgtaycttataggttaaatgagatcacaaaagaaaaggagcaatgttgtgtttctctagctgcaggcttacctcatttttcttctggtattttccgctgctggggaagggatacttttattgcacttagaggtatactgctgattactrgacgctatgtagaagccaggaatattattttagcatttgcgggtaccctgaggcatggtctcattcctaatctactgggtgaaggaawttatgccagatasaattgtcgggatgctgtgtggtggtggctgcagtgtatccaggattactgtaaaatggttccaaatggtctagacattctcaagtgcccagtttccagaatgtatcctacagatgattctgctcctttgcctgctggcacactggatcagccattgtttgaagtcatacaggaarcaatgcaaaaacacatgcagggcatacagttcygagaaaggaatgctggtccccagatagatcgaaacatgaaggacgaaggttttaatataactgcaggagttgatgaagaaacaggatttgtttatggaggaaatcgtttcaattgtggcacatggatggataaaatgggagaaagtgacagagctagaaacagaggaatcccagccacaccaagagatgggtctgcygtggaaattgtgggcctgagtaaatctgctgttcgctggttgctggaattatccaaaaaaaatattttcccttatcatgaagtcacagtaaaaagacatggaaaggctataaaggtctcatatgatgagtggaacagaaaaatacaagacaactttgaaaagctatttcatgtttccgaagacccttcagatttaaatgaaaagcatccaaatctggttcacaaacgtggcatatacaaagatagttatggagcttcaagtccttggtgtgactatcagctcaggcctaattttaccatagcaatggttgtggcccctgagctctttactacagaaaaagcatggaaagctttggagattgcagaaaaaaaattgcttggtccccttggcatgaaaactttagatccagatgatatggtttactgtggaatttatgacaatgcattagacaatgacaactacaatcttgctaaaggtttcaattatcaccaasgacctgagtggctgtggcctattgggtattttcttcgtgcaaaattatatttttccagattgatgggcccggagactactgcaaagactatagttttggttaaaaatgttctttcccgacattatgttcatcttgagagatccccttggaaaggacttccagaactgaccaatgagaatgcccagtactgtcctttcagctgtgaaacacaagcctggtcaattgctactattcttgagacactttatgatttatagtttattacagatattaagtatgcaattacttgtattataggatgcaaggtcatcatatgtaaatgccttatatgcacaggctcaagttgttttaaaaatctcatttattataatattgatgctcaattaggtaagattgtaaaagcattgattttttttaatgtacagaggtagatttcaatttgaatcagaaagaaatatcattaccaatgaaatgtgtttgagttcagtaagaattattcaaatgcctagaaatccatagtttggaaaakaaaaatcatgtcatcttctatttgtacagaaatgaaaataaaatatgaaaataatgaaagaaatgaaaagatagcttttaattgtggtatatataatcttcagtaacaatacatactgaatacgctgtggttcattaatattaacaccacgtactatagtattcttaatacagtgctcactgcatttaataaatatttaataaatgatgaatgatagaagtttccatctacaatatatgttcctaaatggagcacagatgttcaaactatgctttcattttttcactgatatattaatttttgtgtaatgaatgccaacagtatattttatatgatttacttatgtgaggaaacatgcaaagcattaggaaatttatttcctaaaaacagttttgtaaaattagtattgagttctattgagtattataagatagcttacattttcaaaatggaaattgtyggtcatatttctagaactttaaagaaaaaagaatgttatattagttttctaaaactcaactatctttagtcatgttcaaaaatctattgctagatcatagtagatactggttttctattaactcaaaacctacattgacaagtttaacattgagaagaatcttaacaaaaatatggatatgaattcagtagatatcttaaattcaataaaatcactggaagtttttcatgataacttattttaagatgccttaaaaatcttaaagtcacaaaaggaaaaaggtttttaacatttayatgagttaacattttttcatagaacttatttcctagatagaattttttactgttttttactgttttcttaagaaaacagttaaatcattatgcattcagttggaagaaagtagtggcaagaattctttcattgctatataatattcagtggctcatttatacctaataaaataatggtattttaaaataatgctaytttcaaagtagcatttttttagttagtttacaggttacatacccaaaaccttaactatgactaagaaattamagaagaaaaccagcaaactaaaacttctgggcagcaaaaatatataaatgcttcagatgtcaaatacccatgcttgaaagctcgtgtaatttactttaagattatctgcctgctcttcttcaaagctgaccttgctttagaaatagttttaactagcttagttttctggtttccaaaactaaaatagattaaatcctacaaatttaaggacagttgtgacagtaatctgaccactatctataaayacattggacattggtttccaaatctccctttcttcttcagttccttccttgttcaatatatacccttctctaaactgtgcgggtaaaaggaatgactgtccttgagagaaccattagtttatcaaaggtttatgtagttttgttgctgtaccctaactttgatattcagggaggtaggaaaggtaacagaaaaccagcatatttaatcaaagcaagaagtaatcgctgacagttaaatgtgaccaaaaaaattaaaagttcacaatttttttaatgtagccatttggggttatctctagtaaggcagatacccacgttggtaaatttttaggatattgtgttgcactagaaaactaagtggttcatatttctaatgaggaagattaatgaaagaacattgttatattctgcgtggtatattttaaagtttaagaaggcatgttaaacattatttcctctatggtagttaaaatacagaattagatttttaacaggtgtcatttgactaaacgtttcggtagaatgcttcatacttgagtgatgctggataaggtattgtatttcaacaatggactatgccttggtttttcactaatcaaaatcaaaattactctttaacatgataaatgaatttaccagtttagtatgctgtggtattttaataagttttcaaagataattgggaaaacatgagactggtcatattgatgaatattgtaacatgtgaattgtgatccatttctgatatgtcttgaactactgtgtctagtrggcaaatgtcattgttacctctgtgtgttaagaaaataaaaatattttytaaaggtctgta

SEQ ID NO: 5778 - DNA, 7192 bp, Homo sapiens
tgtataagaatttgcacatcccaagttgctatgtgaataggaatgcgtttccaggggaaggagaaagagacattacagagcagacagctctatgatgtttactatacttgctaaaatgtgaaattcagctaaattggaatacaaagtagtgccaaaacagcattaggtttgcggagttattttaaacataattgaaaaatcaaggttttttaatactttaaataaaacatctgtttttcaatgtggtaatttaagtcctaygatgagtttattaacatgtgctttttatttagggtatgagctacagttccgattaggcccarctttacagggaaaagcagttaccgtgtatacaaattacccatttcctggagaaacatttaatagagaaaaattccgttctctggattgggaaaayccaacagaaagagaagatgattctgataaatactgtaaacttaatctgcaacaatctggttcatttcagtattatttccttcaaggaaatgagaaaagtggtggaggttacatagttgtggaccccattttacgtgttggtgctgataatcatgtgctaccctwggactgtgttactcttcagacatttttagctaagtgtttgggaccttttgatgaatgggaaagcagacttagggttgcaaaagaatcaggctacaacatgattcattttaccccattgcagactcttggactatctaggtcatgctactcccttgccaatcagttagaattaaatcctgacttttcaagacctaatagaaagtatacctggaatgatgttggacagctagtggaaaaattaaaaaaggaatggaatgttatttgtattactgatgttgtctacaatcatactgctgctaatagtaaatggatccrggaacatccagaatgtgcctataatcttgtgaattctccacacttaaaacctgcctgggtcttagacagagcactttggcgtttctcctgtgatgttgcagaagggaaatacaaagaaaagggaatacctgctttgattgaaaatgatcaccatatgaattccatccgaaaaataatttgggaggatatttttccaaagcttaaactytgggaatttttccaagtagatgtcaacaaagcggttgagcaatttagaagacttcttacacaagaaaataggcgagtaaccaagtctgatccaaaccaacaccttacgattattcaagatcctgaatacagacggtttggctgtactgtagatatgaacattgcactaacgactttcataccacatgacaaggggccagcagcaattgaagaatgctgtaattggtttcataaaagaatggaggaattaaattcagagaakcatcractcattaactatcatcaggaacaggcagttaattgccttttgggaaatgtgttttatgaacgactggctggccatggtccaaaactaggacctgtcactagaaagcatcctttagttaccaggtattttactttcccatttgaagagatagacttctccatggaagaatctatgattcatctgccaaataaagcttgttttctgatggcacacaatggatgggtaatgggagatgatcctcttcgaaactttgctgaaccgggttcagaagtttacctaaggagagaacttatttgctggggagacagtgttaaattacgctatgggaataaaccagaggactgtccttatctctgggcacacatgaaaaaatacactgaaataactgcaacttatttccagggagtacgtcttgataactgccactsaacacctcttcacgtagctgagtacatgttggatgctgctaggaatttgcaacccaatttatatgtagtagctgaactgttcacaggaagtgaagatctggacaatgtctttgttactagactgggcattagttccttaataagagaggcaatgagtgcatataatagtcatgaagagggcagattagtttaccgatatggaggagaacctgttggatcctttgttcagccctgtttgaggcctttaatgccagctattgcacatgccctgtttatggatattacgcatgataatgagtgtcctattgtgcatagatcagcgtatgatgctcttccaagtactacaattgtttctatggcatgttgtgctagtggaagtacaagaggctatgatgaattagtgcctcatcagatttcagtggtttctgaagaacggttttacactaagtggaatcctgaagcattgccttcaaacacaggtgaagttaatttccaaagcggcattattgcakccaggtgtgctatcagtaaacttcatcaggagcttggagccaaggttgttctttctgcttctcaggtgtatgtggatcaagttgatgaagacatagtggcagtaacaagacactcacctagcatccatcagtctgttgtggctgtatctagaactgctttcaggaatcccaagacttcattttacagcaaggaagtgcctcaaatgtgcatccctggcaaaattgaagaagtagttcttgaagctagaactattgagagaaacacgaaaccttataggaaggatgagaattcaatcaatggaacaccagatatcacagtagaaattagagaacatattcagcttaatgaaagtaaaattgttaaacaagctggagttgccacaaaagggcccaatgaatatattcaagaaatagaatttgaaaacttgtctccaggaagtgttattatattcagagttagtcttgatccacatgcacaagtcgctgttggaattcttygaaatcatctgacacaattcagtcctcactttaaatctggcagcctagctgttgacaatgcagatcctatattaaaaattccttttgcttctcttgcctccagattaactttggctgagctaaatcagatcctttaccgatgtgaatcagaagaaaaggaagatggtggagggtgctatgacataccaaactggtcagcccttaaatatgcmggtcttcaaggtttaatgtctgtattggcagaaataagaccaaagaatgacttggggcatcctttttgtaataatttgagatstggagattggatgattgactatgtcagtaaccggcttatttcacgatcaggaactattgctgaagttggtaaatggttgcaggctatgttcttctacctgaagcagatcccacgttaccttatcccatgttactttgatgctatattaattggtgcatataccactcttctggatacagcatggaagcagatgtcaagctttgttcagaatggttcaacctttgtgaaacacctttcattgggttcagttcaactgtgtggagtaggaaaattcccttccctgccaattctttcacctgccctaatggatgtaycttataggttaaatgagatcacaaaagaaaaggagcaatgttgtgtttctctagctgcaggcttacctcatttttcttctggtattttccgctgctggggaagggatacttttattgcacttagaggtatactgctgattactrgacgctatgtagaagccaggaatattattttagcatttgcgggtaccctgaggcatggtctcattcctaatctactgggtgaaggaawttatgccagatasaattgtcgggatgctgtgtggtggtggctgcagtgtatccaggattactgtaaaatggttccaaatggtctagacattctcaagtgcccagtttccagaatgtatcctacagatgattctgctcctttgcctgctggcacactggatcagccattgtttgaagtcatacaggaarcaatgcaaaaacacatgcagggcatacagttcygagaaaggaatgctggtccccagatagatcgaaacatgaaggacgaaggttttaatataactgcaggagttgatgaagaaacaggatttgtttatggaggaaatcgtttcaattgtggcacatggatggataaaatgggagaaagtgacagagctagaaacagaggaatcccagccacaccaagagatgggtctgcygtggaaattgtgggcctgagtaaatctgctgttcgctggttgctggaattatccaaaaaaaatattttcccttatcatgaagtcacagtaaaaagacatggaaaggctataaaggtctcatatgatgagtggaacagaaaaatacaagacaactttgaaaagctatttcatgtttccgaagacccttcagatttaaatgaaaagcatccaaatctggttcacaaacgtggcatatacaaagatagttatggagcttcaagtccttggtgtgactatcagctcaggcctaattttaccatagcaatggttgtggcccctgagctctttactacagaaaaagcatggaaagctttggagattgcagaaaaaaaattgcttggtccccttggcatgaaaactttagatccagatgatatggtttactgtggaatttatgacaatgcattagacaatgacaactacaatcttgctaaaggtttcaattatcaccaasgacctgagtggctgtggcctattgggtattttcttcgtgcaaaattatatttttccagattgatgggcccggagactactgcaaagactatagttttggttaaaaatgttctttcccgacattatgttcatcttgagagatccccttggaaaggacttccagaactgaccaatgagaatgcccagtactgtcctttcagctgtgaaacacaagcctggtcaattgctactattcttgagacactttatgatttatagtttattacagatattaagtatgcaattacttgtattataggatgcaaggtcatcatatgtaaatgccttatatgcacaggctcaagttgttttaaaaatctcatttattataatattgatgctcaattaggtaagattgtaaaagcattgattttttttaatgtacagaggtagatttcaatttgaatcagaaagaaatatcattaccaatgaaatgtgtttgagttcagtaagaattattcaaatgcctagaaatccatagtttggaaaakaaaaatcatgtcatcttctatttgtacagaaatgaaaataaaatatgaaaataatgaaagaaatgaaaagatagcttttaattgtggtatatataatcttcagtaacaatacatactgaatacgctgtggttcattaatattaacaccacgtactatagtattcttaatacagtgctcactgcatttaataaatatttaataaatgatgaatgatagaagtttccatctacaatatatgttcctaaatggagcacagatgttcaaactatgctttcattttttcactgatatattaatttttgtgtaatgaatgccaacagtatattttatatgatttacttatgtgaggaaacatgcaaagcattaggaaatttatttcctaaaaacagttttgtaaaattagtattgagttctattgagtattataagatagcttacattttcaaaatggaaattgtyggtcatatttctagaactttaaagaaaaaagaatgttatattagttttctaaaactcaactatctttagtcatgttcaaaaatctattgctagatcatagtagatactggttttctattaactcaaaacctacattgacaagtttaacattgagaagaatcttaacaaaaatatggatatgaattcagtagatatcttaaattcaataaaatcactggaagtttttcatgataacttattttaagatgccttaaaaatcttaaagtcacaaaaggaaaaaggtttttaacatttayatgagttaacattttttcatagaacttatttcctagatagaattttttactgttttttactgttttcttaagaaaacagttaaatcattatgcattcagttggaagaaagtagtggcaagaattctttcattgctatataatattcagtggctcatttatacctaataaaataatggtattttaaaataatgctaytttcaaagtagcatttttttagttagtttacaggttacatacccaaaaccttaactatgactaagaaattamagaagaaaaccagcaaactaaaacttctgggcagcaaaaatatataaatgcttcagatgtcaaatacccatgcttgaaagctcgtgtaatttactttaagattatctgcctgctcttcttcaaagctgaccttgctttagaaatagttttaactagcttagttttctggtttccaaaactaaaatagattaaatcctacaaatttaaggacagttgtgacagtaatctgaccactatctataaayacattggacattggtttccaaatctccctttcttcttcagttccttccttgttcaatatatacccttctctaaactgtgcgggtaaaaggaatgactgtccttgagagaaccattagtttatcaaaggtttatgtagttttgttgctgtaccctaactttgatattcagggaggtaggaaaggtaacagaaaaccagcatatttaatcaaagcaagaagtaatcgctgacagttaaatgtgaccaaaaaaattaaaagttcacaatttttttaatgtagccatttggggttatctctagtaaggcagatacccacgttggtaaatttttaggatattgtgttgcactagaaaactaagtggttcatatttctaatgaggaagattaatgaaagaacattgttatattctgcgtggtatattttaaagtttaagaaggcatgttaaacattatttcctctatggtagttaaaatacagaattagatttttaacaggtgtcatttgactaaacgtttcggtagaatgcttcatacttgagtgatgctggataaggtattgtatttcaacaatggactatgccttggtttttcactaatcaaaatcaaaattactctttaacatgataaatgaatttaccagtttagtatgctgtggtattttaataagttttcaaagataattgggaaaacatgagactggtcatattgatgaatattgtaacatgtgaattgtgatccatttctgatatgtcttgaactactgtgtctagtrggcaaatgtcattgttacctctgtgtgttaagaaaataaaaatattttytaaaggtctgta

SEQ ID NO: 5779 - DNA, 7450 bp, Homo sapiens
ctgtctacggcagctattccagaggcaacaactgcttccctctgttctcatctccccattggtggctggcgacccgaatttgggaatggggagattgcccacctgttatctttgagcagactaatctcttgtaagcagaagtgccattcggagtctccagagccctgtggcttggggctgggaatgtccccctgacttcaggctttcctaagtgtattgcttttctctgagaatggtctaggtttttaattttttaattgtaagaatctgtaatacagcatttttatttcggtcttattcgttgtgctcaaaggcaggaaacaactattaatttgccttctcgaatcttaatagttataagattcattctctttcattgctctgctaggcataaaacacacttcgaacatgggtaactcattcgactgtggagttcttttaattcttatgaaagatttcaaatcctctrgaagccaaaatgggacacagtaaayagattcgaattttacttctgaacgaaatggagaaactggaaaagaccctcttcagacttgaacaagggtatgagctacagttccgattaggcccarctttacagggaaaagcagttaccgtgtatacaaattacccatttcctggagaaacatttaatagagaaaaattccgttctctggattgggaaaayccaacagaaagagaagatgattctgataaatactgtaaacttaatctgcaacaatctggttcatttcagtattatttccttcaaggaaatgagaaaagtggtggaggttacatagttgtggaccccattttacgtgttggtgctgataatcatgtgctaccctwggactgtgttactcttcagacatttttagctaagtgtttgggaccttttgatgaatgggaaagcagacttagggttgcaaaagaatcaggctacaacatgattcattttaccccattgcagactcttggactatctaggtcatgctactcccttgccaatcagttagaattaaatcctgacttttcaagacctaatagaaagtatacctggaatgatgttggacagctagtggaaaaattaaaaaaggaatggaatgttatttgtattactgatgttgtctacaatcatactgctgctaatagtaaatggatccrggaacatccagaatgtgcctataatcttgtgaattctccacacttaaaacctgcctgggtcttagacagagcactttggcgtttctcctgtgatgttgcagaagggaaatacaaagaaaagggaatacctgctttgattgaaaatgatcaccatatgaattccatccgaaaaataatttgggaggatatttttccaaagcttaaactytgggaatttttccaagtagatgtcaacaaagcggttgagcaatttagaagacttcttacacaagaaaataggcgagtaaccaagtctgatccaaaccaacaccttacgattattcaagatcctgaatacagacggtttggctgtactgtagatatgaacattgcactaacgactttcataccacatgacaaggggccagcagcaattgaagaatgctgtaattggtttcataaaagaatggaggaattaaattcagagaakcatcractcattaactatcatcaggaacaggcagttaattgccttttgggaaatgtgttttatgaacgactggctggccatggtccaaaactaggacctgtcactagaaagcatcctttagttaccaggtattttactttcccatttgaagagatagacttctccatggaagaatctatgattcatctgccaaataaagcttgttttctgatggcacacaatggatgggtaatgggagatgatcctcttcgaaactttgctgaaccgggttcagaagtttacctaaggagagaacttatttgctggggagacagtgttaaattacgctatgggaataaaccagaggactgtccttatctctgggcacacatgaaaaaatacactgaaataactgcaacttatttccagggagtacgtcttgataactgccactsaacacctcttcacgtagctgagtacatgttggatgctgctaggaatttgcaacccaatttatatgtagtagctgaactgttcacaggaagtgaagatctggacaatgtctttgttactagactgggcattagttccttaataagagaggcaatgagtgcatataatagtcatgaagagggcagattagtttaccgatatggaggagaacctgttggatcctttgttcagccctgtttgaggcctttaatgccagctattgcacatgccctgtttatggatattacgcatgataatgagtgtcctattgtgcatagatcagcgtatgatgctcttccaagtactacaattgtttctatggcatgttgtgctagtggaagtacaagaggctatgatgaattagtgcctcatcagatttcagtggtttctgaagaacggttttacactaagtggaatcctgaagcattgccttcaaacacaggtgaagttaatttccaaagcggcattattgcakccaggtgtgctatcagtaaacttcatcaggagcttggagccaagggttttattcaggtgtatgtggatcaagttgatgaagacatagtggcagtaacaagacactcacctagcatccatcagtctgttgtggctgtatctagaactgctttcaggaatcccaagacttcattttacagcaaggaagtgcctcaaatgtgcatccctggcaaaattgaagaagtagttcttgaagctagaactattgagagaaacacgaaaccttataggaaggatgagaattcaatcaatggaacaccagatatcacagtagaaattagagaacatattcagcttaatgaaagtaaaattgttaaacaagctggagttgccacaaaagggcccaatgaatatattcaagaaatagaatttgaaaacttgtctccaggaagtgttattatattcagagttagtcttgatccacatgcacaagtcgctgttggaattcttygaaatcatctgacacaattcagtcctcactttaaatctggcagcctagctgttgacaatgcagatcctatattaaaaattccttttgcttctcttgcctccagattaactttggctgagctaaatcagatcctttaccgatgtgaatcagaagaaaaggaagatggtggagggtgctatgacataccaaactggtcagcccttaaatatgcmggtcttcaaggtttaatgtctgtattggcagaaataagaccaaagaatgacttggggcatcctttttgtaataatttgagatstggagattggatgattgactatgtcagtaaccggcttatttcacgatcaggaactattgctgaagttggtaaatggttgcaggctatgttcttctacctgaagcagatcccacgttaccttatcccatgttactttgatgctatattaattggtgcatataccactcttctggatacagcatggaagcagatgtcaagctttgttcagaatggttcaacctttgtgaaacacctttcattgggttcagttcaactgtgtggagtaggaaaattcccttccctgccaattctttcacctgccctaatggatgtaycttataggttaaatgagatcacaaaagaaaaggagcaatgttgtgtttctctagctgcaggcttacctcatttttcttctggtattttccgctgctggggaagggatacttttattgcacttagaggtatactgctgattactrgacgctatgtagaagccaggaatattattttagcatttgcgggtaccctgaggcatggtctcattcctaatctactgggtgaaggaawttatgccagatasaattgtcgggatgctgtgtggtggtggctgcagtgtatccaggattactgtaaaatggttccaaatggtctagacattctcaagtgcccagtttccagaatgtatcctacagatgattctgctcctttgcctgctggcacactggatcagccattgtttgaagtcatacaggaarcaatgcaaaaacacatgcagggcatacagttcygagaaaggaatgctggtccccagatagatcgaaacatgaaggacgaaggttttaatataactgcaggagttgatgaagaaacaggatttgtttatggaggaaatcgtttcaattgtggcacatggatggataaaatgggagaaagtgacagagctagaaacagaggaatcccagccacaccaagagatgggtctgcygtggaaattgtgggcctgagtaaatctgctgttcgctggttgctggaattatccaaaaaaaatattttcccttatcatgaagtcacagtaaaaagacatggaaaggctataaaggtctcatatgatgagtggaacagaaaaatacaagacaactttgaaaagctatttcatgtttccgaagacccttcagatttaaatgaaaagcatccaaatctggttcacaaacgtggcatatacaaagatagttatggagcttcaagtccttggtgtgactatcagctcaggcctaattttaccatagcaatggttgtggcccctgagctctttactacagaaaaagcatggaaagctttggagattgcagaaaaaaaattgcttggtccccttggcatgaaaactttagatccagatgatatggtttactgtggaatttatgacaatgcattagacaatgacaactacaatcttgctaaaggtttcaattatcaccaasgacctgagtggctgtggcctattgggtattttcttcgtgcaaaattatatttttccagattgatgggcccggagactactgcaaagactatagttttggttaaaaatgttctttcccgacattatgttcatcttgagagatccccttggaaaggacttccagaactgaccaatgagaatgcccagtactgtcctttcagctgtgaaacacaagcctggtcaattgctactattcttgagacactttatgatttatagtttattacagatattaagtatgcaattacttgtattataggatgcaaggtcatcatatgtaaatgccttatatgcacaggctcaagttgttttaaaaatctcatttattataatattgatgctcaattaggtaagattgtaaaagcattgattttttttaatgtacagaggtagatttcaatttgaatcagaaagaaatatcattaccaatgaaatgtgtttgagttcagtaagaattattcaaatgcctagaaatccatagtttggaaaakaaaaatcatgtcatcttctatttgtacagaaatgaaaataaaatatgaaaataatgaaagaaatgaaaagatagcttttaattgtggtatatataatcttcagtaacaatacatactgaatacgctgtggttcattaatattaacaccacgtactatagtattcttaatacagtgctcactgcatttaataaatatttaataaatgatgaatgatagaagtttccatctacaatatatgttcctaaatggagcacagatgttcaaactatgctttcattttttcactgatatattaatttttgtgtaatgaatgccaacagtatattttatatgatttacttatgtgaggaaacatgcaaagcattaggaaatttatttcctaaaaacagttttgtaaaattagtattgagttctattgagtattataagatagcttacattttcaaaatggaaattgtyggtcatatttctagaactttaaagaaaaaagaatgttatattagttttctaaaactcaactatctttagtcatgttcaaaaatctattgctagatcatagtagatactggttttctattaactcaaaacctacattgacaagtttaacattgagaagaatcttaacaaaaatatggatatgaattcagtagatatcttaaattcaataaaatcactggaagtttttcatgataacttattttaagatgccttaaaaatcttaaagtcacaaaaggaaaaaggtttttaacatttayatgagttaacattttttcatagaacttatttcctagatagaattttttactgttttttactgttttcttaagaaaacagttaaatcattatgcattcagttggaagaaagtagtggcaagaattctttcattgctatataatattcagtggctcatttatacctaataaaataatggtattttaaaataatgctaytttcaaagtagcatttttttagttagtttacaggttacatacccaaaaccttaactatgactaagaaattamagaagaaaaccagcaaactaaaacttctgggcagcaaaaatatataaatgcttcagatgtcaaatacccatgcttgaaagctcgtgtaatttactttaagattatctgcctgctcttcttcaaagctgaccttgctttagaaatagttttaactagcttagttttctggtttccaaaactaaaatagattaaatcctacaaatttaaggacagttgtgacagtaatctgaccactatctataaayacattggacattggtttccaaatctccctttcttcttcagttccttccttgttcaatatatacccttctctaaactgtgcgggtaaaaggaatgactgtccttgagagaaccattagtttatcaaaggtttatgtagttttgttgctgtaccctaactttgatattcagggaggtaggaaaggtaacagaaaaccagcatatttaatcaaagcaagaagtaatcgctgacagttaaatgtgaccaaaaaaattaaaagttcacaatttttttaatgtagccatttggggttatctctagtaaggcagatacccacgttggtaaatttttaggatattgtgttgcactagaaaactaagtggttcatatttctaatgaggaagattaatgaaagaacattgttatattctgcgtggtatattttaaagtttaagaaggcatgttaaacattatttcctctatggtagttaaaatacagaattagatttttaacaggtgtcatttgactaaacgtttcggtagaatgcttcatacttgagtgatgctggataaggtattgtatttcaacaatggactatgccttggtttttcactaatcaaaatcaaaattactctttaacatgataaatgaatttaccagtttagtatgctgtggtattttaataagttttcaaagataattgggaaaacatgagactggtcatattgatgaatattgtaacatgtgaattgtgatccatttctgatatgtcttgaactactgtgtctagtrggcaaatgtcattgttacctctgtgtgttaagaaaataaaaatattttytaaaggtctgta

SEQ ID NO: 5780 - DNA, 3071 bp, Homo sapiens
agcgtcctgcgcgggtagcccctgggagcacgcggcaccgagtcacgtgagaggggagcgcaggcgaaggggcgtcgcgcgcaagcacgcacgacatacgcaaactcgcactgaggcgcccacagagcgcctgcctggacgagctgagctgcgagttcctgctggctggggccggaggggccggggcgggggccgcgcccggaccgcatctccccccacgggggtcggtgcctggggatcctgtccgcatccactgcaacatcacggagtcataccctgctgtgccccccatctggtcggtggagtctgatgaccctaacttggctgctgtcttggagaggctggtggacataaagaaagggaatactctgctattgcagcatctgaagaggatcatctccgacctgtgtaaactctataacctccctcagcatccagatgtggagatgctggatcaacccttgccagcagagcagtgcacacaggaagacgtgtcttcagaagatgaagatgaggagatgcctgaggacacagaagacttagatcactatgaaatgaaagaggaagagccagctgagggcaagaaatctgaagatgatggcattggaaaagaaaacttggccatcctagagaaaattaaaaagaaccagaggcaagattacttaaatggtgcagtgtctggctcggtgcaggccactgaccggctgatgaaggagctcagggatatataccgatcacagagtttcaaaggcggaaactatgcagtcgaactcgtgaatgacagtctgtatgattggaatgtcaaactcctcaaagttgaccaggacagcgctttgcacaacgatctccagatcctcaaagagaaagaaggagccgacttcattctacttaacttttcctttaaagataactttccctttgacccaccatttgtcagggttgtgtctccagtcctctctggagggtatgttctgggcggaggggccatctgcatggaacttctcaccaaacagggctggagcagtgcctactccatagagtcagtgatcatgcagatcagtgccacaytggtgaaggggaaagcacgagtgcagtttggagccaacaaatctcaatacagtctgacaagagcacagcagtcctacaagtccttggtgcagatccacgaaaaaaacggctggtacacacccccaaaagaagacggctaaccctggagtatcacccttcctccctccccaggcaccactggaccaattacctttgaatgctgtatttggatctcacgctgcctctgtggttccctccctcatttttcctggacgtgatagctctgcctattgcaggacaatgatggctattctaaacgctaaggaaaaaaaacaaacacagaactgtttcaagtactcaagactgacttacagaccaaccaaccaccttgctggaacccttgctagcaggcattcttataaaagaaactttcgagcctccttatattgctggaaactcagctgtgctccagactagagcctccttayctatgctatggatttttaatttattttctcttatttcatgtacactgctttttttggttacagtgtatgatggatgtgtatgaaaaaaatgtatctttgggaaaacaattacagtttgttaatttgaagatgctggtcttgactcatctttatttttattcgcacatcccaccccatcccctgaactacttgggaggtggggaggggtacgagtccactgttgctttggtagagatgagaggccgcattttgctgctaaagcaagagaaacttggagctgaagcacacacctggtctgcccctagatttctcctcaaggcctctggagcaaccagcacctgcccccttggaatgcagagcctggcctgccaaactacaatgtggtaggctgaaacgatggtgttaattcttaggactacttttctagtcacagatgttttcaaatttctaagaaaaagaaaatgaggctcaagaggctgcttcgtagaattccttttgaatgaattgagtggggatggggacacagtctccaagtgtgtatgtggtcttttctgatctcagctgtgtggctgcaactcttcgctgttcattggttcctctcctggaaagtggcttctaaccagcactggatggtgatcattggtaagctttgctcacctccctctctcttgcttcatttggctttatcaaaaagaacagacctagctctgaatttgtttggcttgggaaattatggattctttcaagccactcccacaaggtgggtcctactagaaagggttagcattttaaggggggttgttctatacacctgtgtccttaccccaggctcaggaactgccagggagggaagatgaggtggggagtctgtactgagatggaactgtcagtgctgtgttgtatgtacttgctgttgtaaaagtttgggcatgactttgcatctagcgggtgctgcctgcatctctttgtctgtaagcttgctctgggactcagcctcttaggacctacgatgccagcagctctcattaacagtgaaatgacagaggccaaagatggccaagtgaagacccaagtctcagaaaacccagacttgggacaactgcctgggaactaggatgctagagcagttctgtaatgctttgagacacagcaattttcacattggccattctttcccctcccctaccccttttcttttgagggacttttaatgtttgctgctttaggtggatggagagtccaccagtcccactcaatgctgctctaactctacccacacccacctaattaggggtgctaataaaacatgctgaggttgagataaagacgggacataaggggaaaattcattccatagagctgaaatctggttttcaaggcctctgtggctttcttctgaacttaccaccagccctggctggaatgtagattgtgtttttagtaatgtgtactgtgagctgtcttctgtataatgtattttgtaatgtatttttctcatctaccaaaggatgaaacaaataaaattatttaaatagt

SEQ ID NO: 5781 - DNA, 2544 bp, Homo sapiens
gacacagaagacttagatcactatgaaatgaaagaggaagagccagctgagggcaagaaatctgaagatgatggcattggaaaagaaaacttggccatcctagagaaaattaaaaagaaccagaggcaagattacttaaatggtgcagtgtctggctcggtgcaggccactgaccggctgatgaaggagctcagggatatataccgatcacagagtttcaaaggcggaaactatgcagtcgaactcgtgaatgacagtctgtatgattggaatgtcaaactcctcaaagttgaccaggacagcgctttgcacaacgatctccagatcctcaaagagaaagaaggagccgacttcattctacttaacttttcctttaaagataactttccctttgacccaccatttgtcagggttgtgtctccagtcctctctggagggtatgttctgggcggaggggccatctgcatggaacttctcaccaaacagggctggagcagtgcctactccatagagtcagtgatcatgcagatcagtgccacaytggtgaaggggaaagcacgagtgcagtttggagccaacaaatctcaatacagtctgacaagagcacagcagtcctacaagtccttggtgcagatccacgaaaaaaacggctggtacacacccccaaaagaagacggctaaccctggagtatcacccttcctccctccccaggcaccactggaccaattacctttgaatgctgtatttggatctcacgctgcctctgtggttccctccctcatttttcctggacgtgatagctctgcctattgcaggacaatgatggctattctaaacgctaaggaaaaaaaacaaacacagaactgtttcaagtactcaagactgacttacagaccaaccaaccaccttgctggaacccttgctagcaggcattcttataaaagaaactttcgagcctccttatattgctggaaactcagctgtgctccagactagagcctccttayctatgctatggatttttaatttattttctcttatttcatgtacactgctttttttggttacagtgtatgatggatgtgtatgaaaaaaatgtatctttgggaaaacaattacagtttgttaatttgaagatgctggtcttgactcatctttatttttattcgcacatcccaccccatcccctgaactacttgggaggtggggaggggtacgagtccactgttgctttggtagagatgagaggccgcattttgctgctaaagcaagagaaacttggagctgaagcacacacctggtctgcccctagatttctcctcaaggcctctggagcaaccagcacctgcccccttggaatgcagagcctggcctgccaaactacaatgtggtaggctgaaacgatggtgttaattcttaggactacttttctagtcacagatgttttcaaatttctaagaaaaagaaaatgaggctcaagaggctgcttcgtagaattccttttgaatgaattgagtggggatggggacacagtctccaagtgtgtatgtggtcttttctgatctcagctgtgtggctgcaactcttcgctgttcattggttcctctcctggaaagtggcttctaaccagcactggatggtgatcattggtaagctttgctcacctccctctctcttgcttcatttggctttatcaaaaagaacagacctagctctgaatttgtttggcttgggaaattatggattctttcaagccactcccacaaggtgggtcctactagaaagggttagcattttaaggggggttgttctatacacctgtgtccttaccccaggctcaggaactgccagggagggaagatgaggtggggagtctgtactgagatggaactgtcagtgctgtgttgtatgtacttgctgttgtaaaagtttgggcatgactttgcatctagcgggtgctgcctgcatctctttgtctgtaagcttgctctgggactcagcctcttaggacctacgatgccagcagctctcattaacagtgaaatgacagaggccaaagatggccaagtgaagacccaagtctcagaaaacccagacttgggacaactgcctgggaactaggatgctagagcagttctgtaatgctttgagacacagcaattttcacattggccattctttcccctcccctaccccttttcttttgagggacttttaatgtttgctgctttaggtggatggagagtccaccagtcccactcaatgctgctctaactctacccacacccacctaattaggggtgctaataaaacatgctgaggttgagataaagacgggacataaggggaaaattcattccatagagctgaaatctggttttcaaggcctctgtggctttcttctgaacttaccaccagccctggctggaatgtagattgtgtttttagtaatgtgtactgtgagctgtcttctgtataatgtattttgtaatgtatttttctcatctaccaaaggatgaaacaaataaaattatttaaatagt

SEQ ID NO: 5782 - DNA, 1007 bp, Homo sapiens
cgcacaagaccgcgtcgggcctcacttttcccaggccttctgggtaatgtagtttccgggatcggcacccggcctgtgccagcttgcagagctcaccaggtgcagacccctgcggccagggcgaggacggatctgagcagctgggcagcaggtgccrccgcctgygggacccagagggcttgaggacatctgcaatgctccagaagcccaagagcgtgaagctgcgggccctgcgcagcccgaggaagttcggcgtggctggccggagctgccaggaggtgctgcgcaagggctgtctccgcttccagctccctgagcgcggttcccggctgtgcctgtacgaggatggcacggagctgacggaagattacttccccagtgttcccgacaacgccgagctggtgctgctcaccttgggccaggcctggcagggctatgtgagcgacatcaggcgcttcctcagtgcatttcacgagccacaggtggggctcatccaggccgcccagcagctgctgtgtgatgagcaggccccacagaggcagaggctgctggctgacctcctgcacaacgtcagccagaacatcgcggccgagacccgggctgaggacccgccgtggtttgaaggcttggagtcccgatttcagagcaagtctggctatctgagatacagctgtgagagccggatccggagttacctgagggaggtgagctcctacccctccacrgtgggtgcggaggctcaggaggaattcctgcgggtcctcggctccatgtgccagargctccggtccatgcagtacaatggcagctacttcgacagaggagccaagggcggcagccgcctctgcacaccggaaggctggttctcctgccagggtccctttgacatggacagctgcttatcaagacactccatcaacccctacagtaacagggagagcaggatcctcttcagcacctggaacctggatcacatagatggagtcttgctctgtggcccaggctaa

SEQ ID NO: 5783 - DNA, 2228 bp, Homo sapiens
cgcacaagaccgcgtcgggcctcacttttcccaggccttctgggtaatgtagtttccgggatcggcacccggcctgtgccagcttgcagagctcaccaggtgcagacccctgcggccagggcgaggacggatctgagcagctgggcagcaggtgccrccgcctgygggacccagagggcttgaggacatctgcaatgctccagaagcccaagagcgtgaagctgcgggccctgcgcagcccgaggaagttcggcgtggctggccggagctgccaggaggtgctgcgcaagggctgtctccgcttccagctccctgagcgcggttcccggctgtgcctgtacgaggatggcacggagctgacggaagattacttccccagtgttcccgacaacgccgagctggtgctgctcaccttgggccaggcctggcagggctatgtgagcgacatcaggcgcttcctcagtgcatttcacgagccacaggtggggctcatccaggccgcccagcagctgctgtgtgatgagcaggccccacagaggcagaggctgctggctgacctcctgcacaacgtcagccagaacatcgcggccgagacccgggctgaggacccgccgtggtttgaaggcttggagtcccgatttcagagcaagtctggctatctgagatacagctgtgagagccggatccggagttacctgagggaggtgagctcctacccctccacrgtgggtgcggaggctcaggaggaattcctgcgggtcctcggctccatgtgccagargctccggtccatgcagtacaatggcagctacttcgacagaggagccaagggcggcagccgcctctgcacaccggaaggctggttctcctgccagggtccctttgacatggacagctgcttatcaagacactccatcaacccctacagtaacagggagagcaggatcctcttcagcacctggaacctggatcacataatagaaaagaaacgcaccatcattcctacactggtggaagcaattaaggaacaagatggaagagaagtggactgggagtatttttatggcctgctttttacctcagagaacctaaaactagtgcacattgtctgccataagaaaaccacccacaagctcaactgtgacccragcagaatctacaaaccccagacaaggttgaagcggaagcagcctgtgcggaaacgccagtgacacgtacacaccacgtcctggtctttgtttgaggcctgacgtgggcatcattttaacaggtgccttttttgtttttttgtttttcgtttttttggtcactccagtagctcctggaaaaaaccttaaaaaatgtttcctccaaatctgatttcattacatttctgaattgttggggttttttttgttgttttgttttgttttgtagatggatgcagtgatgcaatcttggctcactgcaacctccgcctctcaggttcaagtggttctcctkcctcagcctcccaagtagctgggattacaggcacctaccaccagggccagctaatttttgtatgtttagtagaaacggggtttcaccatgttggccaggctgttctcgaactcctgacctcaggtgatctgcccgcctcggtctcccaaagtgctgggattacaggcatgagccactgcacctgacctgctgaattgtttataatggcaagaaataggaaaccccccaatgtctgttgaacagctatcacgttgaaccacgtgaaactgctgttttctaggccaaaaatggtgagcgatcatttatttcatgattcaacctgatacatttacatagtgcaaaactgtgtcacagtttcaggcttttatgaggaaagcgtttctgtgtagaaactggaagctgttcagggcatcggcagctgaaccctgctccgttggtcagcgttactatcatctcggatcatatggagctcatgtcagccgtgtgggtggcgggtgcacagagacggtctggaaggaaacacrcggatctgaacagcagtaatcctgggggatacgggggttgggctagattacagaggrctcattttctacgtcatgtattttatgatacttgaattttttgaaatgggcatttattttataacatgttaaaatgtactttttaaattaagtcattttgtaatatttgaatttttacatttgttgtacaatcaggaaaagcaataaagatttttcaaaaataga

SEQ ID NO: 5784 - DNA, 655 bp, Homo sapiens
cgcacaagaccgcgtcgggcctcacttttcccaggccttctgggtaatgtagtttccgggatcggcacccggcctgtgccagcttgcagagctcaccaggtgcagacccctgcggccagggcgaggacggatctgagcagctgggcagcaggtgccrccgcctgygggacccagagggcttgaggacatctgcaatgctccagaagcccaagagcgtgaagctgcgggccctgcgcagcccgaggaagttcggcgtggctggccggagctgccaggaggtgctgcgcaagggctgtctccgcttccagctccctgagcgcggttcccggctgtgcctgtacgaggatggcacggagctgacggaagattacttccccagtgttcccgacaacgccgagctggtgctgctcaccttgggccaggcctggcagggctgtgagtggcaaggactttggagatgtgagcgacatcaggcgcttcctcagtgcatttcacgagccacaggtggggctcatccaggccgcccagcagctgctgtgtgatgagcaggccccacagaggcagaggctgctggctgacctcctgcacaacgtcagccagaacatcgcggccgagacccgggctgaggacccgccgtggtttgaaggtgcgtggg

SEQ ID NO: 5785 - DNA, 506 bp, Homo sapiens
cgcacaagaccgcgtcgggcctcacttttcccaggccttctgggtaatgtagtttccgggatcggcacccggcctgtgccagcttgcagagctcaccaggtgcagacccctgcggccagggcgaggacggatctgagcagctgggcagcaggtgccrccgcctgygggacccagagggcttgaggacatctgcaatgctccagaagcccaagagcgtgaagctgcgggccctgcgcagcccgaggaagttcggcgtggctggccggagctgccaggaggtgctgcgcaagggctgtctccgcttccagctccctgagcgcggttcccggctgtgcctgtacgaggatggcacggagctgacggaagattacttccccagtgttcccgacaacgccgagctggtgctgctcaccttgggccaggcctggcagggctggtttygccatgtttcccaggatagtctcacactcctgggctcaagctgtcctcctgccttggtctcctaa

SEQ ID NO: 5786 - DNA, 542 bp, Homo sapiens
cgcacaagaccgcgtcgggcctcacttttcccaggccttctgggtaatgtagtttccgggatcggcacccggcctgtgccagcttgcagagctcaccaggtgcagacccctgcggccagggcgaggacggatctgagcagctgggcagcaggtgccrccgcctgygggacccagagggcttgaggacatctgcaatgctccagaagcccaagagcgtgaagctgcgggccctgcgcagcccgaggaagttcggcgtggctggccggagctgccaggaggtgctgcgcaagggctgtctccgcttccagctccctgagcgcggttcccggctgtgcctgtacgaggatggcacggagctgacggaagattacttccccagtgttcccgacaacgccgagctggtgctgctcaccttgggccaggcctggcagggctctgttggtgtcagggcaaggacaaagacccgggacacctcaagtctgagtcctggtgattgccaggccctggggaatgggggaagatgtggtcagaggctcttcttg

SEQ ID NO: 5787 - DNA, 2901 bp, Homo sapiens
cgcacaagaccgcgtcgggcctcacttttcccaggccttctgggtaatgtagtttccgggatcggcacccggcctgtgccagcttgcagagctcaccaggtgcagacccctgcggccagggcgaggacggatctgagcagctgggcagcaggtgccrccgcctgygggacccagagggcttgaggacatctgcaatgctccagaagcccaagagcgtgaagctgcgggccctgcgcagcccgaggaagttcggcgtggctggccggagctgccaggaggtgctgcgcaagggctgtctccgcttccagctccctgagcgcggttcccggctgtgcctgtacgaggatggcacggagctgacggaagattacttccccagtgttcccgacaacgccgagctggtgctgctcaccttgggccaggcctggcagggctatgtgagcgacatcaggcgcttcctcagtgcatttcacgagccacaggtggggctcatccaggccgcccagcagctgctgtgtgatgagcaggccccacagaggcagaggctgctggctgacctcctgcacaacgtcagccagaacatcgcggccgagacccgggctgaggacccgccgtggtttgaaggcttggagtcccgatttcagagcaagtctggctatctgagatacagctgtgagagccggatccggagttacctgagggaggtgagctcctacccctccacrgtgggtgcggaggctcaggaggaattcctgcgggtcctcggctccatgtgccagargctccggtccatgcagtacaatggcagctacttcgacagaggagccaagggcggcagccgcctctgcacaccggaaggctggttctcctgccagggtccctttgacatggacagctgcttatcaagacactccatcaacccctacagtaacagggagagcaggatcctcttcagcacctggaacctggatcacataatagaaaagaaacgcaccatcattcctacactggtggaagcaattaaggaacaagatggaagagaagtggactgggagtatttttatggcctgctttttacctcagagaacctaaaactagtgcacattgtctgccataagaaaaccacccacaagctcaactgtgacccragcagaatctacaaaccccagacaaggttgaagcggaagcagcctgtgcggaaacgccagtgacacgtacacaccacgtcctggtctttgtttgaggcctgacgtgggcatcattttaacaggtgccttttttgtttttttgtttttcgtttttttggtcactccagtagctcctggaaaaaaccttaaaaaatgtttcctccaaatctgatttcattacatttctgaattgttggggttttttttgttgttttgttttgttttgtagatggagtttcacttttgttgcccaggctggagtgtagtggcgcgatctcggctcagcctcccgagtagctgggattacaggcatgtgccaccacgcccggctaatgtttgtatttttagtagagacggggtttcaccatgttggtcaggctggtctcaaactcctgacctcaggtgatccgcccacctcagcctcccaaagtgctgggatgacaggtgtgagccactgcgcccagcctgaatcatttcttataccttctgacagcccaacttccagaggacagctctggggtactcgttggatgtctgtgagtacctggtcatacgggtcagtagggataagaattgtctctgggctgaggaattcttctgttctctggtttcaccagcgttgggtttgctcatgtaatgtggtcaccatactcaaatggtgtcatggctgaagttggccaccttgcttgagggacaagttgtttatgtatcagctctctgctgggtctccctttccatggcaaatgggcagctccatcctcttgactcttctaaatgcccaaaagaggtgtcatgctttgggggtacgatgtttatactccgtaaagaacatacaaggacattcactgctgatttttttttttgtttgtttgagacagggtctcactctgtcgctcaggctggagtgcagtgatgcaatcttggctcactgcaacctccgcctctcaggttcaagtggttctcctkcctcagcctcccaagtagctgggattacaggcacctaccaccagggccagctaatttttgtatgtttagtagaaacggggtttcaccatgttggccaggctgttctcgaactcctgacctcaggtgatctgcccgcctcggtctcccaaagtgctgggattacaggcatgagccactgcacctgacctgctgaattgtttataatggcaagaaataggaaaccccccaatgtctgttgaacagctatcacgttgaaccacgtgaaactgctgttttctaggccaaaaatggtgagcgatcatttatttcatgattcaacctgatacatttacatagtgcaaaactgtgtcacagtttcaggcttttatgaggaaagcgtttctgtgtagaaactggaagctgttcagggcatcggcagctgaaccctgctccgttggtcagcgttactatcatctcggatcatatggagctcatgtcagccgtgtgggtggcgggtgcacagagacggtctggaaggaaacacrcggatctgaacagcagtaatcctgggggatacgggggttgggctagattacagaggrctcattttctacgtcatgtattttatgatacttgaattttttgaaatgggcatttattttataacatgttaaaatgtactttttaaattaagtcattttgtaatatttgaatttttacatttgttgtacaatcaggaaaagcaataaagatttttcaaaaatagaca

SEQ ID NO: 5788 - DNA, 2058 bp, Homo sapiens
ggcgaggcagccacccatgatgagctctgcagccttcccaaggtggctgccccgcatccaggtgcccygtgtgcccggcctgggcggctggccgtggatctgaccgctcctgcatggtggaggaccagcgttcccactgtctgcagctgtgccacctccctgtgccgggctgtgcgtgctcacgctcggctccgtctgcctttgtgcgatcagactgagagaccccccaggcagcatgggggtccctcgtaccccttcacggacagtgctcttcgagcgggagaggacgggcctgacctaccgcgtgccctcgctgctccccgtgccccccgggcccaccctgctggcctttgtggagcagcggctcagccctgacgactcccacgcccaccgcctggtgctgaggaggggcacgctggccgggggctccgtgcggtggggtgccctgcacgtgctggggacagcagccctggcggagcaccggtccatgaacccctgccctgtgcacgatgctggcacgggcaccgtcttcctcttcttcatcgcggtgctgggccacacgcctgaggccgtgcagatcgccacgggaaggaacgccgcgcgcctctgctgtgtggccagccgtgacgccggcctctcgtggggcagcgcccgggacctcaccgaggaggccatcggtggtgccgtgcaggactgggccacattcgctgtgggtcccggccacggygtgcagctgccctcaggccgcctgctggtacccgcctacacctaccgcgtggaccgccgagagtgttttggcaagatctgccggaccagccctcactccttcgccttctacagcgatgaccacggccgcacctggcgctgtggaggcctcgtgcccaacctgcgctcaggcgagtgccagctggcggcggtggacggtgggcaggccggcagcttcctctactgcaatgcccggagcccactgggcagccgtgtgcaggcgctcagcactgacgagggcacctccttcctgcccgcagagcgcgtggcttccctgcccgagactgcctggggctgccagggcagcatcgtgggcttcccagcccccgcccccaacaggccacgggatgacagttggtcagtgggccccgggagtcccctccagcctccactcctcggtcctggagtccacgaacccccagaggaggctgctgtagacccccgtggaggccaggtgcctggtgggcccttcagccgtctgcagcctcggggggatggccccaggcagcctggccccaggcctggggtcagtggggatgtggggtcctggaccctggcactccccatgccctttgctgccccgccccagagccccacgtggctgctgtactcccacccagtggggcgcagggctcggctacacatgggtatccgcctgagccagtccccgctggacccgcgcagctggacagagccctgggtgatctacgagggccccagcggctactcygacctggcgtccatcgggccggcycctgaggggggcctggtttttgcctgcctgtacgagagcggggccaggacctcctatgatgagatttccttttgtacattctccctgcrtgaggtcctggagaacgtgcccgccagccccaarccgcccaaccttggggacaagcctcgggggtgctgctggccctcctgacaggccttctggccgtgcccatgccccttgggtgcctggggcagaggggtggaatacgttggggtgccccacratagctgtggggggggctcttagtgcargatcctgtggattagaaacaagttgctcctcagagctctcaagcagggactgctctttaggaaggggagcagcggctgggagtgagcagggcagggtgggggcagggtgggggcacgaagtgggccctgggtgacccccacagctcccttccgaggctgcagggccaggcgcgggaccgcaggtagcccagggtgttgtgggtggcagcacttgtttactggctgctttctggctcgaaataaaggaatcgtgcttgtgtcggggta

SEQ ID NO: 5789 - DNA, 2310 bp, Homo sapiens
agcccagcgaggcctgtgctgygaggggctgtgctgtgccaggggaggccccgcacccgggaagcccagaggagagtgtgcactcacggagccctcctggcagggccgcgtctctggagcagcagacccgtgtccctctgggaggtcaactgcggcctcacagctgggcctgtcccagcacagcccttgttggagggcgcacccccgtstcctcagcaccccagtgttgagtgcmttgacctgcagasgggagcctgtgctggtcccgggcgtctgtgtggctcctgggtgcccatctgcacccctggccctgctctgggcttcagtggagccgtgccaccgtgggagtgtccagggtcctgacgtagccctgagacgtggccagctccctggcctgctgcccgcacagtgggcccttgtctctgctctgggtcaggcgaggcagccacccatgatgagctctgcagccttcccaaggtggctgagcatgggggtccctcgtaccccttcacggacagtgctcttcgagcgggagaggacgggcctgacctaccgcgtgccctcgctgctccccgtgccccccgggcccaccctgctggcctttgtggagcagcggctcagccctgacgactcccacgcccaccgcctggtgctgaggaggggcacgctggccgggggctccgtgcggtggggtgccctgcacgtgctggggacagcagccctggcggagcaccggtccatgaacccctgccctgtgcacgatgctggcacgggcaccgtcttcctcttcttcatcgcggtgctgggccacacgcctgaggccgtgcagatcgccacgggaaggaacgccgcgcgcctctgctgtgtggccagccgtgacgccggcctctcgtggggcagcgcccgggacctcaccgaggaggccatcggtggtgccgtgcaggactgggccacattcgctgtgggtcccggccacggygtgcagctgccctcaggccgcctgctggtacccgcctacacctaccgcgtggaccgccgagagtgttttggcaagatctgccggaccagccctcactccttcgccttctacagcgatgaccacggccgcacctggcgctgtggaggcctcgtgcccaacctgcgctcaggcgagtgccagctggcggcggtggacggtgggcaggccggcagcttcctctactgcaatgcccggagcccactgggcagccgtgtgcaggcgctcagcactgacgagggcacctccttcctgcccgcagagcgcgtggcttccctgcccgagactgcctggggctgccagggcagcatcgtgggcttcccagcccccgcccccaacaggccacgggatgacagttggtcagtgggccccgggagtcccctccagcctccactcctcggtcctggagtccacgaacccccagaggaggctgctgtagacccccgtggaggccaggtgcctggtgggcccttcagccgtctgcagcctcggggggatggccccaggcagcctggccccaggcctggggtcagtggggatgtggggtcctggaccctggcactccccatgccctttgctgccccgccccagagccccacgtggctgctgtactcccacccagtggggcgcagggctcggctacacatgggtatccgcctgagccagtccccgctggacccgcgcagctggacagagccctgggtgatctacgagggccccagcggctactcygacctggcgtccatcgggccggcycctgaggggggcctggtttttgcctgcctgtacgagagcggggccaggacctcctatgatgagatttccttttgtacattctccctgcrtgaggtcctggagaacgtgcccgccagccccaarccgcccaaccttggggacaagcctcgggggtgctgctggccctcctgacaggccttctggccgtgcccatgccccttgggtgcctggggcagaggggtggaatacgttggggtgccccacratagctgtggggggggctcttagtgcargatcctgtggattagaaacaagttgctcctcagagctctcaagcagggactgctctttaggaaggggagcagcggctgggagtgagcagggcagggtgggggcagggtgggggcacgaagtgggccctgggtgacccccacagctcccttccgaggctgcagggccaggcgcgggaccgcaggtagcccagggtgttgtgggtggcagcacttgtttactggctgctttctggctcgaaataaaggaatcgtgcttgtgtcggggta

SEQ ID NO: 5790 - DNA, 1901 bp, Homo sapiens
atggccgccgggccccactcggctttggagcttctgattcctgtgggcgcttctcaggtcagggccctgcagcagagcatgggggtccctcgtaccccttcacggacagtgctcttcgagcgggagaggacgggcctgacctaccgcgtgccctcgctgctccccgtgccccccgggcccaccctgctggcctttgtggagcagcggctcagccctgacgactcccacgcccaccgcctggtgctgaggaggggcacgctggccgggggctccgtgcggtggggtgccctgcacgtgctggggacagcagccctggcggagcaccggtccatgaacccctgccctgtgcacgatgctggcacgggcaccgtcttcctcttcttcatcgcggtgctgggccacacgcctgaggccgtgcagatcgccacgggaaggaacgccgcgcgcctctgctgtgtggccagccgtgacgccggcctctcgtggggcagcgcccgggacctcaccgaggaggccatcggtggtgccgtgcaggactgggccacattcgctgtgggtcccggccacggygtgcagctgccctcaggccgcctgctggtacccgcctacacctaccgcgtggaccgccgagagtgttttggcaagatctgccggaccagccctcactccttcgccttctacagcgatgaccacggccgcacctggcgctgtggaggcctcgtgcccaacctgcgctcaggcgagtgccagctggcggcggtggacggtgggcaggccggcagcttcctctactgcaatgcccggagcccactgggcagccgtgtgcaggcgctcagcactgacgagggcacctccttcctgcccgcagagcgcgtggcttccctgcccgagactgcctggggctgccagggcagcatcgtgggcttcccagcccccgcccccaacaggccacgggatgacagttggtcagtgggccccgggagtcccctccagcctccactcctcggtcctggagtccacgaacccccagaggaggctgctgtagacccccgtggaggccaggtgcctggtgggcccttcagccgtctgcagcctcggggggatggccccaggcagcctggccccaggcctggggtcagtggggatgtggggtcctggaccctggcactccccatgccctttgctgccccgccccagagccccacgtggctgctgtactcccacccagtggggcgcagggctcggctacacatgggtatccgcctgagccagtccccgctggacccgcgcagctggacagagccctgggtgatctacgagggccccagcggctactcygacctggcgtccatcgggccggcycctgaggggggcctggtttttgcctgcctgtacgagagcggggccaggacctcctatgatgagatttccttttgtacattctccctgcrtgaggtcctggagaacgtgcccgccagccccaarccgcccaaccttggggacaagcctcgggggtgctgctggccctcctgacaggccttctggccgtgcccatgccccttgggtgcctggggcagaggggtggaatacgttggggtgccccacratagctgtggggggggctcttagtgcargatcctgtggattagaaacaagttgctcctcagagctctcaagcagggactgctctttaggaaggggagcagcggctgggagtgagcagggcagggtgggggcagggtgggggcacgaagtgggccctgggtgacccccacagctcccttccgaggctgcagggccaggcgcgggaccgcaggtagcccagggtgttgtgggtggcagcacttgtttactggctgctttctggctcgaaataaaggaatcgtgcttgtgtcggggta

SEQ ID NO: 5791 - DNA, 1906 bp, Homo sapiens
atgattattacttgtgtattcatttgctcactgctccattctggatgttcttggtctcagggcctaaggatcattttctcggatgcatcacggctcatcttccggctcagttcctccagtggtgtgcgggccaccctcagactgtacgcagagagctacgagagggatcccagcggccatgaccaggagccacaggcagtgctgagccctctcatagccatcgcactgaaaatatcccagattcatgagagaactggccggaggggacccactgtcatcacctgaatagaggaaagatcactcaccagggccaaagagagtgctcagcgggagatgcttcactgatgccttcttgctacctgtttgtgcctcttatgactttggaaaaacaaaagatattttgcttttgggggatagagggtgggtgggaaaagaattgtctgttaaagctgcactataatttggtatctacattttatcacacaaaggaacctccccttttgacaacaactgggytaggcagctgttaatcacaacatttgtgcatcacttgtgccaagtgagaaaatgttctaaaatcacaagagagaacagtgccagaatgaaactgaccctaagtcccaggtgcccctgggcaggcagaaggagacactcccagcatggaggagggtttatcttttcatcctaggtcaggtctacaatgggggaaggttttattatagaactcccaacagcccacctcactcctgccacccacccgatggccctgcctcccccatcccatccccaacatccctgtaccaccttctctcacatcttctaaagctttgtacaaatcacaatggtgcacttccaacaaaatatatcaataggtgttttcctctcttattttgtaaatagtattattttagctattaagctggataccttctttcaaattcagccattcagttgtaaagttgggaagaagtttcttgacaagactctgcaattaaatgcttaaaatttggaggggatccttccttgattacatsaagtatgttggtacatgggtttatacaagttcctcttgagaaggcaaaaagaccaccatgtgtgagagctctttgacttggccaataggggcctatcttaatgcacttgtttggacacatttctgatcttatttgtaaaggctgcaaaaggagaggatgaaatgctgtaaaagtaggaaatgaagtggaagctggaagaaaatgtaattggtggtacagctatgggccagatggtggaggggagggtggggacccctgccggcaagcagagtgtcacagctggctttcctcacttgggaaaagggtactgccrgtctagcagcctcctctgtactcagccaggacacccagcgcgtgggacctgtttgtgtctgttttgcttccttgggaacggcacagtcactcaccctgccatttgcggaaatgacctggtgcactttgactgttaagcaatgcgttattgctgtagtcaaggttagtgcaagcaaggaaacattcccagtaaggtatttgtttccattttctgtctgtgcttctgtcagaaacttgctaggactttagtggccaataaaaaagaaattcctaatttcaaccttatccaaggattgtgrgtttttacttatttgtttgtctcaccagttgagaaactccagtactggtcacctatcctgataaatctgcctttcagaaaacctgcaagggctgtttttcactattatggcaagagacatgtattaaatggaacagaaaaggtaagttactcaaaactgcctttgggagtcagcagaaactgaaatggcatctagacctccactgtaactgtcttcatttcaaaataataggaaggtggctttgagctgagattctaaaac

SEQ ID NO: 5792 - DNA, 1862 bp, Homo sapiens
tgtttataaagtacctgctgtgtgccgggcacagcctgggttcttggtatagagctgtcaatgggacagaaaaggagcttgctgtcagggcgctcacgttccggtcacggggggagacagacctgcaggaacaaacaggtgcagacagatgagctacgcccaggacctgccccaggtctccgtggtcttcatcttcgtcaatgaggcgctgtcggtcatcctgcgctccgtgcacagcgtggtcaaccacacgccctcccagctcctcaaggaggtcatcctggtggacgacaacagtgacaacgtggaactcaagttcaatctggaccagtacgtcaacaagcggtacccaggcctcgtgaagattgtccgcaacagccggcgggaaggactgatccgcgcgcggctgcagggctggaaggcggccaccgccccagtcgtcggcttctttgatgcccacgtcgagttcaacacgggctgggccgagcccgcactgtcgcggatccgagaggaccggcgtcgcatcgtgctgccakccatcgacaacatcaagtacagcacgtttgaggtgcagcagtatgcgaacgccgcccatggctacaactggggcctctggtgcatgtacatcatccccccgcaggactggctggaccgcggcgacgagtcagcacccatcaggaccccagccatgatcggctgctccttcgtagtggaccgcgagtacttcggagacattgggctgctggaccccggcatggaggtgtatggcggcgagaacgtagaactgggcatgagggtgtggcagtgtggcggcagcatggaggtgctgccctgctcccgcgtggcccacatcgagcgcaccaggaagccctacaacaacgacattgactactaygccaagcgcaacgccctgcgcrccgccgaggtgtggatggatgacttcaagtcccacgtgtacatggcctggaacatccccatgtcgaacccaggggtggacttcggggacgtgtctgagaggctggccctgcgtcagaggctgaagtgtcgcagcttcaagtggtacctggagaacgtgtacccggagatgagggtctacaacaacaccctcacgtacggagaggtgagaaacagcaaagccagtgcctactgtctggaccagggagcrgaggacggcgaycgggcratcctctacccctgccacgggatgtcctcccagctggtgcggtacagcgctgacggcctgctgcagctggggcctctgggctccacagccttcttgcagtggccccattgtgagccgggccacgggccgctgcctggaggtggagatgtccaaagatgccaacttygggctccggctggtggtacagaggtgctcggggcagaagtggatgatcagaaactggatcaaacacgcacggcactgaccccacctccgcccggacccccacagacctcgggaaggcgctgggccgagccagtgtggctgagtgaccggggtgtgcccrgcagacacagcaggacagggctctatgtgcggccaggacagcagaggctgaggggccggggtgtggctgagtgaccagggtgtcacccactgcatctggagtacagcttctcctaggacaggcggctctacccgagggagggcgtctggggacagtgatgccaactcaaacacgtgccttctccacggtatctcctggccaggctgctgggacagccgccgcctctgcatgtaccacagccccccacgccccatagggaggccaagccccggaccatgcaccaggctgcaccctggtgtcttccacccgcaggcctcccatgctccaagcagcctcccccagcacttgcggccg

SEQ ID NO: 5793 - DNA, 1757 bp, Homo sapiens
tccatttaatggcgcggacgccggcggcggcgggctcctggccgggccagcgcagcggaagagccaagccagcatgtcggggacccgagcctccaacgaccggccccccggcgcaggcggcgtcaagcgggggcggctgcagcaggaggcggcggcgaccggctcccgcgtgacggtggtgctgggcgcgcagtggggggacgagggcaaaggcaaggtggtggacctgctggccacggacgccgacatcatcagccgctgccaggggggcaacaacgccggccacacggtggtggtggatgggaaagagtacgacttccacctgctgcccagcggcatcatcaacaccaaggccgtgtccttcattggcaacggggtggtcatccacttgccaggcttgtttgaggaagcagagaagaatgaaaagaaaggcctgaaggactgggagaagaggctcatcatctctgacagagcccaccttgtgtttgattttcaccaggctgtcgacggacttcaggaagtgcagcgccaggcacaagaggggaagaatataggcaccaccaagaagggaatcggaccaacctactcttccaaagctgcccggacaggcctccgcatctgcgacctcctgtcagattttgatgagttttcytccagattcaagaacctggcccaccagcaccagtcgatgttccccaccctggaaatagacattgaaggccaactcaaaaggctcaagggctttgctgagcggatcagacccatggtccgagatggtgtttactttatgtatgaggcactccacggcccccccaagaagatcctggtggagggtgccaacgccgccctcctcgacattgacttcgggacctacccctttgtgacttcatccaactgcaccgtgggcggtgtgtgcacgggcctgggcatccccccgcagaacataggtgacgtgtatggcgtggtgaaagcctataccacacgtgtgggcatcggggccttccccaccgagcagatcaacgagattggaggcctgctgcagacccgcggccacgagtggggagtgaccacaggcaggaagaggcgctgcggctggctcgacctgatgattctaagatatgctcacatggtcaacggattcactgcgctggccctgacgaagctggacatcctggacgtactgggtgaggttaaagtcggtgtctcatacaagctgaaygggaaaaggattccctatttcccagctaaccaggagatgcttcagaaggtcgaagttgagtatgaaacgctgcctgggtggaaagcagacaccacaggcgccaggaggtgggaggacctgcccccacaggcccagaactacatccgctttgtggagaatcacgtgggagtcgcagtcaaatgggttggtgttggcaagtcaagagagtcgatgatccagctgttttagtcrcagactgagctgatcccaacaggccctggcagygtctggacttgtgtaaacagcagcagtcacgttcctcggccgccacaaccaacaccaaagcaggaaaaccattttctgtacttttatatttctgttcaacctgttggtttctacaatgattttaaacattggaaagccagccttgtgtatatttttaaaaattatattcaaaatgagccaaagtgctcagagaccttctatgacacattagtgtcacatggttgcgtgtccagccgaagcagtgtaataaacatctccaatggccactgaatgg

SEQ ID NO: 5794 - DNA, 3160 bp, Homo sapiens
tgggaccaggtgtgtaccaccatacctggctacatttttaaaatygttttatagagacagggtctcccatgatgcccaggctggtcttgaactcctgagctcaaacaattctcctgccttggcctcccaaagtgctggggctacaggcatgagcacctgcgtcgggctccattctgcttttttctcattctgttcagccatttcccctgcagtcttcggggcaagttggttgggacaggcttgcttctggccctgacttctaagatgtggccctgtgggggtctcctggattcctcactctgggtaggctgggaagcttgaggccaaacctgctagcggggcaagggctgtcggccaacagcgttgacttggtgctactcagcccccaggtcaggctcttccctcgctcttgatgctcttcagcgtttttttgtttttgtttttgagacagagtctcactcttgtcaccmaggctggagtgcagtggcacaatcttggctcactgaaacctccgcctcctggttcaagcgattctcctgcctcagcctcccaagtagctgggattacaggcgcccaccatcacgcccagctaatttttgtatttttagtagagacagggttttgccatgttggccaggctggtctgtgactcctgacctcaagtgatctgcccgcctcggcctcccaaagtgctgggattacaggtgtgagccactgtgcccggcctcttcagcggtttctttggtgttttttggcccagcgtttgtggtgttttcactgggcactgggtcacgtggcctagcccattgctgctgggtggaggccccttctcctggatctgccccaatcaggccttgcccgcttcactggtgcccctcccaccatggctgccactgtcctcccacagccaacccagccatcagttctcattgcccctctcgcccattgcctccggcacaagcctggcctgtgatgctgcccccacaccgcctcctccccgccctccaccttcagcccctggtggggctcctcaccacctgaccccggaacggctggggcagccttgactgcttctgccgacttactctctgggyggcagtgccatctggatcggtggttcctcttcatccaggttttctgtgttctgctctgatcccactccaactgcagtcacctgtgtgcygcccgcctgtggtcctgggagcccgaggccagcccggctgccgcatcctgctcttcgcactccaggtctcagayaggagtcactcgcctcttcgtgccacgcccacgtctaagccgggtggaacaggccctgtgaggatggycctggtgtccctcgtgctcgtgggctcggtccagctctccagggccccagtcagccctggctcctgctctcctgcagctggggcgacttccgacgaggcactcttgtcccacttcctggggattcctgcccactctgagcaagatgcccagtccccaccgccagaccctccaacaccaccaccacctcccacaccccagccctctacgcgtctgcagccacaccccgacatggtgctcgggtcacaggccttgaggtgctcctgtgtcacccagtgcaggctgcccaggctttgctgaggttctgcagaccttcagcacctgcaaggggatgctgggtgagatcctgtctgcattcgagttcatggatgctgtgtgcatgcagctggtcgggcgccatctccacctggccagcccrgtgcaagagagtccgttttacrtcctcatcgagacttcaggctccaacgcaggccatgacgctgagaagctgggccacttcctggagcacgygctgggctccggcctggtgaccgaygggaccatggccaccgaccagaggaaagtcaagatgctgtgggccctgagggaaaggatcacagaggcgctgagccgggatggctacgtgtacaagtacgacctctccctccctgtggagcggctctacgacatcgtgactgacctgcgcgcccgcctcggcccgcacgccaagcacgtggtgggctatggccaccttggagatggtaacctgcacctcaatgtgacggcggaggccttcagcccctcgctcctggctgccctggagccccacgtgtacgagtggacggccgggcagcagggcagcgtcagcgcggagcacggagtgggcttcaggaagagggacgtcctgggctacagcaagccaccgggggccctgcagctcatgcagcagctcaaggccctgctggaccccaagggcatcctcaacccctacaagacgctgcccagccaggcctgacggccactcctgctgctgccaaggcccactgggggtcggcgggtggctctcgggcgggggtgttgcggtggctctgagggatgagccggcagtgggcaggggaccaggcacctggttgaagggactgggagcccgcactggggaactgccggacgcaggccctcgggcaggagcatctggcagagtggggggcgtggcaggcaccctcctttgcagggcgaggtggggcctctgcagccatcctggacaggccggggtggcggcagctttgcccacgtggaagcggggtgggtctcacttgcgtggtggcccctggccccatcttgcctgctgcggcctggggagcaggcgctgggtggtggttctgcctgcttgctgctcgttccccgggcatgcgtgggcagcggggggcatgcgtgggcagcagggggcgtgggcagcgggggcacgggcaggaccacgtgggccgtgatcgtgggttgccgagaggacctgagcgctgcggctctgctgaatggagccgggtccctcaggccgtggacgccctcgggaggggggtgactgtggcttgtgtctggacaggaatgtgtcatttcccacatcttctagagggctgccagctgggaagacagttatcagggcaagctgtgctctgagtttcgggttctgctcctacaaagaacgtgcggtgctgcgggcgagggccccggcacggacaagggccactgcagagtgtgtttctgctcgtcagctgccctgggcagcggatgggctgggygatgcagctggatgcacatctcrttctgtcatgaatgtccagtaaaaatctgaattggttgcaac

SEQ ID NO: 5795 - DNA, 2291 bp, Homo sapiens
cgtcgccccgcccactccggctcggcggctctgggcctgcggcgggcgctgcgggggggcgagctcggaggaacggggcgcgcagccagcggctccctgcccttcccctccgggccctgagtaccggccccccaccaaggaggagcccgaggtctccgtcccggcggcgatgctgccccgtcggcctctggcgtggcccgcgtggctgttgsggggtgctccgggagccgcgggttcttggggtcggccggttggccccctggcccgcagaggctgctgctccgccccggggacccccgaggtgccgctgacccgggagcgctaccccgtgcggcgcttgccgttctccacggtgtctaagcaggacctggccgcctttgagcgcatcgtgcccggcggggtcgtcacggacccggaagcgctgcaggctcccaacgtggactggttgcggacgctgcgaggctgtagcaaggtgctgctgaggccacggacgtcggaggaggtgtcccacatcctcaggcactgccacgagaggaacctggccgtgaacccacaggggggcaacacaggcatggtgggtggcagcgtccccgtctttgacgagatcatcctctccactgcccgcatgaaccgggtcctcagcttccacagcgtgtctggaattctggtttgccaggcgggctgcgtcctggaggagctgagccggtatgtggaggaacgggacttcatcatgccgctggacttaggagccaagggcagctgccacatcgggggaaacgtggcaaccaacgctggaggcctgcggtttcttcgatatggctcactgcatgggactgtcctgggcctggaagtggtgctggccgacggcactgtcctggactgcctgacctccctgaggaaggacaacacgggctatgacctgaagcagctgttcatcgggtcggagggcactttggggatcatcaccacggtgtccatcttgtgtccacccaagcccagggctgtgaacgtggctttcctcgatgctgtgggccctgagggaaaggatcacagaggcgctgagccgggatggctacgtgtacaagtacgacctctccctccctgtggagcggctctacgacatcgtgactgacctgcgcgcccgcctcggcccgcacgccaagcacgtggtgggctatggccaccttggagatggtaacctgcacctcaatgtgacggcggaggccttcagcccctcgctcctggctgccctggagccccacgtgtacgagtggacggccgggcagcagggcagcgtcagcgcggagcacggagtgggcttcaggaagagggacgtcctgggctacagcaagccaccgggggccctgcagctcatgcagcagctcaaggccctgctggaccccaagggcatcctcaacccctacaagacgctgcccagccaggcctgacggccactcctgctgctgccaaggcccactgggggtcggcgggtggctctcgggcgggggtgttgcggtggctctgagggatgagccggcagtgggcaggggaccaggcacctggttgaagggactgggagcccgcactggggaactgccggacgcaggccctcgggcaggagcatctggcagagtggggggcgtggcaggcaccctcctttgcagggcgaggtggggcctctgcagccatcctggacaggccggggtggcggcagctttgcccacgtggaagcggggtgggtctcacttgcgtggtggcccctggccccatcttgcctgctgcggcctggggagcaggcgctgggtggtggttctgcctgcttgctgctcgttccccgggcatgcgtgggcagcggggggcatgcgtgggcagcagggggcgtgggcagcgggggcacgggcaggaccacgtgggccgtgatcgtgggttgccgagaggacctgagcgctgcggctctgctgaatggagccgggtccctcaggccgtggacgccctcgggaggggggtgactgtggcttgtgtctggacaggaatgtgtcatttcccacatcttctagagggctgccagctgggaagacagttatcagggcaagctgtgctctgagtttcgggttctgctcctacaaagaacgtgcggtgctgcgggcgagggccccggcacggacaagggccactgcagagtgtgtttctgctcgtcagctgccctgggcagcggatgggctgggygatgcagctggatgcacatctcrttctgtcatgaatgtccagtaaaaatctgaattggttgcaac

SEQ ID NO: 5796 - DNA, 1055 bp, Homo sapiens
cgtgccccagggagtttgagcctttgctgaagccacacgtggctgtgaagaaggtcccgtatgtggatgaggaggggaatctggtaaagycgctaaaaccgaacgggataaagatggagaagtttgtgtttgatgtgttccggtttgctaagttagtagtagaactcatttattttccccttcttccttctctcagttttggtggtgggaactgaggcgcagctggtagggaagtagaggcttgagggagccaagggccccgcgggcaagtctcagggagaagaccagagggtgctcttggccctgagggtaagcagcccctgaggtggrggcatagggagtccttggggctgtggacttgggaggacagtagtgccacctcccggaccttccactgcccccacccatggttaggagaggtctcctggccaggttgccagggcggctcgcagggcctttggccctcactgcaggggtcccagggttgggccttcggctgctggaaatggctgctgggattgggccatccctggcgtctcaggagcaaaaacactcagtacctgcgggggctcctccctagacttgctgcccatgggaccagaccttcactctgtcactggaaacctggcccagctctcacctgcccggatcagggcctctgtgccgggacgtgggtgactagccctttccccaccaggaactttgctgccttggaagtgctgcgggaggaggaattttccccactgaagaacgcagagccagccgacagggacagtccccgcaccgctcgccaggccctgctcacccagcactaccggtgggctctgcgggccggggcccgcttcctggatgcccatggggcctggctcccagagctgcccagcttgcccccaaatggagaccctccggccatctgtgagatatcgcccttggtgtcttactctggagaggtgagagctgcccatccctatctggggcttttctggtgtcaggtttggaataccatctggggagaggtggctgctcgggtggagacggcacagctctacctcggt

SEQ ID NO: 5797 - DNA, 3429 bp, Homo sapiens
gcgacatggcttcggagcaggacgtgcgcgcccggctgcagcgcgctggccaggagcacctcctgcgcttctgggccgagctggcgccggagccacgagccgcgctgctggcggagctggcgctgctggagcccgaggcgctgcgcgagcactgccggcgggcggcggaggcctgcgcgcgcccccacggcccgccgcccgacttggccgcgcgcctgcggcccctgcccccagagcgcktgggcagggccagccgcagcgaccccgagacacggcggcgctgggaggaggaaggtttccgtcagatttctctgaacaaggtggccgtcctgctgctggctggggggcagggcactcgcctgggcgtgacctaccccaagggtatgtaccgtgtggggctgcccagccggaagaccctgtaccagctgcaggcggagcggattcggcgggtggagcagctggccgggccaggcgtactcgcggccggctcaccgcgcctcccttgcaggtacgtcatgaccagcgagttcactctggggcccacggccgagttcttcagggagcacaacttcttccacctggaccccgccaacgtggtcatgtttgagcagcgcctgctgcctgctgtgacctttgatggcaaggttatcctggagcggaaagacaaagttgccatggccccagacggcaacgggggcctctactgcgcgctggaggaccacaagatcctggaggacatggagcgccggggagtggagtttgtgcacgtgtactgtgtggacaacatcctggtgcggctggcggaccctgtcttcatcggcttctgtgtgttgcagggcgcagactgtggcgccaaggtggtggaaaaggcataccccgaggagcccgtgggcgtggtgtgccaggtggacggtgtcccccaggtggtggagtacagcgagatcagtcctgagaccgcacagctacgtgyctccgacgggagcctgctgtacaatgcaggcaacatctgcaaccacttcttcacccgaggcttccttaaggcggtcaccagggagtttgagcctttgctgaagccacacgtggctgtgaagaaggtcccgtatgtggatgaggaggggaatctggtaaagycgctaaaaccgaacgggataaagatggagaagtttgtgtttgatgtgttccggtttgctaagaactttgctgccttggaagtgctgcgggaggaggaattttccccactgaagaacgcagagccagccgacagggacagtccccgcaccgctcgccaggccctgctcacccagcactaccggtgggctctgcgggccggggcccgcttcctggatgcccatggggcctggctcccagagctgcccagtytcctatcgggactgggggtgctgggggagggctctgggcaggtgctgcaaggagatattgacaagtggactttccctagcttgcccccaaatggagaccctccggccatctgtgagatatcgcccttggtgtcttactctggagagggtttagaagtgtacctgcaaggccgggagttccagtccccgctcatcctggatgaagaccaggccagggagccgcagctgcaggagtcctgacccgcccagactgyccccagactcccccgagacctgccagccccggcatcctggaagtcccgactccccccagacctgccagccccggcgtcctggagctgggggctacagcccagcctgagctctgggtgggaaagcagcctgccccatgcttccagcctgcagaacamagaatgaaacatgctggtagactccacgagggcagggcctctcctgtcgcctctggacacaagtggcgacagcctgctgggggctctgtggctccattcctggctgtggggtctagtcaagaggcagagggacttgggacctgggagaatggggctgagaggaggcttcgggttggggcccaagggaggtgtggtgtcatctggggagaacaggagggcatgtccctttgggagcccgccttgtggatccaccacaccccaccgagcactagaagctgcataagctacacaggatgtgcttctgcagcctacagatgcagaaccagaatgagggggacaattccacccactcgagggctgccccctcttccttagcagacgaaccagtaatgggggcaaggctggggcatcccagcccacacaccctggatgcccagcaaggccacagaaagagcctgatgtccatgatccaggtggctctgagaagcttggcctggacacctgagcctgcggccggtactcctgccttctccccatctatccccaaggcctctgcctctcagcctcttccatggtcggtttaggctgctgagttttctgtgcttccccaagaaccagtgggatcaatgccggcggcctctgtgatggttgctgactaatccgggatttcatgagtcagaggcaccacccctcaccccagctgcctgctgcttctgacggatcttggtgctcaggctgcctggctctccgagtgaggacgcagcctccatatttggtgcactcaggcatggctgggacaagccagctgccccagggttcttcccctggtgattctcgcctgctttctcatctcaggggaggcagtggcacctccctctccctgctgacatgaagagagctatgatatgccactgctgccaactcatcctctgcccccacctcgaaacccacagtccccagtggagggccactactcatccccattggtttcccaggggaggggtgttgtctggaagggcaggttcagatgcagccttccagatttagaggcactgggaggacagtggctgagtggaggcgcccagacctgggcaggcagcaggctcaggcccacaccttgtgatttttgaaaccaaagcccagaagatgatgtttacttctctctccctggctctgcccttcttactgcaaaccatgctgtgccttagggcccttctcatagctgttcctcatggccatgactggaacagggatgcaacctctttctacacaagcacagttagttgggtgaagtctttttttttgtttgttttagacggagtttcactcttgttgcccaggctggagtgaagtggcgtgaccttggctcactgcaacctccaggccagcctcagcctccctagtagctgggactacaggcacccactaccacgcctggctaattctttgtatttttagtagagatggggtttgaccgtgttagccaggatggtctcgatctcctgacctcgtgatccacccacctcggcctcccaaagtgctgggattataggtgtgagccaccgcgccgggccggttgctggcatcttaatgttctgtaggtggaatatttccaataaacacaaggtgccgtaattgac

SEQ ID NO: 5798 - DNA, 2609 bp, Homo sapiens
acagcggggcggggcgcggggctgagcaggcgcgagggctggctgctgggccgacgaggggcggtgccaggccgtgggtccttagtcaagtgacgcgaagcggccggcctgggcgccgactgcagagccgggaggctggtggtcatgccggggttcctggttcgcatcctccctctgytgctggttctgctgcttctgggccctacgcgcggcttgcgcaatgccacccagaggatgtttgaaattgactatagccgggactccttcctcaaggatggccagccatttygctacayctcaggaagcattcactactcccrtgtgccccgcttctactggaaggaccggctgctgaagatgaagatggctgggctgaacgccatccagaygyatgtgccctggaactttcatgagccctggccaggacagtaccagttttctgaggaccatgatgtggaatattttcttyggctggctcatgagctgggactgctggttatcctgaggcccgggccctacatctgtgcagagtgggaaatgggaggattacctgcttggctgctagagaaagagtctattcttctcmgctcctccgacccagattacctggcagctgtggacaagtggttgggagtccttctgcccaagatgaagcctctcctctatcagaatggagggccagttataacagtgcaggttgaaaatgaatatggcagctactttgcctgtgattttgactacctgyrcttcctgcagaagcgctttygccaccatctgggggatkatgtggytctgtttaccactgatggagcacataaaacattcctgaaatgtggggccctgcagggcctctacaccacggtggactttggaacaggcagcaacatcacagatgctttcctaagccagaggaagtgtgagcccaaaggayccttgatcarttctgaattckatactggctggctagatcactggggccaacctyactccacaatcaagaccgaagcagtggcttcctccctctatgatatacttgcccgtggggcgagtgtgaacttgtacatgtttataggtgggaccaattttgcctattggaatggggccaactcaccctatgcagcacagcccaccagctacgactatgatgccccactgagtgaggctggggacctcactgagaagtattttgctctgcgaaacatcatccagaagtttgaaaaagtaccagaaggtcctatccctccatctacaccaaagtttgcatatggaaaggtcactttggaaaagttaaagacagtgggagcagctctggacattctgtgtccctctgggcccatcaaaagcctttatcccttgacatttatccmggtgaaacagcattatgggtttgtgctgtaccggacaacacttcctcaagattgcagcaacccagcacctctctcttcacccytcaatggagtccacgatcgagcatatgttgctgtggatgggatcccccagggagtccttgagcgaaacaatgtgatcactctgaacataacagggaaagctggagccactctggaccttctggtagagaacatgggacgtgtgaactatggtgcatatatcaacrattttaagkgtttggtttctaacctgrctctcagttccaatatcctcacggactgkamgatctttccactggacactgaggatgcagtgygcagccacctggggggctggggacaccgtgacagtggccaccatgatgaagcctgggccyacaactcatccaactacacgctcccggccttttatatggggaacttctccattcccagtgggatcccagacttgccccaggacacctttatcyagtttcctggatggaccaagggccaggtctggattaatggctttaaccttggccgctattggccagcccggggccctcagttgaccttgtttgtgccccagcacatcctgatgacctcggccccaaacaccatcaccgtgctggaactggagtgggcaccctgcagcagtgatgatccagractatgtgctgtgacgttcgtggacaggccagttattggctcatctgtgacctacgatcatccctccaaacctgttgaaaaaagactcatgcccccacccccgcaaaaaaacaaagattcatggctggaccatgtatgatgatgaaagcctgtgtctttgagggattctaccctgaacatacctcacagatcctccctgtcatgccacatttcactgattggaatgtggaaatggaaaaggaatttaggatgtgcattttcacctgaggtttccctgcatccctgcagtgccaaagccccaccttcagggaccacctggaatgtgtgaggggctgacagcacagtaacgtgcatacatatctgcagggctggaatggaagctttaaaggtggtagtgatttttattttggaagaatcatgttacctttttgttaaataaaatttgtactcaaatgatgatgtcactgtttttaatgtgcaggtattgaattayatggtctgacttaaatcataactagacttgagtgggctgaataaaccacttcactaacttgaagttcaaaaggatgg

SEQ ID NO: 5799 - DNA, 1644 bp, Homo sapiens
acagcggggcggggcgcggggctgagcaggcgcgagggctggctgctgggccgacgaggggcggtgccaggccgtgggtccttagtcaagtgacgcgaagcggccggcctgggcgccgactgcagagccgggaggctggtggtcatgccggggttcctggttcgcatcctccctctgytgctggttctgctgcttctgggccctacgcgcggcttgcgcaatgccacccagaggatgtttgaaattgactatagccgggactccttcctcaaggatggccagccatttygctacayctcaggaagcattcactactcccrtgtgccccgcttctactggaaggaccggctgctgaagatgaagatggctgggctgaacgccatccagaygyatgtgccctggaactttcatgagccctggccaggacagtaccagttttctgaggaccatgatgtggaatattttcttyggctggctcatgagctgggactgctggttatcctgaggcccgggccctacatctgtgcagagtgggaaatgggaggattacctgcttggctgctagagaaagagtctattcttctcmgctcctccgacccagattacctggcagctgtggacaagtggttgggagtccttctgcccaagatgaagcctctcctctatcagaatggagggccagttataacagtgcaggttgaaaatgaatatggcagctactttgcctgtgattttgactacctgyrcttcctgcagaagcgctttygccaccatctgggggatkatgtggytctgtttaccactgatggagcacataaaacattcctgaaatgtggggccctgcagggcctctacaccacggtggactttggaacaggcagcaacatcacagatgctttcctaagccagaggaagtgtgagcccaaaggayccttgatcarttctgaattckatactggctggctagatcactggggccaacctyactccacaatcaagaccgaagcagtggcttcctccctctatgatatacttgcccgtggggcgagtgtgaacttgtacatgtttataggtgggaccaattttgcctattggaatggggccaactcaccctatgcagcacagcccaccagctacgactatgatgccccactgagtgaggctggggacctcactgagaagtattttgctctgcgaaacatcatccagaagtttgaaaaagtaccagaaggtcctatccctccatctacaccaaagtttgcatatggaaaggtcactttggaaaagttaaagacagtgggagcagctctggacattctgtgtccctctgggcccatcaaaagcctttatcccttgacatttatccmggtgaaacagcattatgggtttgtgctgtaccggacaacacttcctcaagattgcagcaacccagcacctctctcttcacccytcaatggagtccacgatcgagcatatgttgctgtggatgggatcccccagggagtccttgagcgaaacaatgtgatcactctgaacataacagggaaagctggagccactctggaccttctggtagagaacatgggacgtgtgaactatggtgcatatatcaacrattttaaggtaggacaaaccacactgtca

SEQ ID NO: 5800 - DNA, 1251 bp, Homo sapiens
acagcggggcggggcgcggggctgagcaggcgcgagggctggctgctgggccgacgaggggcggtgccaggccgtgggtccttagtcaagtgacgcgaagcggccggcctgggcgccgactgcagagccgggaggctggtggtcatgccggggttcctggttcgcatcctccctctgytgctggttctgctgcttctgggccctacgcgcggcttgcgcaatgccacccagaggatgtttgaaattgactatagccgggactccttcctcaaggatggccagccatttygctacayctcaggaagcattcactactcccrtgtgccccgcttctactggaaggaccggctgctgaagatgaagatggctgggctgaacgccatccagayattacctggcagctgtggacaagtggttgggagtccttctgcccaagatgaagcctctcctctatcagaatggagggccagttataacagtgcaggcagcaacatcacagatgctttcctaagccagaggaagtgtgagcccaaaggayccttgatcarttctgaattckatactggctggctagatcactggggccaacctyactccacaatcaagaccgaagcagtggcttcctccctctatgatatacttgcccgtggggcgagtgtgaacttgtacatgtttataggtgggaccaattttgcctattggaatggggccaactcaccctatgcagcacagcccaccagctacgactatgatgccccactgagtgaggctggggacctcactgagaagtattttgctctgcgaaacatcatccagaagtttgaaaaagtaccagaaggtcctatccctccatctacaccaaagtttgcatatggaaaggtcactttggaaaagttaaagacagtgggagcagctctggacattctgtgtccctctgggcccatcaaaagcctttatcccttgacatttatccmggtgaaacagcattatgggtttgtgctgtaccggacaacacttcctcaagattgcagcaacccagcacctctctcttcacccytcaatggagtccacgatcgagcatatgttgctgtggatgggatcccccagggagtccttgagcgaaacaatgtgatcactctgaacataacagggaaagctggagccactctggaccttctggtagagaacatgggacgtgtgaactatggtgcatatatcaacrattttaaggtaggacaaaccacactgtca

SEQ ID NO: 5801 - DNA, 2621 bp, Homo sapiens
gccttctcagccctcaaagacagaccgacagacagacagacagctggcaagaggcagcctgggggccacagctgcttcagcagacctcatggctgagtgagcctcccctgggcccagcaccccacctcagcatggtccaagcccatggggggcgctccagagcacagccgttgaccttgtctttgggggcagccatgacccagcctccgcctgaaaaaacgccagccaagaagcatgtgcgactgcaggagagaagatcccttcaaactttgtcagccccgaagacctggacatccctggccacgcctccaaggaccgatacaagaccatcttgccaaatccccagagccgtgtctgtctaggccgggcacagagccaggaggacggagattacatcaatgccaactacatccgaggctatgacgggaaggagaaggtctacattgccacccagggccccatgcccaacactgtgtcggacttctgggagatggtgtggcaagaggaagtgtccctcattgtcatgctcactcagctccgagagggcaaggagaaatgtgtccactactggcccacagaagaggaaacctatggacccttccagatccgcatccaggacatgaaagagtgcccagaatacactgtgcggcagctcaccatccagtaccaggaagagcgccggtcagtaaagcacatcctcttttcggcctggccagaccatcagacaccagaatcagctgggcccctgctgcgcctagtggcagaggtggaggagagcccggagacagccgcccaccccgggcctatcrtagtccactgcagtgcagggattggccggacgggctgcttcatcgccacgcgaattggctgtcaacagctgaaagcccgaggagaagtggacattctgggtattgtgtgccaactgcggctagacagaggggggatgatccagacggcagagcagtaccagttcctgcaccacactttggccctgtatgcaggccagctgcctgaggaacccagcccctgacccctgccaccctccggtggcccaggtgcctacctccctcaagcctgggaaggtgggtctggggaaagtgggccgagtgatctgggggtaccccttgggttggtgtggggaaggagtgcctccttagtggtgcttgcagtcacaggaagcagcagcagtaaggacaaggggccggattccaggtcttcaacactggccactcctctgcttcctctgttggccccagatggacagtaaggggaacctccaatgtctctctgaacttaaagacaggagctggcatttatgacagacaaagaaagaagcccaggtgtcctggtgttctctgagacactctttgtgakcttcagtttcctgttctataacatgaacataagtgcttagctgccatgagggaaaagtaatgagagaagtttctagaagccactccagccactccttcctggggctgacaaaagggtgattccaagatcatccttcacccgaggtcctgcccaagcacaggccagatgcaagaatggggaaaagtctggtcctgatctccaagtctcaacatcctatcagtgactctgctccctgaccacacatcggaagggctggatgaccccaatcaaaagaaagaacaaggactctggttacccttgcctccacccatgtgtcataagagtaggctacagaggtgaccaggcctggcagttgaaatctctggaagagggaacatgtggggactaytcagaggcaaagaggagctgctcctgcctccatggttgctggccwctcccaccaactactcttagggaggctaagcagtctctgttttgcttccatggctcaaataataccctgggtatgcaggacccactataccttgcatttgctgagwacacctagagagcttggctgtttccaaaaacaatcagggtcataaccatccatgcagacatggaggctcggctgaaccaggactcctcactgtctacctgagagaatgagcacccctcatccatctcagcatcaacacaatttccaggggacctcaggtctacctcaggactgaacgccacacctcaggattcctcctccttgaatctgagactggctgcccattctgagatggggatgaaggtaagatgccgcatcaccaggcacgccgcccctgacagctgccttgataccagctctctgtggaaacccccgaggagttggatctggagaacagctgggcctcctcactcaggacttctctcctgaagaacacgcagtgctaaaactgaggatgatttccctaatgcttctgcttggccttatggaggagctgctccttccttacagccttggggatggacttgcccacacctccacctcccctgagccctgtgagaggcacgactgtctatgccaatgaggctcggtggggggctctcaagtgcctgatcctgccctgggctcagagccagcccagagggaagcaactgcacagccccacaggccctccytggcactgtccccccaaccccatctcagagctcagagggtacaagctccagaacagtaaccaagtgggaaaataaagacttcttggatgactgac

SEQ ID NO: 5802 - DNA, 3851 bp, Homo sapiens
tggcaagaggcagcctgggggccacagctgcttcagtaagtatctgaaggggggactgggagtcctgtggccccggggggtgcgaactccggggatataagagggcatctctaggagggagtgcgggagggcgagtggggcgccacagtgcctggctggggtatgggtgctcacagacctgatgtccccaagacgggggtgagcagggaagccacagggagctacaaggagagcagaggctgaagggaccttttctgctaccagagaccctcgctctaccactcacacctgtgccaggcccattctgtcccctcacctccgtccctgctgccttggtgattcaacacccccgccacctcgcccactgtgaccctggctctgggagatagggactgcccccaagaggagatggtcccaccacctccatgccycctgtcttgcccccagctgtcgcctcaccatgcgctgtcgttcaagggcttggtgaggccatttcctgtgacggttacagrggcgggagacggggggatgggcaggaggaggaaggaaacacctccagcctacctccctggacagagaccccagaagccagaaayagacctgggagtggaacagcagcagttaggagaggaccctgctggggtccaggagcccgcctgcctggctgcccaaccagctccaacactgctggaggcctccattctctgttcaggggaaggcccactggttagctcagagatggcttctgcgtgctttctcccttccgtcctagagaacacatattttctgtttcctcccttgccttctcccacttggacctgctcagagccctgtgtactctggtgtgtggcctctctcccctctctcttttcctccttctggattctttcctatcttcatccacaatctctaccctttatcttgccgttactctaccccgagactgccttctgccctgggtcccaccaaatagatcctgtccttcccttagtgaaaatgaggccacctcttggggaacagaagacgccccagtgaaaacagagtgcaaacctggcctggcatgggagcctccttctggccaatcaggcaggccagagaacagcagcggagggccctgtctttcaggcagacctcatggctgagtgagcctcccctgggcccagcaccccacctcagcatggtccaagcccatggggggcgctccagagcacagccgttgaccttgtctttgggggcagccatgacccagcctccgcctgaaaaaacgccagccaagaagcatgtgcgactgcaggagaggcggggctccaatgtggctctgatgctggacgttcggtccctgggggccgtagaacccatctgctctgtgaacacaccccgggaggtcaccctacactttctgcgcactgctggacacccccttacccgctgggcccttcagcgccagccacccagccccaagcaactggaagaagaattcttgaagatcccttcaaactttgtcagccccgaagacctggacatccctggccacgcctccaaggaccgatacaagaccatcttgccaaatccccagagccgtgtctgtctaggccgggcacagagccaggaggacggagattacatcaatgccaactacatccgaggctatgacgggaaggagaaggtctacattgccacccagggccccatgcccaacactgtgtcggacttctgggagatggtgtggcaagaggaagtgtccctcattgtcatgctcactcagctccgagagggcaaggagaaatgtgtccactactggcccacagaagaggaaacctatggacccttccagatccgcatccaggacatgaaagagtgcccagaatacactgtgcggcagctcaccatccagtaccaggaagagcgccggtcagtaaagcacatcctcttttcggcctggccagaccatcagacaccagaatcagctgggcccctgctgcgcctagtggcagaggtggaggagagcccggagacagccgcccaccccgggcctatcrtagtccactgcagtgcagggattggccggacgggctgcttcatcgccacgcgaattggctgtcaacagctgaaagcccgaggagaagtggacattctgggtattgtgtgccaactgcggctagacagaggggggatgatccagacggcagagcagtaccagttcctgcaccacactttggccctgtatgcaggccagctgcctgaggaacccagcccctgacccctgccaccctccggtggcccaggtgcctacctccctcaagcctgggaaggtgggtctggggaaagtgggccgagtgatctgggggtaccccttgggttggtgtggggaaggagtgcctccttagtggtgcttgcagtcacaggaagcagcagcagtaaggacaaggggccggattccaggtcttcaacactggccactcctctgcttcctctgttggccccagatggacagtaaggggaacctccaatgtctctctgaacttaaagacaggagctggcatttatgacagacaaagaaagaagcccaggtgtcctggtgttctctgagacactctttgtgakcttcagtttcctgttctataacatgaacataagtgcttagctgccatgagggaaaagtaatgagagaagtttctagaagccactccagccactccttcctggggctgacaaaagggtgattccaagatcatccttcacccgaggtcctgcccaagcacaggccagatgcaagaatggggaaaagtctggtcctgatctccaagtctcaacatcctatcagtgactctgctccctgaccacacatcggaagggctggatgaccccaatcaaaagaaagaacaaggactctggttacccttgcctccacccatgtgtcataagagtaggctacagaggtgaccaggcctggcagttgaaatctctggaagagggaacatgtggggactaytcagaggcaaagaggagctgctcctgcctccatggttgctggccwctcccaccaactactcttagggaggctaagcagtctctgttttgcttccatggctcaaataataccctgggtatgcaggacccactataccttgcatttgctgagwacacctagagagcttggctgtttccaaaaacaatcagggtcataaccatccatgcagacatggaggctcggctgaaccaggactcctcactgtctacctgagagaatgagcacccctcatccatctcagcatcaacacaatttccaggggacctcaggtctacctcaggactgaacgccacacctcaggattcctcctccttgaatctgagactggctgcccattctgagatggggatgaaggtaagatgccgcatcaccaggcacgccgcccctgacagctgccttgataccagctctctgtggaaacccccgaggagttggatctggagaacagctgggcctcctcactcaggacttctctcctgaagaacacgcagtgctaaaactgaggatgatttccctaatgcttctgcttggccttatggaggagctgctccttccttacagccttggggatggacttgcccacacctccacctcccctgagccctgtgagaggcacgactgtctatgccaatgaggctcggtggggggctctcaagtgcctgatcctgccctgggctcagagccagcccagagggaagcaactgcacagccccacaggccctccytggcactgtccccccaaccccatctcagagctcagagggtacaagctccagaacagtaaccaagtgggaaaataaagacttcttggatgactgac

SEQ ID NO: 5803 - DNA, 2805 bp, Homo sapiens
gccttctcagccctcaaagacagaccgacagacagacagacagctggcaagaggcagcctgggggccacagctgcttcagcagacctcatggctgagtgagcctcccctgggcccagcaccccacctcagcatggtccaagcccatggggggcgctccagagcacagccgttgaccttgtctttgggggcagccatgacccagcctccgcctgaaaaaacgccagccaagaagcatgtgcgactgcaggagaggcggggctccaatgtggctctgatgctggacgttcggtccctgggggccgtagaacccatctgctctgtgaacacaccccgggaggtcaccctacactttctgcgcactgctggacacccccttacccgctgggcccttcagcgccagccacccagccccaagcaactggaagaagaattcttgaagatcccttcaaactttgtcagccccgaagacctggacatccctggccacgcctccaaggaccgatacaagaccatcttgccaaatccccagagccgtgtctgtctaggccgggcacagagccaggaggacggagattacatcaatgccaactacatccgaggctatgacgggaaggagaaggtctacattgccacccagggccccatgcccaacactgtgtcggacttctgggagatggtgtggcaagaggaagtgtccctcattgtcatgctcactcagctccgagagggcaaggagaaatgtgtccactactggcccacagaagaggaaacctatggacccttccagatccgcatccaggacatgaaagagtgcccagaatacactgtgcggcagctcaccatccagtaccaggaagagcgccggtcagtaaagcacatcctcttttcggcctggccagaccatcagacaccagaatcagctgggcccctgctgcgcctagtggcagaggtggaggagagcccggagacagccgcccaccccgggcctatcrtagtccactgcagtgcagggattggccggacgggctgcttcatcgccacgcgaattggctgtcaacagctgaaagcccgaggagaagtggacattctgggtattgtgtgccaactgcggctagacagaggggggatgatccagacggcagagcagtaccagttcctgcaccacactttggccctgtatgcaggccagctgcctgaggaacccagcccctgacccctgccaccctccggtggcccaggtgcctacctccctcaagcctgggaaggtgggtctggggaaagtgggccgagtgatctgggggtaccccttgggttggtgtggggaaggagtgcctccttagtggtgcttgcagtcacaggaagcagcagcagtaaggacaaggggccggattccaggtcttcaacactggccactcctctgcttcctctgttggccccagatggacagtaaggggaacctccaatgtctctctgaacttaaagacaggagctggcatttatgacagacaaagaaagaagcccaggtgtcctggtgttctctgagacactctttgtgakcttcagtttcctgttctataacatgaacataagtgcttagctgccatgagggaaaagtaatgagagaagtttctagaagccactccagccactccttcctggggctgacaaaagggtgattccaagatcatccttcacccgaggtcctgcccaagcacaggccagatgcaagaatggggaaaagtctggtcctgatctccaagtctcaacatcctatcagtgactctgctccctgaccacacatcggaagggctggatgaccccaatcaaaagaaagaacaaggactctggttacccttgcctccacccatgtgtcataagagtaggctacagaggtgaccaggcctggcagttgaaatctctggaagagggaacatgtggggactaytcagaggcaaagaggagctgctcctgcctccatggttgctggccwctcccaccaactactcttagggaggctaagcagtctctgttttgcttccatggctcaaataataccctgggtatgcaggacccactataccttgcatttgctgagwacacctagagagcttggctgtttccaaaaacaatcagggtcataaccatccatgcagacatggaggctcggctgaaccaggactcctcactgtctacctgagagaatgagcacccctcatccatctcagcatcaacacaatttccaggggacctcaggtctacctcaggactgaacgccacacctcaggattcctcctccttgaatctgagactggctgcccattctgagatggggatgaaggtaagatgccgcatcaccaggcacgccgcccctgacagctgccttgataccagctctctgtggaaacccccgaggagttggatctggagaacagctgggcctcctcactcaggacttctctcctgaagaacacgcagtgctaaaactgaggatgatttccctaatgcttctgcttggccttatggaggagctgctccttccttacagccttggggatggacttgcccacacctccacctcccctgagccctgtgagaggcacgactgtctatgccaatgaggctcggtggggggctctcaagtgcctgatcctgccctgggctcagagccagcccagagggaagcaactgcacagccccacaggccctccytggcactgtccccccaaccccatctcagagctcagagggtacaagctccagaacagtaaccaagtgggaaaataaagacttcttggatgactgac

SEQ ID NO: 5804 - DNA, 2718 bp, Homo sapiens
gccttctcagccctcaaagacagaccgacagacagacagacagctggcaagaggcagcctgggggccacagctgcttcagcagacctcatggctgagtgagcctcccctgggcccagcaccccacctcagcatggtccaagcccatggggggcgctccagagcacagccgttgaccttgtctttgggggcagccatgacccagcctccgcctgaaaaaacgccagccaagaagcatgtgcgactgcaggagaggcggggctccaatgtggctctgatgctggacgttcggtccctgggggccgtagaacccatctgctctgtgaacacaccccgggaggtcaccctacactttctgcgcactgctggacacccccttacccgctgggcccttcagcgccagccacccagccccaagcaactggaagaagaattcttgaagatcccttcaaactttgtcagccccgaagacctggacatccctggccacgcctccaaggaccgatacaagaccatcttgccaaatccccagagccgtgtctgtctaggccgggcacagagccaggaggacggagattacatcaatgccaactacatccgaggctatgacgggaaggagaaggtctacattgccacccagggccccatgcccaacactgtgtcggacttctgggagatggtgtggcaagaggaagtgtccctcattgtcatgctcactcagctccgagagggcaaggagaaatgtgtccactactggcccacagaagaggaaacctatggacccttccagatccgcatccaggacatgaaagagtgcccagaatacactgtgcggcagctcaccatccagtaccaggaagagcgccggtcagtaaagcacatcctcttttcggcctggccagaccatcagacaccagaatcagctgggcccctgctgcgcctagtggcagaggtggaggagagcccggagacagccgcccaccccgggcctatcrtagtccactgcagtgcagggattggccggacgggctgcttcatcgccacgcgaattggctgtcaacagctgaaagcccgaggagaagtggacattctgggtattgtgtgccaactgcggctagacagaggggggatgatccagacggcagagcagtaccagttcctgcaccacactttggccctgtatgcaggccagctgcctgaggaacccagcccctgacccctgccaccctccggtggcccaggtgcctacctccctcaagcctgggaagtcacaggaagcagcagcagtaaggacaaggggccggattccaggtcttcaacactggccactcctctgcttcctctgttggccccagatggacagtaaggggaacctccaatgtctctctgaacttaaagacaggagctggcatttatgacagacaaagaaagaagcccaggtgtcctggtgttctctgagacactctttgtgakcttcagtttcctgttctataacatgaacataagtgcttagctgccatgagggaaaagtaatgagagaagtttctagaagccactccagccactccttcctggggctgacaaaagggtgattccaagatcatccttcacccgaggtcctgcccaagcacaggccagatgcaagaatggggaaaagtctggtcctgatctccaagtctcaacatcctatcagtgactctgctccctgaccacacatcggaagggctggatgaccccaatcaaaagaaagaacaaggactctggttacccttgcctccacccatgtgtcataagagtaggctacagaggtgaccaggcctggcagttgaaatctctggaagagggaacatgtggggactaytcagaggcaaagaggagctgctcctgcctccatggttgctggccwctcccaccaactactcttagggaggctaagcagtctctgttttgcttccatggctcaaataataccctgggtatgcaggacccactataccttgcatttgctgagwacacctagagagcttggctgtttccaaaaacaatcagggtcataaccatccatgcagacatggaggctcggctgaaccaggactcctcactgtctacctgagagaatgagcacccctcatccatctcagcatcaacacaatttccaggggacctcaggtctacctcaggactgaacgccacacctcaggattcctcctccttgaatctgagactggctgcccattctgagatggggatgaaggtaagatgccgcatcaccaggcacgccgcccctgacagctgccttgataccagctctctgtggaaacccccgaggagttggatctggagaacagctgggcctcctcactcaggacttctctcctgaagaacacgcagtgctaaaactgaggatgatttccctaatgcttctgcttggccttatggaggagctgctccttccttacagccttggggatggacttgcccacacctccacctcccctgagccctgtgagaggcacgactgtctatgccaatgaggctcggtggggggctctcaagtgcctgatcctgccctgggctcagagccagcccagagggaagcaactgcacagccccacaggccctccytggcactgtccccccaaccccatctcagagctcagagggtacaagctccagaacagtaaccaagtgggaaaataaagacttcttggatgactgac

SEQ ID NO: 5805 - DNA, 3764 bp, Homo sapiens
tggcaagaggcagcctgggggccacagctgcttcagtaagtatctgaaggggggactgggagtcctgtggccccggggggtgcgaactccggggatataagagggcatctctaggagggagtgcgggagggcgagtggggcgccacagtgcctggctggggtatgggtgctcacagacctgatgtccccaagacgggggtgagcagggaagccacagggagctacaaggagagcagaggctgaagggaccttttctgctaccagagaccctcgctctaccactcacacctgtgccaggcccattctgtcccctcacctccgtccctgctgccttggtgattcaacacccccgccacctcgcccactgtgaccctggctctgggagatagggactgcccccaagaggagatggtcccaccacctccatgccycctgtcttgcccccagctgtcgcctcaccatgcgctgtcgttcaagggcttggtgaggccatttcctgtgacggttacagrggcgggagacggggggatgggcaggaggaggaaggaaacacctccagcctacctccctggacagagaccccagaagccagaaayagacctgggagtggaacagcagcagttaggagaggaccctgctggggtccaggagcccgcctgcctggctgcccaaccagctccaacactgctggaggcctccattctctgttcaggggaaggcccactggttagctcagagatggcttctgcgtgctttctcccttccgtcctagagaacacatattttctgtttcctcccttgccttctcccacttggacctgctcagagccctgtgtactctggtgtgtggcctctctcccctctctcttttcctccttctggattctttcctatcttcatccacaatctctaccctttatcttgccgttactctaccccgagactgccttctgccctgggtcccaccaaatagatcctgtccttcccttagtgaaaatgaggccacctcttggggaacagaagacgccccagtgaaaacagagtgcaaacctggcctggcatgggagcctccttctggccaatcaggcaggccagagaacagcagcggagggccctgtctttcaggcagacctcatggctgagtgagcctcccctgggcccagcaccccacctcagcatggtccaagcccatggggggcgctccagagcacagccgttgaccttgtctttgggggcagccatgacccagcctccgcctgaaaaaacgccagccaagaagcatgtgcgactgcaggagaggcggggctccaatgtggctctgatgctggacgttcggtccctgggggccgtagaacccatctgctctgtgaacacaccccgggaggtcaccctacactttctgcgcactgctggacacccccttacccgctgggcccttcagcgccagccacccagccccaagcaactggaagaagaattcttgaagatcccttcaaactttgtcagccccgaagacctggacatccctggccacgcctccaaggaccgatacaagaccatcttgccaaatccccagagccgtgtctgtctaggccgggcacagagccaggaggacggagattacatcaatgccaactacatccgaggctatgacgggaaggagaaggtctacattgccacccagggccccatgcccaacactgtgtcggacttctgggagatggtgtggcaagaggaagtgtccctcattgtcatgctcactcagctccgagagggcaaggagaaatgtgtccactactggcccacagaagaggaaacctatggacccttccagatccgcatccaggacatgaaagagtgcccagaatacactgtgcggcagctcaccatccagtaccaggaagagcgccggtcagtaaagcacatcctcttttcggcctggccagaccatcagacaccagaatcagctgggcccctgctgcgcctagtggcagaggtggaggagagcccggagacagccgcccaccccgggcctatcrtagtccactgcagtgcagggattggccggacgggctgcttcatcgccacgcgaattggctgtcaacagctgaaagcccgaggagaagtggacattctgggtattgtgtgccaactgcggctagacagaggggggatgatccagacggcagagcagtaccagttcctgcaccacactttggccctgtatgcaggccagctgcctgaggaacccagcccctgacccctgccaccctccggtggcccaggtgcctacctccctcaagcctgggaagtcacaggaagcagcagcagtaaggacaaggggccggattccaggtcttcaacactggccactcctctgcttcctctgttggccccagatggacagtaaggggaacctccaatgtctctctgaacttaaagacaggagctggcatttatgacagacaaagaaagaagcccaggtgtcctggtgttctctgagacactctttgtgakcttcagtttcctgttctataacatgaacataagtgcttagctgccatgagggaaaagtaatgagagaagtttctagaagccactccagccactccttcctggggctgacaaaagggtgattccaagatcatccttcacccgaggtcctgcccaagcacaggccagatgcaagaatggggaaaagtctggtcctgatctccaagtctcaacatcctatcagtgactctgctccctgaccacacatcggaagggctggatgaccccaatcaaaagaaagaacaaggactctggttacccttgcctccacccatgtgtcataagagtaggctacagaggtgaccaggcctggcagttgaaatctctggaagagggaacatgtggggactaytcagaggcaaagaggagctgctcctgcctccatggttgctggccwctcccaccaactactcttagggaggctaagcagtctctgttttgcttccatggctcaaataataccctgggtatgcaggacccactataccttgcatttgctgagwacacctagagagcttggctgtttccaaaaacaatcagggtcataaccatccatgcagacatggaggctcggctgaaccaggactcctcactgtctacctgagagaatgagcacccctcatccatctcagcatcaacacaatttccaggggacctcaggtctacctcaggactgaacgccacacctcaggattcctcctccttgaatctgagactggctgcccattctgagatggggatgaaggtaagatgccgcatcaccaggcacgccgcccctgacagctgccttgataccagctctctgtggaaacccccgaggagttggatctggagaacagctgggcctcctcactcaggacttctctcctgaagaacacgcagtgctaaaactgaggatgatttccctaatgcttctgcttggccttatggaggagctgctccttccttacagccttggggatggacttgcccacacctccacctcccctgagccctgtgagaggcacgactgtctatgccaatgaggctcggtggggggctctcaagtgcctgatcctgccctgggctcagagccagcccagagggaagcaactgcacagccccacaggccctccytggcactgtccccccaaccccatctcagagctcagagggtacaagctccagaacagtaaccaagtgggaaaataaagacttcttggatgactgac

SEQ ID NO: 5806 - DNA, 822 bp, Homo sapiens
gccttctcagccctcaaagacagaccgacagacagacagacagctggcaagaggcagcctgggggccacagctgcttcagcagacctcatggctgagtgagcctcccctgggcccagcaccccacctcagcatggtccaagcccatggggggcgctccagagcacagccgttgaccttgtctttgggggcagccatgacccagcctccgcctgaaaaaacgccagccaagaagcatgtgcgactgcaggagagaagatcccttcaaactttgtcagccccgaagacctggacatccctggccacgcctccaaggaccgatacaagaccatcttgccaaatccccagagccgtgtctgtctaggccgggcacagagccaggaggacggagattacatcaatgccaactacatccgaggctatgacgggaaggagaaggtctacattgccacccagggccccatgcccaacactgtgtcggacttctgggagatggtgtggcaagaggaagtgtccctcattgtcatgctcactcagctccgagagggcaaggagaaatgtgtccactactggcccacagaagaggaaacctatggacccttccagatccgcatccaggacatgaaagagtgcccagaatacactgtgcggcagctcaccatccagtaccaggaagagcgccggtcagtaaagcacatcctcttttcggcctggccagaccatcagacaccagaatcagctgggcccctgctgcgcctagtggcagaggtggaggagagcccggagacagccgcccaccccgggcctatcrtagtccactgcag

SEQ ID NO: 5807 - DNA, 1750 bp, Homo sapiens
tggggagggggtgtggtcagggcggggcatgcaggccacgcccccggaggagtcacgtagctctgcgacatccgcagcctcatttaccagagggagccagggctgcagcctcatctgtttgcggatcagaacccgagctgtgcttgtggctgcggctgctaactggctgcgcacagaagctgagagaagagggtggcaataagtacttttgcctcattctgaagccttggaaggagctgtcaccatgcctcactcgtacccagccctttctgctgagcagaagaaggagttgtctgacattgccctgcggattgtagccccgggcaaaggcattctggctgcggatgagtctgtaggcagcatggccaagcggctgagccaaattggggtggaaaacacagaggagaaccgccggctgtaccgccaggtcctgttcagtgctgatgaccgtgtgaaaaagtgcattggaggcgtcattttcttccatgagaccctctaccagaaagatgataatggtgttcccttcgtccgaaccatccaggataagggcatcgtcgtgggcatcaaggttgacaagggtgtggtgsctctagctgggactgatggagaaaccaccactcaagggctggatgggctctcagaacgctgtgcccaatacaagaaggatggtgctgactttgccaagtggcgctgtgtgctgaaaatcagtgagcgtacaccctctgcacttgccattctggagaacgccaacgtgctggcccgttatgccagtatctgccagcagaatggcattgtgcctattgtggaacctgaaatattgcctgatggagaccacgacctcaaacgttgtcagtatgttacagagaaggtcttggctgctgtgtacaaggccctgagtgaccatcatgtatacctggaggggaccctgctcaarcccaacatggtgaccccgggccatgcctgtcccatcaagtataccccagaggagattgccatggcaactgtcactgccctgcgtcgcactgtgcccccagctgtcccaggagtgaccttcctgtctgggggtcagagcgaagaagaggcatcattcaacctcaatgccatcaaccgctgcccccttccccgaccctgggcgcttaccttctcctatgggcgtgccctgcaagcctctgcactcaatgcctggcgagggcaacgggacaatgctggggctgccactgaggagttcatcaagcgggctgaggtgaatgggcttgcagcccagggcaagtatgaaggcagtggagaagatggtggagcagcagcacagtcactctacattgccaaccatgcctactgagtatccactccataccacagcccttggcccagccatctgcacccacttttgcttgtagtcatggccagggccaaatagctatgcagagcagagatgccttcacctggcaccaacttgtcttcctttctctcttcccttcccctctctcattgctgcacctgggaccataggatgggaggatagggagcccctcatgactgagggcagaagaaattgctagaagtcagaacaggatggctgggtctccccctacctcttccagctcccacaattttcccatgatgaggtagcttctccctgggctctccttcttgcctgccctgtctcctgggatcagagggtagtacagaagccctgactcatgccttgagtacataccatacagcaaataaatggtagcaaaacattcta

SEQ ID NO: 5808 - DNA, 1694 bp, Homo sapiens
tggggagggggtgtggtcagggcggggcatgcaggccacgcccccggaggagtcacgtagctctgcgacatccgcagcctcatttaccagagggagccagggctgcagcctcatctgtttgcggatcagaacccgagctgtgcttgtggctgcggctgctaactggctgcgcacagggagctgtcaccatgcctcactcgtacccagccctttctgctgagcagaagaaggagttgtctgacattgccctgcggattgtagccccgggcaaaggcattctggctgcggatgagtctgtaggcagcatggccaagcggctgagccaaattggggtggaaaacacagaggagaaccgccggctgtaccgccaggtcctgttcagtgctgatgaccgtgtgaaaaagtgcattggaggcgtcattttcttccatgagaccctctaccagaaagatgataatggtgttcccttcgtccgaaccatccaggataagggcatcgtcgtgggcatcaaggttgacaagggtgtggtgsctctagctgggactgatggagaaaccaccactcaagggctggatgggctctcagaacgctgtgcccaatacaagaaggatggtgctgactttgccaagtggcgctgtgtgctgaaaatcagtgagcgtacaccctctgcacttgccattctggagaacgccaacgtgctggcccgttatgccagtatctgccagcagaatggcattgtgcctattgtggaacctgaaatattgcctgatggagaccacgacctcaaacgttgtcagtatgttacagagaaggtcttggctgctgtgtacaaggccctgagtgaccatcatgtatacctggaggggaccctgctcaarcccaacatggtgaccccgggccatgcctgtcccatcaagtataccccagaggagattgccatggcaactgtcactgccctgcgtcgcactgtgcccccagctgtcccaggagtgaccttcctgtctgggggtcagagcgaagaagaggcatcattcaacctcaatgccatcaaccgctgcccccttccccgaccctgggcgcttaccttctcctatgggcgtgccctgcaagcctctgcactcaatgcctggcgagggcaacgggacaatgctggggctgccactgaggagttcatcaagcgggctgaggtgaatgggcttgcagcccagggcaagtatgaaggcagtggagaagatggtggagcagcagcacagtcactctacattgccaaccatgcctactgagtatccactccataccacagcccttggcccagccatctgcacccacttttgcttgtagtcatggccagggccaaatagctatgcagagcagagatgccttcacctggcaccaacttgtcttcctttctctcttcccttcccctctctcattgctgcacctgggaccataggatgggaggatagggagcccctcatgactgagggcagaagaaattgctagaagtcagaacaggatggctgggtctccccctacctcttccagctcccacaattttcccatgatgaggtagcttctccctgggctctccttcttgcctgccctgtctcctgggatcagagggtagtacagaagccctgactcatgccttgagtacataccatacagcaaataaatggtagcaaaacattcta

SEQ ID NO: 5809 - DNA, 3538 bp, Homo sapiens
atttccggggtaagatggctgcagtccgtatgctgagaacctggagcaggaatgcggggaagctgatttgtgttcgctattttcaaacatgtggtaatgttcatgttttgaagccaaattatgtgtgtttctttggttatccttcattcaagtatagtcatccacatcacttcctgaaaacaactgctgctctccgtggacaggttgttcagttcaagctctcagacattggagaagggattagagaagtaactgttaaagaatggtatgtaaaagaaggagatacagtgtctcagtttgatagcatstgtgaagttcaaagtgataaagcttctgttaccatcactagtcgttatgatggagtcattaaaaaactctattataatctagacgatattgcctatgtggggaagccattagtagacatagaaacggaagctttaaaagattcagaagaagatgttgttgaaactcctgcagtgtctcatgatgaacatacacaccargagataaagggccraaaaacactggcaactcctgcagttcgccgtctggcaatggaaaacaatattaagctgagtgaagttgttggctcaggaaaagatggcagaatacttaaagaagatatcctcaactatttggaaaagcagacaggagctatattgcctccttcacccaaagttkaaattatgccacctccaccaaagccaaaagacatgactgttcctatactagtatcaaaacctccggtattcacaggcaaagacaaaacagaacccataaaaggctttcaaaaagcaatggtcaagactatgtctgcagccctgaagatacctcattktggttattgtgatgagattgaccttactgaactggttaagctccgagaagaattaaaacccattgcatttgctcgtggaattaaactctcctttatgcctttcttcttaaaggctgcttccttgggattactacagtttcctatccttaacgcttctgtggatgaaaactgccagaatataacatataaggcttctcataacattgggatagcaatggatactgagcagggtttgattgtccctaatgtgaaaaatgttcagatctgctctatatttgacatcgccactgaactgaaccgcctccagaaattgggctctgtgrgtcagctcagcaccactgatcttacaggaggaacatttactctttccaacattggatcaattggtggtacctttgccaaaccagtgataatgccacctgaagtagccattggggcccttggatcaattaaggccattccccgatttaaccagaaaggagaagtatataaggcacagataatgaatgtgagctggtcagctgatcacagagttattgatggtgctacaatgtcacgcttctccaatttgtggaaatcctatttagaaaacccagcttttatgctactagatctgaaatkaagactgataagacattcttgaactttttgagcttccaaagagtatgtaaaccctagctgtgccagcacatgttcatctttacaatttatattgtaaaygatttgtatcgtatgattaaggatctaaggcacaatatttgtcactgttctattagactttttactgaaaatgaataatggtgtaatggttctcctggggctgtcacattttataggtcagagtgtgacttcttaatatggtgctgatgtttttgtgtcaatggcttgaaactggcaagattaacaaaattaggccgggcatggtggctcacgcctgtaatcccagcactttgggaggcccaggtgggcggatcacctgaggttagaagtttgagaccagcctggccaacatggtgaaacctggcctctactaaaaatacaaaaattasccgggtgtggtggtgggtacctataatcccagctacttgggaggctgaggcaggagaatcgcttgaacctgggaggtggaggttgcagtgagctgagatcgtgctattgcactccagcctgggcgacagagcaagacgccatctcaaaaacaaaaaaacaaaattcatgttactaaaagacaggtagccatatacagacagtatatgccctattttttttaactgactcttaatgaaactttaattttacttaattaagaaatggaatttatatacaaaaatattttccatttccgttattatgctaattgttgtatgaaataagtgcaattatacttctcttttgagatatccaagagtatattcttgctctgtatagagaatatcatctgatagtgtcttatttatattaattaatgtctttgaaaagggaaaagtataaactggccttaaaattgtccaattatagttttataaccagtctattaaaggtgtttgtttaaaatggatatagttttagatttgtggtaatgctttggtattttcttggggaagaccttcacctttgcaaacttccctcatgtaaggaaggtactttaaatgtagcagccactgacatttctttttttaaaaaaaatttgagaagtctacttccttttaacttttttggtcttcagctaaaaaataggataagaaattaaggtctattccattctccatatcctgggtaagaatgtaaataagaggagaaggaagagtctaatagtaattatggatataaaaaataagaaattttgtatagaaatgaaggtttcataatgatcattttgttaaaggtctactttaatcagaaatagcaacgagatgaatgtatccaacatttcaatttgcattcggaaatccatgttgtttctaatattgtccagttgaaaactgtatgccaaaattagttgtttaagtgaagttttgtgacagaaaaaaggttgttttaatatctacttggtttttctcaaaatggaaataattttaaaatcaggaaagaataaatcagccaggtgtgatgacttgtaactgtaatcccagttataggggaggctgaagcaggaggatcacttgaggccaggagtttgagaccagcctgggcaacatagtgagatcccatctcaaaaaacattatttttaaaattagcctggtggctcacgcctgtaatcccagcactttgggaggccgaggtggccagatcacctgaggtcaggagttcgagaccaccctggccaacatggtgaaaccccatctctacagttttgtaaaaatacaaaaaattacctgggcctggtggcacacgcctgtagtcccagctacttgggaggctgaggcaggagaattgcttgagcccaagaggtggaggttacagtgagcagagatcacaccactgcactccagcctgggtggcagagcaacacttygtctcagaaaaaaaaaaaaaaaccaaaaagccaagtgtggtggtgtgcacctatagtcccagctactcaggaagctgagacaagaggatcaattgagcccaggagttcaaagctgtagtgagctgtcattgtgccactatcctccagtatgggtgacagagtgagacctggtctctaaaaa

SEQ ID NO: 5810 - DNA, 1981 bp, Homo sapiens
ggggccaatggggaggcggagccgcagcgcagctccgagggctggcggctcggggcgccgaggcttccgcgcccgctggttcctcgctccggggcggagctcgcgatagcgaccgggagcagggcgcggggcgggacccaggtccgaggcgaggaagccggaagccaggcgcggggagcctcccccttcgactgcagcctcgctccgtgccttctgcgcgcctgggatcccggagcctgcctaggttctgtgcgctcccgcccaggccggtgcccgccgcccgcctgcgccccaggcaggtcccaggcctccggctgctcccggccgaaggtggggacaggcagtggcaggcaccactagcgagggcgtttgggaacccagggtgaccacggcgcagccatggggaccgcgcttgtgtaccatgaggacatgacggccacccggctgctctgggacgaccccgagtgcgagatcgagcgtcctgagcgcctgaccgcagccctggatcgcctgcggcagcgcggcctggaacagaggtgtctgcggttgtcagcccgcgaggcctcggaagaggagctgggcctggtgcacaggcctcccgggcaccatggccagagggcggctgccaacgggttctgygtgttcaacaacgtggccatagcagctgcacatgccaagcagaaacacgggctacacaggatcctcgtcgtggactgggatgtgcaccatggccaggggatccagtatctctttgagratgaccccagcgtcctttacttctcctggcaccgctatgagcatgggcgcttctggcctttcctgcgagagtcagatgcagacgcagtggggcggggacagggcctcggcttcactgtcaacctgccctggaaccaggttgggatgggaaacgctgactacgtggctgccttcctgcacctgctgctcccactggcctttgaggtgactgcacggagggctcccccagggcagccgggtgggagggggaccttgtgcctggagtgcgccagtgaaggcaggaggagggttatgagctgtcccactcctgtgtggctggggaaggtgctcaggaggggatgggatgggcctggctcgccctcacctgggctccagcccctctctgtcgaccctccccactccggcctkgcctgtagtttgaccctgagctggtgctggtctcggcaggatttgactcagccatcggggaccctgagggrcaaatgcaggccacgccagagtgcttcgcccacctcacacagctgctgcaggtgctggccggcggccgggtctgtgccgtgctggagggcggctaccacctggagtcactggcggagtcagtgtgcatgacagtacagacgctgctgggtgacccggcyccacccctgtcagggccaatggcgccatgtcagagtgccctagagtccatccagagtgcccgtgctgcccaggccccgcactggaagagcctccagcagcaagatgtgaccgctgtgccgatgagccccagcagccactccccagaggggaggcctccacctctgctgcctgggggwccagtgtgtaaggcagctgcatctgcaccgagctccctcctggaccagccgtgcctctgccccgcaccctctgtccgcaccgctgttgccctgacaacgccggatakcacattggttctgccccctgacrtcatccaacaggaagcgtcagccctgagggaggagacagaagcctgggccaggtgaacagtggtatagcagccactccagcctctgctgcagcagccaccctggatgtggctgttcggagaggcctgtcccacggagcccagaggctgctgtgcgtggccctgggacagctggaccggcctccagacctcgcccatgacgggaggagtctgtggctgaacatcaggggcaaggaggcggctgccctatccatgttccatgtctccacgccactgccagtg

SEQ ID NO: 5811 - DNA, 2512 bp, Homo sapiens
ggggccaatggggaggcggagccgcagcgcagctccgagggctggcggctcggggcgccgaggcttccgcgcccgctggttcctcgctccggggcggagctcgcgatagcgaccgggagcagggcgcggggcgggacccaggtccgaggcgaggaagccggaagccaggcgcggggagcctcccccttcgactgcagcctcgctccgtgccttctgcgcgcctgggatcccggagcctgcctaggttctgtgcgctcccgcccaggccggtgcccgccgcccgcctgcgccccaggcaggtcccaggcctccggctgctcccggccgaaggtggggacaggcagtggcaggcaccactagcgagggcgtttgggaacccagggtgaccacggcgcagccatggggaccgcgcttgtgtaccatgaggacatgacggccacccggctgctctgggacgaccccgagtgcgagatcgagcgtcctgagcgcctgaccgcagccctggatcgcctgcggcagcgcggcctggaacagaggtgtctgcggttgtcagcccgcgaggcctcggaagaggagctgggcctggtgcacagtacctttcactgcgcgcggctggccgcaggggctggactgcagctggtggacgctgtgctcactggagctgtgcaaaatgggcttgccctggtgaggcctcccgggcaccatggccagagggcggctgccaacgggttctgygtgttcaacaacgtggccatagcagctgcacatgccaagcagaaacacgggctacacaggatcctcgtcgtggactgggatgtgcaccatggccaggggatccagtatctctttgagratgaccccagcgtcctttacttctcctggcaccgctatgagcatgggcgcttctggcctttcctgcgagagtcagatgcagacgcagtggggcggggacagggcctcggcttcactgtcaacctgccctggaaccagggrcaaatgcaggccacgccagagtgcttcgcccacctcacacagctgctgcaggtgctggccggcggccgggtctgtgccgtgctggagggcggctaccacctggagtcactggcggagtcagtgtgcatgacagtacagacgctgctgggtgacccggcyccacccctgtcagggccaatggcgccatgtcagaggtgcgaggggagtgccctagagtccatccagagtgcccgtgctgcccaggccccgcactggaagagcctccagcagcaagatgtgaccgctgtgccgatgagccccagcagccactccccagaggggaggcctccacctctgctgcctgggggwccagtgtgtaaggcagctgcatctgcaccgagctccctcctggaccagccgtgcctctgccccgcaccctctgtccgcaccgctgttgccctgacaacgccggatakcacattggttctgccccctgacrtcatccaacaggaagcgtcagccctgagggaggagacagaagcctgggccaggccacacgagtccctggcccgggaggaggccctcactgcacttgggaagctcctgtacctcttagatgggatgctggatgggcaggtgaacagtggtatagcagccactccagcctctgctgcagcagccaccctggatgtggctgttcggagaggcctgtcccacggagcccagagctggggtgtgggasaagggctgctggaggcaatgccaggtgggtctccagcacagaggctcagcagtcacagcacccctrcccatggccccgtgaatgctcttccacctctgcctctgcggtttgggctcaggaggatgaccggtggtttcctgagctgcatcttgggcttggtgctgcccctggcstatggcttccagcctgacctggtgctggtggcgctggggcctggccatggcctgcagggcccccacgctgcactcctggctgcaatgcttcgggggctggcagggggccgagtcctggccctcctggaggagractccacaccccagctagcagggatcctggcccgggtgctgaatggagaggcacctcctagcctaggcccttcctctgtggcctccccagaggacgtccaggccctgatgtacctgagagggcagctggagcctcagtggaagatgttgcagtgccatcctcacctggtggcttgaaatcggccaaggtgggagcatttacaccgcagaaatgacaccgcacgccagcgccccgcggccgcgatccggaccccaagcccacggctccctcgactctggggcacggaaccccgcccactcccaatccccgcgccccgccccctcccacccgtgcttcccccgctccacccctcacctcacctcgcccccgccccacccatcgcgccccggcccgtcccatcgaggcccatgcaacccacgctcggtcccgttccggcccctgcgccccgctgcgcttcgctccccgcccttgcgccgttagtaaacatcgctc

SEQ ID NO: 5812 - DNA, 1957 bp, Homo sapiens
ggggccaatggggaggcggagccgcagcgcagctccgagggctggcggctcggggcgccgaggcttccgcgcccgctggttcctcgctccggggcggagctcgcgatagcgaccgggagcagggcgcggggcgggacccaggtccgaggcgaggaagccggaagccaggcgcggggagcctcccccttcgactgcagcctcgctccgtgccttctgcgcgcctgggatcccggagcctgcctaggttctgtgcgctcccgcccaggccggtgcccgccgcccgcctgcgccccaggcaggtcccaggcctccggctgctcccggccgaaggtggggacaggcagtggcaggcaccactagcgagggcgtttgggaacccagggtgaccacggcgcagccatggggaccgcgcttgtgtaccatgaggacatgacggccacccggctgctctgggacgaccccgagtgcgagatcgagcgtcctgagcgcctgaccgcagccctggatcgcctgcggcagcgcggcctggaacagaggtgtctgcggttgtcagcccgcgaggcctcggaagaggagctgggcctggtgcacaggcctcccgggcaccatggccagagggcggctgccaacgggttctgygtgttcaacaacgtggccatagcagctgcacatgccaagcagaaacacgggctacacaggatcctcgtcgtggactgggatgtgcaccatggccaggggatccagtatctctttgagratgaccccagcgtcctttacttctcctggcaccgctatgagcatgggcgcttctggcctttcctgcgagagtcagatgcagacgcagtggggcggggacagggcctcggcttcactgtcaacctgccctggaaccagggrcaaatgcaggccacgccagagtgcttcgcccacctcacacagctgctgcaggtgctggccggcggccgggtctgtgccgtgctggagtgccctagagtccatccagagtgcccgtgctgcccaggccccgcactggaagagcctccagcagcaagatgtgaccgctgtgccgatgagccccagcagccactccccagaggggaggcctccacctctgctgcctgggggwccagtgtgtaaggcagctgcatctgcaccgagctccctcctggaccagccgtgcctctgccccgcaccctctgtccgcaccgctgttgccctgacaacgccggatakcacattggttctgccccctgacrtcatccaacaggaagcgtcagccctgagggaggagacagaagcctgggccaggccacacgagtccctggcccgggaggaggccctcactgcacttgggaagctcctgtacctcttagatgggatgctggatgggcaggtgaacagtggtatagcagccactccagcctctgctgcagcagccaccctggatgtggctgttcggagaggcctgtcccacggagcccagaggctgctgtgcgtggccctgggacagctggaccggcctccagacctcgcccatgacgggaggagtctgtggctgaacatcaggggcaaggaggcggctgccctatccatgttccatgtctccacgccactgccagtgatgaccggtggtttcctgagctgcatcttgggcttggtgctgcccctggcstatggcttccagcctgacctggtgctggtggcgctggggcctggccatggcctgcagggcccccacgctgcactcctggctgcaatgcttcgggggctggcagggggccgagtcctggccctcctggaggagractccacaccccagctagcagggatcctggcccgggtgctgaatggagaggcacctcctagcctaggcccttcctctgtggcctccccagaggacgtccaggccctgatgtacctgagagggcagctggagcctcagtggaagatgttgcag

SEQ ID NO: 5813 - DNA, 2819 bp, Homo sapiens
ggggccaatggggaggcggagccgcagcgcagctccgagggctggcggctcggggcgccgaggcttccgcgcccgctggttcctcgctccggggcggagctcgcgatagcgaccgggagcagggcgcggggcgggacccaggtccgaggcgaggaagccggaagccaggcgcggggagcctcccccttcgactgcagcctcgctccgtgccttctgcgcgcctgggatcccggagcctgcctaggttctgtgcgctcccgcccaggccggtgcccgccgcccgcctgcgccccaggcaggtcccaggcctccggctgctcccggccgaaggtggggacaggcagtggcaggcaccactagcgagggcgtttgggaacccagggtgaccacggcgcagccatggggaccgcgcttgtgtaccatgaggacatgacggccacccggctgctctgggacgaccccgagtgcgagatcgagcgtcctgagcgcctgaccgcagccctggatcgcctgcggcagcgcggcctggaacagaggtgtctgcggttgtcagcccgcgaggcctcggaagaggagctgggcctggtgcacagcccagagtatgtatccctggtcagggagacccaggtcctaggcaaggaggagctgcaggcgctgtccggacagttcgacgccatctacttccacccgagtacctttcactgcgcgcggctggccgcaggggctggactgcagctggtggacgctgtgctcactggagctgtgcaaaatgggcttgccctggtgaggcctcccgggcaccatggccagagggcggctgccaacgggttctgygtgttcaacaacgtggccatagcagctgcacatgccaagcagaaacacgggctacacaggatcctcgtcgtggactgggatgtgcaccatggccaggggatccagtatctctttgagratgaccccagcgtcctttacttctcctggcaccgctatgagcatgggcgcttctggcctttcctgcgagagtcagatgcagacgcagtggggcggggacagggcctcggcttcactgtcaacctgccctggaaccaggttgggatgggaaacgctgactacgtggctgccttcctgcacctgctgctcccactggcctttgagtttgaccctgagctggtgctggtctcggcaggatttgactcagccatcggggaccctgagggrcaaatgcaggccacgccagagtgcttcgcccacctcacacagctgctgcaggtgctggccggcggccgggtctgtgccgtgctggagggcggctaccacctggagtcactggcggagtcagtgtgcatgacagtacagacgctgctgggtgacccggcyccacccctgtcagggccaatggcgccatgtcagaggtgcgaggggagtgccctagagtccatccagagtgcccgtgctgcccaggccccgcactggaagagcctccagcagcaagatgtgaccgctgtgccgatgagccccagcagccactccccagaggggaggcctccacctctgctgcctgggggwccagtgtgtaaggcagctgcatctgcaccgagctccctcctggaccagccgtgcctctgccccgcaccctctgtccgcaccgctgttgccctgacaacgccggatakcacattggttctgccccctgacrtcatccaacaggaagcgtcagccctgagggaggagacagaagcctgggccaggccacacgagtccctggcccgggaggaggccctcactgcacttgggaagctcctgtacctcttagatgggatgctggatgggcaggtgaacagtggtatagcagccactccagcctctgctgcagcagccaccctggatgtggctgttcggagaggcctgtcccacggagcccagaggctgctgtgcgtggccctgggacagctggaccggcctccagacctcgcccatgacgggaggagtctgtggctgaacatcaggggcaaggaggcggctgccctatccatgttccatgtctccacgccactgccagtgatgaccggtggtttcctgagctgcatcttgggcttggtgctgcccctggcstatggcttccagcctgacctggtgctggtggcgctggggcctggccatggcctgcagggcccccacgctgcactcctggctgcaatgcttcgggggctggcagggggccgagtcctggccctcctggaggaggtaagctgggcagggtggaggtgctgyggggtgggacgagggraaggaccagtgactgcttccgtcttcgcccctggtccagractccacaccccagctagcagggatcctggcccgggtgctgaatggagaggcacctcctagcctaggcccttcctctgtggcctccccagaggacgtccaggccctgatgtacctgagagggcagctggagcctcagtggaagatgttgcagtgccatcctcacctggtggcttgaaatcggccaaggtgggagcatttacaccgcagaaatgacaccgcacgccagcgccccgcggccgcgatccggaccccaagcccacggctccctcgactctggggcacggaaccccgcccactcccaatccccgcgccccgccccctcccacccgtgcttcccccgctccacccctcacctcacctcgcccccgccccacccatcgcgccccggcccgtcccatcgaggcccatgcaacccacgctcggtcccgttccggcccctgcgccccgctgcgcttcgctccccgcccttgcgccgttagtaaacatcgctc

SEQ ID NO: 5814 - DNA, 2725 bp, Homo sapiens
ggggccaatggggaggcggagccgcagcgcagctccgagggctggcggctcggggcgccgaggcttccgcgcccgctggttcctcgctccggggcggagctcgcgatagcgaccgggagcagggcgcggggcgggacccaggtccgaggcgaggaagccggaagccaggcgcggggagcctcccccttcgactgcagcctcgctccgtgccttctgcgcgcctgggatcccggagcctgcctaggttctgtgcgctcccgcccaggccggtgcccgccgcccgcctgcgccccaggcaggtcccaggcctccggctgctcccggccgaaggtggggacaggcagtggcaggcaccactagcgagggcgtttgggaacccagggtgaccacggcgcagccatggggaccgcgcttgtgtaccatgaggacatgacggccacccggctgctctgggacgaccccgagtgcgagatcgagcgtcctgagcgcctgaccgcagccctggatcgcctgcggcagcgcggcctggaacagaggtgtctgcggttgtcagcccgcgaggcctcggaagaggagctgggcctggtgcacagcccagagtatgtatccctggtcagggagacccaggtcctaggcaaggaggagctgcaggcgctgtccggacagttcgacgccatctacttccacccgagtacctttcactgcgcgcggctggccgcaggggctggactgcagctggtggacgctgtgctcactggagctgtgcaaaatgggcttgccctggtgaggcctcccgggcaccatggccagagggcggctgccaacgggttctgygtgttcaacaacgtggccatagcagctgcacatgccaagcagaaacacgggctacacaggatcctcgtcgtggactgggatgtgcaccatggccaggggatccagtatctctttgagratgaccccagcgtcctttacttctcctggcaccgctatgagcatgggcgcttctggcctttcctgcgagagtcagatgcagacgcagtggggcggggacagggcctcggcttcactgtcaacctgccctggaaccaggttgggatgggaaacgctgactacgtggctgccttcctgcacctgctgctcccactggcctttgagtttgaccctgagctggtgctggtctcggcaggatttgactcagccatcggggaccctgagggrcaaatgcaggccacgccagagtgcttcgcccacctcacacagctgctgcaggtgctggccggcggccgggtctgtgccgtgctggagggcggctaccacctggagtcactggcggagtcagtgtgcatgacagtacagacgctgctgggtgacccggcyccacccctgtcagggccaatggcgccatgtcagagtgccctagagtccatccagagtgcccgtgctgcccaggccccgcactggaagagcctccagcagcaagatgtgaccgctgtgccgatgagccccagcagccactccccagaggggaggcctccacctctgctgcctgggggwccagtgtgtaaggcagctgcatctgcaccgagctccctcctggaccagccgtgcctctgccccgcaccctctgtccgcaccgctgttgccctgacaacgccggatakcacattggttctgccccctgacrtcatccaacaggaagcgtcagccctgagggaggagacagaagcctgggccaggccacacgagtccctggcccgggaggaggccctcactgcacttgggaagctcctgtacctcttagatgggatgctggatgggcaggtgaacagtggtatagcagccactccagcctctgctgcagcagccaccctggatgtggctgttcggagaggcctgtcccacggagcccagaggctgctgtgcgtggccctgggacagctggaccggcctccagacctcgcccatgacgggaggagtctgtggctgaacatcaggggcaaggaggcggctgccctatccatgttccatgtctccacgccactgccagtgatgaccggtggtttcctgagctgcatcttgggcttggtgctgcccctggcstatggcttccagcctgacctggtgctggtggcgctggggcctggccatggcctgcagggcccccacgctgcactcctggctgcaatgcttcgggggctggcagggggccgagtcctggccctcctggaggagractccacaccccagctagcagggatcctggcccgggtgctgaatggagaggcacctcctagcctaggcccttcctctgtggcctccccagaggacgtccaggccctgatgtacctgagagggcagctggagcctcagtggaagatgttgcagtgccatcctcacctggtggcttgaaatcggccaaggtgggagcatttacaccgcagaaatgacaccgcacgccagcgccccgcggccgcgatccggaccccaagcccacggctccctcgactctggggcacggaaccccgcccactcccaatccccgcgccccgccccctcccacccgtgcttcccccgctccacccctcacctcacctcgcccccgccccacccatcgcgccccggcccgtcccatcgaggcccatgcaacccacgctcggtcccgttccggcccctgcgccccgctgcgcttcgctccccgcccttgcgccgttagtaaacatcgctc

SEQ ID NO: 5815 - DNA, 2737 bp, Homo sapiens
ggggccaatggggaggcggagccgcagcgcagctccgagggctggcggctcggggcgccgaggcttccgcgcccgctggttcctcgctccggggcggagctcgcgatagcgaccgggagcagggcgcggggcgggacccaggtccgaggcgaggaagccggaagccaggcgcggggagcctcccccttcgactgcagcctcgctccgtgccttctgcgcgcctgggatcccggagcctgcctaggttctgtgcgctcccgcccaggccggtgcccgccgcccgcctgcgccccaggcaggtcccaggcctccggctgctcccggccgaaggtggggacaggcagtggcaggcaccactagcgagggcgtttgggaacccagggtgaccacggcgcagccatggggaccgcgcttgtgtaccatgaggacatgacggccacccggctgctctgggacgaccccgagtgcgagatcgagcgtcctgagcgcctgaccgcagccctggatcgcctgcggcagcgcggcctggaacagaggtgtctgcggttgtcagcccgcgaggcctcggaagaggagctgggcctggtgcacagcccagagtatgtatccctggtcagggagacccaggtcctaggcaaggaggagctgcaggcgctgtccggacagttcgacgccatctacttccacccgagtacctttcactgcgcgcggctggccgcaggggctggactgcagctggtggacgctgtgctcactggagctgtgcaaaatgggcttgccctggtgaggcctcccgggcaccatggccagagggcggctgccaacgggttctgygtgttcaacaacgtggccatagcagctgcacatgccaagcagaaacacgggctacacaggatcctcgtcgtggactgggatgtgcaccatggccaggggatccagtatctctttgagratgaccccagcgtcctttacttctcctggcaccgctatgagcatgggcgcttctggcctttcctgcgagagtcagatgcagacgcagtggggcggggacagggcctcggcttcactgtcaacctgccctggaaccaggttgggatgggaaacgctgactacgtggctgccttcctgcacctgctgctcccactggcctttgagtttgaccctgagctggtgctggtctcggcaggatttgactcagccatcggggaccctgagggrcaaatgcaggccacgccagagtgcttcgcccacctcacacagctgctgcaggtgctggccggcggccgggtctgtgccgtgctggagggcggctaccacctggagtcactggcggagtcagtgtgcatgacagtacagacgctgctgggtgacccggcyccacccctgtcagggccaatggcgccatgtcagaggtgcgaggggagtgccctagagtccatccagagtgcccgtgctgcccaggccccgcactggaagagcctccagcagcaagatgtgaccgctgtgccgatgagccccagcagccactccccagaggggaggcctccacctctgctgcctgggggwccagtgtgtaaggcagctgcatctgcaccgagctccctcctggaccagccgtgcctctgccccgcaccctctgtccgcaccgctgttgccctgacaacgccggatakcacattggttctgccccctgacrtcatccaacaggaagcgtcagccctgagggaggagacagaagcctgggccaggccacacgagtccctggcccgggaggaggccctcactgcacttgggaagctcctgtacctcttagatgggatgctggatgggcaggtgaacagtggtatagcagccactccagcctctgctgcagcagccaccctggatgtggctgttcggagaggcctgtcccacggagcccagaggctgctgtgcgtggccctgggacagctggaccggcctccagacctcgcccatgacgggaggagtctgtggctgaacatcaggggcaaggaggcggctgccctatccatgttccatgtctccacgccactgccagtgatgaccggtggtttcctgagctgcatcttgggcttggtgctgcccctggcstatggcttccagcctgacctggtgctggtggcgctggggcctggccatggcctgcagggcccccacgctgcactcctggctgcaatgcttcgggggctggcagggggccgagtcctggccctcctggaggagractccacaccccagctagcagggatcctggcccgggtgctgaatggagaggcacctcctagcctaggcccttcctctgtggcctccccagaggacgtccaggccctgatgtacctgagagggcagctggagcctcagtggaagatgttgcagtgccatcctcacctggtggcttgaaatcggccaaggtgggagcatttacaccgcagaaatgacaccgcacgccagcgccccgcggccgcgatccggaccccaagcccacggctccctcgactctggggcacggaaccccgcccactcccaatccccgcgccccgccccctcccacccgtgcttcccccgctccacccctcacctcacctcgcccccgccccacccatcgcgccccggcccgtcccatcgaggcccatgcaacccacgctcggtcccgttccggcccctgcgccccgctgcgcttcgctccccgcccttgcgccgttagtaaacatcgctc

SEQ ID NO: 5816 - DNA, 2572 bp, Homo sapiens
ggggccaatggggaggcggagccgcagcgcagctccgagggctggcggctcggggcgccgaggcttccgcgcccgctggttcctcgctccggggcggagctcgcgatagcgaccgggagcagggcgcggggcgggacccaggtccgaggcgaggaagccggaagccaggcgcggggagcctcccccttcgactgcagcctcgctccgtgccttctgcgcgcctgggatcccggagcctgcctaggttctgtgcgctcccgcccaggccggtgcccgccgcccgcctgcgccccaggcaggtcccaggcctccggctgctcccggccgaaggtggggacaggcagtggcaggcaccactagcgagggcgtttgggaacccagggtgaccacggcgcagccatggggaccgcgcttgtgtaccatgaggacatgacggccacccggctgctctgggacgaccccgagtgcgagatcgagcgtcctgagcgcctgaccgcagccctggatcgcctgcggcagcgcggcctggaacagaggtgtctgcggttgtcagcccgcgaggcctcggaagaggagctgggcctggtgcacagtacctttcactgcgcgcggctggccgcaggggctggactgcagctggtggacgctgtgctcactggagctgtgcaaaatgggcttgccctggtgaggcctcccgggcaccatggccagagggcggctgccaacgggttctgygtgttcaacaacgtggccatagcagctgcacatgccaagcagaaacacgggctacacaggatcctcgtcgtggactgggatgtgcaccatggccaggggatccagtatctctttgagratgaccccagcgtcctttacttctcctggcaccgctatgagcatgggcgcttctggcctttcctgcgagagtcagatgcagacgcagtggggcggggacagggcctcggcttcactgtcaacctgccctggaaccagtttgaccctgagctggtgctggtctcggcaggatttgactcagccatcggggaccctgagggrcaaatgcaggccacgccagagtgcttcgcccacctcacacagctgctgcaggtgctggccggcggccgggtctgtgccgtgctggagggcggctaccacctggagtcactggcggagtcagtgtgcatgacagtacagacgctgctgggtgacccggcyccacccctgtcagggccaatggcgccatgtcagaggtgcgaggggagtgccctagagtccatccagagtgcccgtgctgcccaggccccgcactggaagagcctccagcagcaagatgtgaccgctgtgccgatgagccccagcagccactccccagaggggaggcctccacctctgctgcctgggggwccagtgtgtaaggcagctgcatctgcaccgagctccctcctggaccagccgtgcctctgccccgcaccctctgtccgcaccgctgttgccctgacaacgccggatakcacattggttctgccccctgacrtcatccaacaggaagcgtcagccctgagggaggagacagaagcctgggccaggccacacgagtccctggcccgggaggaggccctcactgcacttgggaagctcctgtacctcttagatgggatgctggatgggcaggtgaacagtggtatagcagccactccagcctctgctgcagcagccaccctggatgtggctgttcggagaggcctgtcccacggagcccagagctggggtgtgggasaagggctgctggaggcaatgccaggtgggtctccagcacagaggctcagcagtcacagcacccctrcccatggccccgtgaatgctcttccacctctgcctctgcggtttgggctcaggaggatgaccggtggtttcctgagctgcatcttgggcttggtgctgcccctggcstatggcttccagcctgacctggtgctggtggcgctggggcctggccatggcctgcagggcccccacgctgcactcctggctgcaatgcttcgggggctggcagggggccgagtcctggccctcctggaggagractccacaccccagctagcagggatcctggcccgggtgctgaatggagaggcacctcctagcctaggcccttcctctgtggcctccccagaggacgtccaggccctgatgtacctgagagggcagctggagcctcagtggaagatgttgcagtgccatcctcacctggtggcttgaaatcggccaaggtgggagcatttacaccgcagaaatgacaccgcacgccagcgccccgcggccgcgatccggaccccaagcccacggctccctcgactctggggcacggaaccccgcccactcccaatccccgcgccccgccccctcccacccgtgcttcccccgctccacccctcacctcacctcgcccccgccccacccatcgcgccccggcccgtcccatcgaggcccatgcaacccacgctcggtcccgttccggcccctgcgccccgctgcgcttcgctccccgcccttgcgccgttagtaaacatcgctc

SEQ ID NO: 5817 - DNA, 2095 bp, Homo sapiens
ggggccaatggggaggcggagccgcagcgcagctccgagggctggcggctcggggcgccgaggcttccgcgcccgctggttcctcgctccggggcggagctcgcgatagcgaccgggagcagggcgcggggcgggacccaggtccgaggcgaggaagccggaagccaggcgcggggagcctcccccttcgactgcagcctcgctccgtgccttctgcgcgcctgggatcccggagcctgcctaggttctgtgcgctcccgcccaggccggtgcccgccgcccgcctgcgccccaggcaggtcccaggcctccggctgctcccggccgaaggtggggacaggcagtggcaggcaccactagcgagggcgtttgggaacccagggtgaccacggcgcagccatggggaccgcgcttgtgtaccatgaggacatgacggccacccggctgctctgggacgaccccgagtgcgagatcgagcgtcctgagcgcctgaccgcagccctggatcgcctgcggcagcgcggcctggaacagaggtgtctgcggttgtcagcccgcgaggcctcggaagaggagctgggcctggtgcacagcccagagtatgtatccctggtcagggagacccaggtcctaggcaaggaggagctgcaggcgctgtccggacagttcgacgccatctactaccacctggagtcactggcggagtcagtgtgcatgacagtacagacgctgctgggtgacccggcyccacccctgtcagggccaatggcgccatgtcagagtgccctagagtccatccagagtgcccgtgctgcccaggccccgcactggaagagcctccagcagcaagatgtgaccgctgtgccgatgagccccagcagccactccccagaggggaggcctccacctctgctgcctgggggwccagtgtgtaaggcagctgcatctgcaccgagctccctcctggaccagccgtgcctctgccccgcaccctctgtccgcaccgctgttgccctgacaacgccggatakcacattggttctgccccctgacrtcatccaacaggaagcgtcagccctgagggaggagacagaagcctgggccaggccacacgagtccctggcccgggaggaggccctcactgcacttgggaagctcctgtacctcttagatgggatgctggatgggcaggtgaacagtggtatagcagccactccagcctctgctgcagcagccaccctggatgtggctgttcggagaggcctgtcccacggagcccagaggctgctgtgcgtggccctgggacagctggaccggcctccagacctcgcccatgacgggaggagtctgtggctgaacatcaggggcaaggaggcggctgccctatccatgttccatgtctccacgccactgccagtgatgaccggtggtttcctgagctgcatcttgggcttggtgctgcccctggcstatggcttccagcctgacctggtgctggtggcgctggggcctggccatggcctgcagggcccccacgctgcactcctggctgcaatgcttcgggggctggcagggggccgagtcctggccctcctggaggagractccacaccccagctagcagggatcctggcccgggtgctgaatggagaggcacctcctagcctaggcccttcctctgtggcctccccagaggacgtccaggccctgatgtacctgagagggcagctggagcctcagtggaagatgttgcagtgccatcctcacctggtggcttgaaatcggccaaggtgggagcatttacaccgcagaaatgacaccgcacgccagcgccccgcggccgcgatccggaccccaagcccacggctccctcgactctggggcacggaaccccgcccactcccaatccccgcgccccgccccctcccacccgtgcttcccccgctccacccctcacctcacctcgcccccgccccacccatcgcgccccggcccgtcccatcgaggcccatgcaacccacgctcggtcccgttccggcccctgcgccccgctgcgcttcgctccccgcccttgcgccgttagtaaacatcgctc

SEQ ID NO: 5818 - DNA, 2665 bp, Homo sapiens
ggggccaatggggaggcggagccgcagcgcagctccgagggctggcggctcggggcgccgaggcttccgcgcccgctggttcctcgctccggggcggagctcgcgatagcgaccgggagcagggcgcggggcgggacccaggtccgaggcgaggaagccggaagccaggcgcggggagcctcccccttcgactgcagcctcgctccgtgccttctgcgcgcctgggatcccggagcctgcctaggttctgtgcgctcccgcccaggccggtgcccgccgcccgcctgcgccccaggcaggtcccaggcctccggctgctcccggccgaaggtggggacaggcagtggcaggcaccactagcgagggcgtttgggaacccagggtgaccacggcgcagccatggggaccgcgcttgtgtaccatgaggacatgacggccacccggctgctctgggacgaccccgagtgcgagatcgagcgtcctgagcgcctgaccgcagccctggatcgcctgcggcagcgcggcctggaacagaggtgtctgcggttgtcagcccgcgaggcctcggaagaggagctgggcctggtgcacagcccagagtatgtatccctggtcagggagacccaggtcctaggcaaggaggagctgcaggcgctgtccggacagttcgacgccatctacttccacccgagtacctttcactgcgcgcggctggccgcaggggctggactgcagctggtggacgctgtgctcactggagctgtgcaaaatgggcttgccctggtgaggcctcccgggcaccatggccagagggcggctgccaacgggttctgygtgttcaacaacgtggccatagcagctgcacatgccaagcagaaacacgggctacacaggatcctcgtcgtggactgggatgtgcaccatggccaggggatccagtatctctttgagratgaccccagcgtcctttacttctcctggcaccgctatgagcatgggcgcttctggcctttcctgcgagagtcagatgcagacgcagtggggcggggacagggcctcggcttcactgtcaacctgccctggaaccaggttgggatgggaaacgctgactacgtggctgccttcctgcacctgctgctcccactggcctttgagggrcaaatgcaggccacgccagagtgcttcgcccacctcacacagctgctgcaggtgctggccggcggccgggtctgtgccgtgctggagggcggctaccacctggagtcactggcggagtcagtgtgcatgacagtacagacgctgctgggtgacccggcyccacccctgtcagggccaatggcgccatgtcagagtgccctagagtccatccagagtgcccgtgctgcccaggccccgcactggaagagcctccagcagcaagatgtgaccgctgtgccgatgagccccagcagccactccccagaggggaggcctccacctctgctgcctgggggwccagtgtgtaaggcagctgcatctgcaccgagctccctcctggaccagccgtgcctctgccccgcaccctctgtccgcaccgctgttgccctgacaacgccggatakcacattggttctgccccctgacrtcatccaacaggaagcgtcagccctgagggaggagacagaagcctgggccaggccacacgagtccctggcccgggaggaggccctcactgcacttgggaagctcctgtacctcttagatgggatgctggatgggcaggtgaacagtggtatagcagccactccagcctctgctgcagcagccaccctggatgtggctgttcggagaggcctgtcccacggagcccagaggctgctgtgcgtggccctgggacagctggaccggcctccagacctcgcccatgacgggaggagtctgtggctgaacatcaggggcaaggaggcggctgccctatccatgttccatgtctccacgccactgccagtgatgaccggtggtttcctgagctgcatcttgggcttggtgctgcccctggcstatggcttccagcctgacctggtgctggtggcgctggggcctggccatggcctgcagggcccccacgctgcactcctggctgcaatgcttcgggggctggcagggggccgagtcctggccctcctggaggagractccacaccccagctagcagggatcctggcccgggtgctgaatggagaggcacctcctagcctaggcccttcctctgtggcctccccagaggacgtccaggccctgatgtacctgagagggcagctggagcctcagtggaagatgttgcagtgccatcctcacctggtggcttgaaatcggccaaggtgggagcatttacaccgcagaaatgacaccgcacgccagcgccccgcggccgcgatccggaccccaagcccacggctccctcgactctggggcacggaaccccgcccactcccaatccccgcgccccgccccctcccacccgtgcttcccccgctccacccctcacctcacctcgcccccgccccacccatcgcgccccggcccgtcccatcgaggcccatgcaacccacgctcggtcccgttccggcccctgcgccccgctgcgcttcgctccccgcccttgcgccgttagtaaacatcgctc

SEQ ID NO: 5819 - DNA, 2956 bp, Homo sapiens
gcggccgctgcccgtcgcccgggactccccgccctccctcgcgaccccgcgccggggcgggcggcgcttgcggcgggcagggggcgggcaggggagagggggctcgtccgggggtagccgcctcctctgcagcctgccggcgcctcgaagcccggacctgcctccgcctcttcctccagcggctccatcccgcctcccgtgcctcgtcctcccgccgcctccgccgccgcgcccccggtggctgcctcggcggaccggggagggggcccaccgcgtcgaccgcccgctcggctcggctcggcccggcccgggaggcgtgcatgcccctgctgcccgcggcgctcaccagcagcatgctctatttccagatggtgatcatggcagggacggtgatgctggcgtactacttcgagtatacggacacgttcaccgtgaacgtgcagggcttcttctgccacgacagcgcctaccgcaaaccctacccgggcccggaggacagcagcgccgtgccccccgtgctcctctactcgctggccgccggggtccccgtgctcgtgataatagttggagaaactgctgtcttttgcctacaactagccacaagggattttgaaaaccaggaaaaaactattttaactggagactgttgctatataaacccgctggtgcgccgaactgtccgatttcttggaatttatacatttggactgtttgctacagatatctttgtaaatgctggacaagtagtcacaggaaatctggccccacatttccttgccctgtgtaagcccaattatacagcacttggatgtcagcagtatacacaattcatcagtggggaagaggcctgtactggcaacccagatctcatcatgagagcccgaaaaacctttccatccaaagaagcagctctcagtgtstatgcagctatgtatctgaccatgtacatcaccaacacaatcaaagccaagggaaccagacttgctaagccagttctatgcttgggcttaatgtgtttggcatttcttactggactcaacagagtagcagaatatcgaaatcattggtcagatgttatagcaggctttctggttggaatatctatagcagtatttctggttgtgtgcgtggtgaataatttcaaaggragacaagcagaaaatgagcatatacacatggataatctggcacagatgccaatgatcagcattcctcgagtagaaagtcctttggaaaagaaccacatcactgccttcgcagaagtcacatgatatcraagcagatggtttttcactgcattggacatcatccctttttaccatccattcataacacccaaagtttgtttgattgcaagtgaagtttataaagttgtttaataatttttataattttaaaatcaatgtcaacctatctgtttcccccactagactgtgagctcctcgagggcaggattgtctttttttttctgtgtccccagcacttacaacaaagcctagcacaaagtaggtgttcaacaaaaatgtgatgaccaaatgaamaaaattcttaaataaaacattcactttagtttctcacagaatcattgcaattatgttaaaagaaatctctacataaatcgtatttgtgtatgaaaaccttctattttgggctagttatttttttaatcttcatatatctattcagcagtatgccatatttaatttgaagtggactttgaaagtcatgggggtttttattttgttattcagcatgacattatttccattctaacatttcagtgtgtgaaattactttatttttagaaagtatgttctatagtaaaataatgtttccacattatattatgttatatttcacttaaaatactattcatactatacattctaagactggtgcttctgcttttgaaggggaaaatgccaatttttactgtaataagtaatgtatcataattaaaaattatttatttggacttcttctcctgacaattgtggcttaattcatgacttgtttttgaatgcaggcagtatttagggtagtttaaatgagtaaattcagcactggtaccttattattgagtaatttcccatgggtagcagtgtctcaagagtggtcaaaagctccactcttaggcttttttactactaaagattccacataatttaaatgggaaagaactataccctgacacataatttaaattatataaatgctagaaatatggttaatgtattttactttgcatttgtgtagtactttatagtttacaaagcatatttacaccaattattttatgtaatcctcataataacctggtataaacatgaagggtatggctttatttttatagataagaaaaatgaagccaagacagggtaaataacatgccaaatcacaaactagtaagagacatagttgaagcttaaattcaagttttctggccctgaactcatattcctttctaatatagcacagctgtcatctcattttggacactgaggcctttcagagctcagtagaatcctgggcaactacctatggttcaaaaaataaagaaatgccagaatacaaatatgaaagctctgctgtattttaaatgtttatgttttaagaatgaacacttttcaaatataaaactatataataattataatccagttttaagataatatcaagagtctagatgtgaggctttttgtgaaagagaagcctaaattcagcatctccccttccaccctcacccccaggtcccagcctcccactcagcagagtgcccaagggacataccttacatttagcatgtagaattccagattacaatcgccataatataaggaaggtgagctcctcaacaataactttgcaataattaaaactaccctaagtaactttggcttatatggcaaagtaactttggcagtaattgactgaaatgaayctttctaaactttac

SEQ ID NO: 5820 - DNA, 4541 bp, Homo sapiens
attatggtaggagaaggaattctctactgttgcctctccaaaagaagaaatggggtcggactagagcccaacattaatgctggaggctgcaacttcaattccttcctcagacgagctgtcagattcgttgatcttaattcacyaatgtttaatgaatatgtttgatgctgacacaaccaccaacttggtaacaatttctttcattttgcctataggtgttcatgtatttggattatgctctacagctctcattacagatatcatacagctgtccacaggatatcaagcaccttactttctgactgtgtgcaaaccaaactatacctctctgaatgtatcttgcaaagaaaattcctacattgtggaagatatttgctcaggatctgacctcacagttatcaacagtggcagaaagtccttcccttctcaacatgcaacccttgctgcctttgcagctgtgtatgtttcgatgtacttcaattccacattaacggattcctctaagcttctgaaacctctcttggtcttcacatttatcatctgtggaataatctgcgggctaacacggataactcagtataagaaccacccagttgatgtctattgtggctttttaataggaggaggaattgcactgtacttgggcttgtatgctgtggggaatttcctgcccagtgatgagagtatgtttcagcacagagacgccctcaggtctctgacagacctcaatcaagatcccaaccgacttttatctgctaaaaatggtagcagcagtgatggaattgctcatacagaaggcatcctcaaccgaaaccacagagatgctagctctctgacaaatctcaaaagagcaaatgctgatgtggaaatcattactccacggagccccatggggaaggagaacatggttaccttcagcaataccttgccgcgagccaataccccatctgtagaagaccctgtcagaagaaatgcgagcattcatgcctctatggattccgctcgatcaaagcagctcctcacccagtggaagaataagaatgaaagtcgaaagttgtccttgcaagttatagagcctgagcctgggcagtcaccacccagatccatagaaatgaggtcaagctcagagccatcgagggtaggggtgaatggagaccaccatggtcctggcaatcagtacctcaaaatccagcctggcgctgtccccggatgtaacaacagcatgcctggagggccaagagtgtccattcagtcccgtcctgggtcctcacagttggtgcacatccctgaggagactcaggaaaacataagcacctcccccaaaagcagctctgctcgggccaagtggttaaaagctgctgaaaagactgtggcctgtaacagaagcaacagccagccccgaatcatgcaagtcatagccatgtccaagcagcagggtgtcctccaaagcagccccaagaacactgaaggcagcacggtctcctgcactggctccatccgctataaaaccttgacagaccatgagcccagtgggatagtgagggttgaggctcacccagagaacaacaggcccatcatacagatcccgtccactgaaggtgaaggcagtggctcctggaagtggaaagcccctgaaaagggcagccttcgccaaacttacgagctcaacgatctcaacagggactcagaaagctgtgagtctctgaaagacagctttggttctggagatcgcaagagaagcaacattgatagcaatgagcatcaccaccacggaattaccaccatccgcgtcaccccagtagagggcagcgaaattggctcagagacgctgtccatttcttcttcccgcgactccaccctgcggagaaagggcaatatcattctaatccctgaaagaagcaacagccccgaaaacactagaaatatcttctacaaaggaacctcccccacacgggcttataaggattgagtgatgtccattccatcattagggctactcgcaaaagaccatatgttgattctacctgtgttctgttccagcgaattgggaagtctcaccaagctagattgtctaccatcagcccagaactctgtaacttttcagaactgctatactcaaacttgcagatctcacatcaaggagagggaaaagcacaatgcaagaacctaactaacgtgatgatatgaagagttttcttaagacctgtcgtcaaacttaaaaggttttgcagagggcagtatcaaaagaaagtggttttcttcaaatgtatactattttacttcctgaatgtgccaactttggggatttttctttatagtgagctgtgggaacccagaacacacacgttttccctacagcagaggccatgcagtattatatattcattttgcagaatctgcacctacagctcaatacgggtggtgctgattattatagtacatataccatgtaaactctcaaactctatttagctgtgaaatagtggtgtgcaattccttgttaaagaaatgctactttattaagaagatgctggctgctttgtgttagaataggacaccccgcagcttctctgtagtggctctgtcacagtcaaaaaatgaaaaggtttttgtgcgtttcttcaaaattctgctttcttcaacatcaaaaattgtgtagaaatattttcagtgaaagggaataactagtacttttctgcatagtttttcttctgcttactttttatttaagtataggtactgctaatgaatctgttttcttagtgagtaaatttgcataattttataaatattattttagagaatcttttgaaattgttgtgatcatattttgctttctatggcttctccttaacttattgattaattttttgaagttatagatatgttctcctattttaaaagcaaaaataacaattgacattccttgagcaaaatatactgctgtgaatttgcaaacaagaaatctgagccaaaacttgacattgtgggttacattgccagaaatgttggtcaagtttgcccttagatgtctacaactagctggcataggttgccatcttaacaagtaatctaaaagtcccattcggttctacattattaactttttttttctatatcctgatgaccagtaaattagagccacactggttaagtttgactcgtctctaaaacgtttttgttaattggacaccaagaggaagaatctgaaaaaaaaatgcatgttggtaagtaaaagtatctcacggtacaaattaagaatgactttcttcaaaatatctgaataggtgcagttttagtttaacatgcaaacaaccattgttgctacctatcctgaatcaagccttgagcctaaatcaaagcaaaccaataccattgataagaagaagataaaaacaaaatattttggagtgttttccaacttaaagtatgaagacatactcagttcttggaacttagtattaaaccttttttatgccatttcataagaattccgatatatacttgatgattgccaaggggatgaaaggaaacaacagagatggttgatctgatcttagctcactttccaataacagaaggagttgtttacagatgaatagtatcacatcattatcaatttccacatgaaaaaggtggagctttctagaaaaaccaacctctaaggcattaggaatttagctgaaaccagcagaattgaaaactctggcaataaaacatggactcaaccatatcccttctggcaatttccttctcagagaggggagtgggaataaaatgttgccttccccacttctcaccaccaccgccatcatgacgctcatactggcttttgcctgtttgtagaggaaaaggtgggctggttttagtactctgaaggacaaaaacaagcaaacaaaaacccctgctgcagcatttcaggtgcagtatgatatttcctaatctttcctatttcttaacaaaagattttaaagtacttctctagtcattgaagtttttttttctttacataaatattgatatattctttttctactcaaagtgccaaaggctacagtttttaatgacttaacaaattgtaccacattgttaaggacatataatgatagacactagaactcagacctctgcatgtatatttgataacatgtcttttgtaaaacaaaaattacaaaaaaatttgtttacattccactggtaccttaatttaaaataaatcagactaaaaggtggtatctcttcttagtgttctatttatcttatttgctaatgggagcacttcttcctttgttaggctgtgctttactgataaamccaagtattgaataaagagagttaattatctttttaaagtaaataaaattatgaaaatatatatagtatatataaagtactgtgtttaaaaaaatgttatgcaatgttttccaaactgataaagtttgtaaagtgctataaatgtattttgttaagtacagataaaagctattgtgtgagtatattgtgctaaaatcatagaaataaagattagatttcttcatcaa

SEQ ID NO: 5821 - DNA, 1107 bp, Homo sapiens
atggtgtgcgttctcgttctagctgcggccrcaggagctgtggcggttttcctaatcctgcgaatatgggtagtgcttcgttccatggacgttacgccccgggagtctctcagtatcttggtagtggctgggtccggtgggcataccactgagatcctgaggctgcttgggagcttgtccaatgcctactcacctagacattatgtcattgctgacactgatgaaatgagtgccaataaaataaattcttttgaactagatcgagctgatagagaccctagtaacatgagacggggtctcactgtctgcccaggctggggtgcagtggtgcaatcatagctcactgcatctttgaattcctgggctcaagcagtcctgcctcagcctcccaagtaactggaactacagtataccaaatactacattcaccgaattccaagaagccgggaggttcagcagtcctggccctccaccgttttcaccaccttgcactccatgtggctctcctttcccctaattcacagggtgaagccagatttggtgttgtgwaacggaccaggaacatgtgttcctatctgtgtatctgcccttctccttgggatactaggaataaagaaagtgatcattgtctacgttgaaagcatctgccgtgtagaaacgttatccatgtccggaaagattctgtttcatctctcagattacttcattgttcagtggccggctctgaaagmaaagtatcccaaatcggtgtaccttgggcgaattgtttgacaaatggcaactgacttctttagaattttgcagttaacagtagtatgtactcaaattggggggaaaaaaaccctacatgtttcttgtaaaggcgtctgacagtcctgagaattattgatggtaaggaataaaaaatgtacagatgactcagtgaagaaactgaggcttctcttatgaaacaaacattgataaacgtaactactaaatgtttatgcctctgtaaaccaaatttcttttctagataaaaatatgtattactacctgcaaattttcttctggctgttttagtagtattttttttacagaactaaatatagagtttgtatgattagtaat

SEQ ID NO: 5822 - DNA, 987 bp, Homo sapiens
atggtgtgcgttctcgttctagctgcggccrcaggagctgtggcggttttcctaatcctgcgaatatgggtagtgcttcgttccatggacgttacgccccgggagtctctcagtatcttggtagtggctgggtccggtgggcataccactgagatcctgaggctgcttgggagcttgtccaatgcctactcacctagacattatgtcattgctgacactgatgaaatgagtgccaataaaataaattcttttgaactagatcgagctgatagagaccctagtaacatgtataccaaatactacattcaccgaattccaagaagccgggaggttcagcagtcctggccctccaccgttttcaccaccttgcactccatgtggctctcctttcccctaattcacagggtgaagccagatttggtgttgtgwaacggaccaggaacatgtgttcctatctgtgtatctgcccttctccttgggatactaggaataaagaaagtgatcattgtctacgttgaaagcatctgccgtgtagaaacgttatccatgtccggaaagattctgtttcatctctcagattacttcattgttcagtggccggctctgaaagmaaagtatcccaaatcggtgtaccttgggcgaattgtttgacaaatggcaactgacttctttagaattttgcagttaacagtagtatgtactcaaattggggggaaaaaaaccctacatgtttcttgtaaaggcgtctgacagtcctgagaattattgatggtaaggaataaaaaatgtacagatgactcagtgaagaaactgaggcttctcttatgaaacaaacattgataaacgtaactactaaatgtttatgcctctgtaaaccaaatttcttttctagataaaaatatgtattactacctgcaaattttcttctggctgttttagtagtattttttttacagaactaaatatagagtttgtatgattagtaat

SEQ ID NO: 5823 - DNA, 3778 bp, Homo sapiens
gccagtcacttgcgggccggcgtcccgcagcccattcgcgccccgcccctgccccgccgcgggatgagtaacggttacgaagcactttctcggctacgatttctgcttagtcattgtcttccaggaaacagctccctcagtttggaatcagctctcccgctgcggccgcagtagccggagccggagccgcagccaccggtgccttcctttcccgccgccgcccagccgccgtccggcctccctcgggcccgagcgcagaccaggctccagccgcgcggcgccggcagcctcgcgctccctctcgggtctctctcgggcctcgggcaccgcgtcctgtggggcggccgcctgcctgcccgcccgcccgcagccccttcgctgckcggcccctgggcggccgctgccatgggcaccgacagccgcgcggccaaggcgctcctggcgcgggcccgcaccctgcacctgcagacggggaacctgctgaactggggccgcctgcggaagaagtgcccgtccacgcacagcgaggagcttcatgattgtatccaaaaaaccttgaatgaatggagttcccaaatcaacccagatttggtcagggagtttccagatgtcttggaatgmactgtatctcatgcagtagaaaagataaatcctgatgaaagagaagaaatgaaagtttctgcaaaactgttcattgtagaatcaaactcttcatcatcaactagaagtgcagttgacatggcctgttcagtccttggagttgmacagctggattctgtgatcattgcttcacctcctattgaagatggagttaatctttccttggagcatttacagccttactgggaggaattagaaaacttagttcagagcaaaaagattgttgccataggtacctctgatctagacaaaacacagttggaacagctgtatcagtgggcacaggtaaaaccaaatagtaaccaagttaatcttgcctcctgctgtgtgatgccaccagatttgactgcatttgctaaacaatttgacatacagctgttgactcacaatgatccaaaagaactgctttctgaagcaagtttccaagaagctcttcaggaaagcattcctgacattcaagcgcacgagtgggtgccrctgtggctactgcggtattcggtcattgtgaaaagtagaggaattatcaaatcaaaaggctacattttacaagctaaaagaaggggttcttaactgacttaggagcataacttacctgtaatttccttcaatatgagagaaaattgagatgtgtaaaaatctagttactgcctgtaaatggtgtcattgaggcagatattctttcgtcatatttgacagtatgttgtctgtcaagttttaaatacttatcttgcctccatatcaatccattctcatgaacctctgtattgctttccttaaactattgttttctaattgaaattgtctataaagaaaatacttgcaatatatttttcctttatttttatgactaatataaatcaagaaaatttgttgttagatatattttggcctaggtatcagggtaatgtatatacatattttttatttccaaaaaaaattcattaattgcttcttaactcttattataaccaagcaatttaattacaattgttaaaactgaaatactggaagaagatatttttcctgtcattgatgagatatatcagagtaactggagtagctgggatttactagtagtgtaaataaaattcactcttcaatacatgaatggaaacttaaatttttttttatgtgtccttgcttatagtttagctgtaataatttaaccttgtattcttgtgccatattctgtctttttattacttataaagacaaaccaaagtaaatctgaaaggagactagaagctttgaaattattgtttgggggttttataaaagcaactactgtcacctccatccagattcttttaaattattgatccatccatagtatatattgctactcattcaagaatcctcaataagtattgagtatttaccatatgttgggatactgtgggctctggagagaggagggggcaatagagctaggaattaagaatcagttgagtaaaatgtgtaatatttattccccattaataactgactaggaaggactaaaagccagaaaggggatgaaaaaaaaatccttaattcagggccracattatctacttaaacaactttgagatatggtcttaattattttaaagcagaataatataattgaaagtttatagctaaaagagactatataggtcatttagtataattcttcattagtttamgaaccacaaaattgcaaataaataagctatgaactttgatgtacactataaatctccttaattctataaatttgtgtctgtaacctgaatagtttgaaaacttctttaaaaatctcttgtatttcatccgggcgcagtggctcacacctgtaatcccagcactttgggaggccgaggtgggcagatcacgaggtcaggagtttgagaccagcctgaccaacatggtaaaaccccatctctactaaaatacaaaaattggctgggcgtggtggcactcgcctgtaatctcagctacttgggaggctgaggcaggagaatcgcttgaacccgggaggcggaggttacagtgagccgagatcacatcactgcactccagcctgggcgacagagcgagactccatctcaaaaaaaaaaaaaaaactcttgtatctcaatatttttaaaccacaggcctaaataaaactaattttgctcaagttttctcaacctagggaaaaagaactatggttccatattcaaaataaatattatagacccttttcctaagtaggattttgtggtttactgattgggtaatttgatcattaaaattatgtgaaatctgcccgggcacacctcatgcctgtaatcccagcactctgggaggccaaggcagatgatcacctgaggtcaggagttctagaccagcctggctaacatggtgaaaccctgtatctgctaaaaatacaaaaattagccaggcgtggtggcgggctcctgtaatcccagctactttggaggcgaggcacgagaatcgcttgaacctgggaggcggagtttgcagtgagccgagatcacgccattgcactccagcctgggcgacagagcgagactgcgtctcaaaaaaaaaaaraaaagaaaaattatgtgaaatcatgtgatttgcctgggaaaacttgtttagatattgagctacttatgccttctagcctttatattaattgtatgtaatgttattaaatatatatatagttcatctttacatttggaaatgcccaacatttttttcatataagtccttaaacaagcgttcattttattttaaatctatacagtgaactggccaagatattttaagagggaactttaatatcccatttattgtttttataaccctggacttataaaaatgggttgtttgaagggttattttgaaagtgggggaaaaaaaaacttagttgctaatgtatctaaacttcagcagagctttttggtgatctcctacctgcaccctcaactcttgacaaagaagcaagactatagattcattttctgaaggggatcatgtatggaattttttgatgagtttttacttttacctctctactcttgattttctattattgaatactatctttttttcatgaactatcagaatatagtgaacacttttcaaatatttaaggacttaa

SEQ ID NO: 5824 - DNA, 5031 bp, Homo sapiens
gccagtcacttgcgggccggcgtcccgcagcccattcgcgccccgcccctgccccgccgcgggatgagtaacggttacgaagcactttctcggctacgatttctgcttagtcattgtcttccaggaaacagctccctcagtttggaatcagctctcccgctgcggccgcagtagccggagccggagccgcagccaccggtgccttcctttcccgccgccgcccagccgccgtccggcctccctcgggcccgagcgcagaccaggctccagccgcgcggcgccggcagcctcgcgctccctctcgggtctctctcgggcctcgggcaccgcgtcctgtggggcggccgcctgcctgcccgcccgcccgcagccccttcgctgckcggcccctgggcggccgctgccatgggcaccgacagccgcgcggccaaggcgctcctggcgcgggcccgcaccctgcacctgcagacggggaacctgctgaactggggccgcctgcggaagaagtgcccgtccacgcacagcgaggagcttcatgattgtatccaaaaaaccttgaatgaatggagttcccaaatcaacccagatttggtcagggagtttccagatgtcttggaatgmactgtatctcatgcagtagaaaagataaatcctgatgaaagagaagaaatgaaagtttctgcaaaactgttcattgtagaatcaaactcttcatcatcaactagaagtgcagttgacatggcctgttcagtccttggagttgmacagctggattctgtgatcattgcttcacctcctattgaagatggagttaatctttccttggagcatttacagccttactgggaggaattagaaaacttagttcagagcaaaaagattgttgccataggtacctctgatctagacaaaacacagttggaacagctgtatcagtgggcacaggtaaaaccaaatagtaaccaagttaatcttgcctcctgctgtgtgatgccaccagatttgactgcatttgctaaacaatttgacatacagctgttgactcacaatgatccaaaagaactgctttctgaagcaagtttccaagaagctcttcaggaaagcattcctgacattcaagcgcacgagtgggtgccrctgtggctactgcggtattcggtcattgtgaaaagtagaggaattatcaaatcaaaaggctacattttacaagctaaaagaaggggttcttaactgacttaggagcataacttacctgtaatttccttcaatatgagagaaaattgagatgtgtaaaaatctagttactgcctgtaaatggtgtcattgaggcagatattctttcgtcatatttgacagtatgttgtctgtcaagttttaaatacttatcttgcctccatatcaatccattctcatgaacctctgtattgctttccttaaactattgttttctaattgaaattgtctataaagaaaatacttgcaatatatttttcctttatttttatgactaatataaatcaagaaaatttgttgttagatatattttggcctaggtatcagggtaatgtatatacatattttttatttccaaaaaaaattcattaattgcttcttaactcttattataaccaagcaatttaattacaattgttaaaactgaaatactggaagaagatatttttcctgtcattgatgagatatatcagagtaactggagtagctgggatttactagtagtgtaaataaaattcactcttcaatacatgaatggaaacttaaatttttttttatgtgtccttgcttatagtttagctgtaataatttaaccttgtattcttgtgccatattctgtctttttattacttataaagacaaaccaaagtaaatctgaaaggagactagaagctttgaaattattgtttgggggttttataaaagcaactactgtcacctccatccagattcttttaaattattgatccatccatagtatatattgctactcattcaagaatcctcaataagtattgagtatttaccatatgttgggatactgtgggctctggagagaggagggggcaatagagctaggaattaagaatcagttgagtaaaatgtgtaatatttattccccattaataactgactaggaaggactaaaagccagaaaggggatgaaaaaaaaatccttaattcagggccracattatctacttaaacaactttgagatatggtcttaattattttaaagcagaataatataattgaaagtttatagctaaaagagactatataggtcatttagtataattcttcattagtttamgaaccacaaaattgcaaataaataagctatgaactttgatgtacactataaatctccttaattctataaatttgtgtctgtaacctgaatagtttgaaaacttctttaaaaatctcttgtatttcatccgggcgcagtggctcacacctgtaatcccagcactttgggaggccgaggtgggcagatcacgaggtcaggagtttgagaccagcctgaccaacatggtaaaaccccatctctactaaaatacaaaaattggctgggcgtggtggcactcgcctgtaatctcagctacttgggaggctgaggcaggagaatcgcttgaacccgggaggcggaggttacagtgagccgagatcacatcactgcactccagcctgggcgacagagcgagactccatctcaaaaaaaaaaaaaaaactcttgtatctcaatatttttaaaccacaggcctaaataaaactaattttgctcaagttttctcaacctagggaaaaagaactatggttccatattcaaaataaatattatagacccttttcctaagtaggattttgtggtttactgattgggtaatttgatcattaaaattatgtgaaatctgcccgggcacacctcatgcctgtaatcccagcactctgggaggccaaggcagatgatcacctgaggtcaggagttctagaccagcctggctaacatggtgaaaccctgtatctgctaaaaatacaaaaattagccaggcgtggtggcgggctcctgtaatcccagctactttggaggcgaggcacgagaatcgcttgaacctgggaggcggagtttgcagtgagccgagatcacgccattgcactccagcctgggcgacagagcgagactgcgtctcaaaaaaaaaaaraaaagaaaaattatgtgaaatcatgtgatttgcctgggaaaacttgtttagatattgagctacttatgccttctagcctttatattaattgtatgtaatgttattaaatatatatatagttcatctttacatttggaaatgcccaacatttttttcatataagtccttaaacaagcgttcattttattttaaatctatacagtgaactggccaagatattttaagagggaactttaatatcccatttattgtttttataaccctggacttataaaaatgggttgtttgaagggttattttgaaagtgggggaaaaaaaaacttagttgctaatgtatctaaacttcagcagagctttttggtgatctcctacctgcaccctcaactcttgacaaagaagcaagactatagattcattttctgaaggggatcatgtatggaattttttgatgagtttttacttttacctctctactcttgattttctattattgaatactcttttaaaacactgatttttaaggctttatatatgttttccaggctgatgttcacatctttttttcatgaactatcagaatatagtgaacacttttcaaatatttaaggacttaatgtttaaaaagccataaaatagagagtggtaatactaccaaataattacttaaaactgaaagctaagttatcaatagtttatataagagatgttttctgaggagatgtgcatccagtgagaccaaggtagaaagtttatataattgttttttttccagtaaatatgaaaaaaaaaagctgtagcttgtttattacatgtccaaaatacagtggagccttactttaacacaatgtactgtaacttggaatttgttctgttatgagtctatcttgaattcccatccatgaaactgtagtcaccaaaagcaacaagtattttcacatgatgtaaaagaccatactatgatggccattgctagaaattgaatcacaaataatagctaataatttttcatttttcaaaaaagatcatttggatagcagctatgtataaaatggaaaataaaaaattattctattttgcatgaatagttcagactttcccataccacagccaagcagtaactaaaattaggatcttaattttcaatgataaaaggtctaaggttcatttaattatgctcctttaacactgtctttctagatttttcacccagtattttcaaaatttgggaatrtaaacaattgatatatttattgtatgttggctagcagttcatccttctgcaaaatatgcattcagagaaatgtgaagcttgttttaatgaagacttaaaccatttgtgtcatttgtgttttcatattcaaatacaccaaattaaaattctgaacctatatttttcatcattaacttcctaatataccagaacatatacctttttcatgtaaagttggcaatgggatatggcagttttatttttgaaaaatatgtaacatgactttaatatttttatagttttcagaattagaaacataggaagggaaaatgttttaattagataagtcaactttttatgtgtctgtagtggtgtactataatagcaaattataaagcattattaaatgtttataataatttttaatattacctacattatgaatttaactaaaataaagtgtgagttgtatattttttaattgggttgtttcaatagctggaagcatcctgaagcattatattgatttttgaactatttgaactcaaactgagtatgatttgaaaataaattaataatttaaaaacatccaaatcataaag

SEQ ID NO: 5825 - DNA, 3718 bp, Homo sapiens
gccagtcacttgcgggccggcgtcccgcagcccattcgcgccccgcccctgccccgccgcgggatgagtaacggttacgaagcactttctcggctacgatttctgcttagtcattgtcttccaggaaacagctccctcagtttggaatcagctctcccgctgcggccgcagtagccggagccggagccgcagccaccggtgccttcctttcccgccgccgcccagccgccgtccggcctccctcgggcccgagcgcagaccaggctccagccgcgcggcgccggcagcctcgcgctccctctcgggtctctctcgggcctcgggcaccgcgtcctgtggggcggccgcctgcctgcccgcccgcccgcagccccttcgctgckcggcccctgggcggccgctgccatgggcaccgacagccgcgcggccaaggcgctcctggcgcgggcccgcaccctgcacctgcagacggggaacctgctgaactggggccgcctgcggaagaagtgcccgtccacgcacagcgaggagcttcatgattgtatccaaaaaaccttgaatgaatggagttcccaaatcaacccagatttggtcagggagtttccagatgtcttggaatgmactgtatctcatgcagtagaaaagataaatcctgatgaaagagaagaaatgaaagtttctgcctgttcagtccttggagttgmacagctggattctgtgatcattgcttcacctcctattgaagatggagttaatctttccttggagcatttacagccttactgggaggaattagaaaacttagttcagagcaaaaagattgttgccataggtacctctgatctagacaaaacacagttggaacagctgtatcagtgggcacaggtaaaaccaaatagtaaccaagttaatcttgcctcctgctgtgtgatgccaccagatttgactgcatttgctaaacaatttgacatacagctgttgactcacaatgatccaaaagaactgctttctgaagcaagtttccaagaagctcttcaggaaagcattcctgacattcaagcgcacgagtgggtgccrctgtggctactgcggtattcggtcattgtgaaaagtagaggaattatcaaatcaaaaggctacattttacaagctaaaagaaggggttcttaactgacttaggagcataacttacctgtaatttccttcaatatgagagaaaattgagatgtgtaaaaatctagttactgcctgtaaatggtgtcattgaggcagatattctttcgtcatatttgacagtatgttgtctgtcaagttttaaatacttatcttgcctccatatcaatccattctcatgaacctctgtattgctttccttaaactattgttttctaattgaaattgtctataaagaaaatacttgcaatatatttttcctttatttttatgactaatataaatcaagaaaatttgttgttagatatattttggcctaggtatcagggtaatgtatatacatattttttatttccaaaaaaaattcattaattgcttcttaactcttattataaccaagcaatttaattacaattgttaaaactgaaatactggaagaagatatttttcctgtcattgatgagatatatcagagtaactggagtagctgggatttactagtagtgtaaataaaattcactcttcaatacatgaatggaaacttaaatttttttttatgtgtccttgcttatagtttagctgtaataatttaaccttgtattcttgtgccatattctgtctttttattacttataaagacaaaccaaagtaaatctgaaaggagactagaagctttgaaattattgtttgggggttttataaaagcaactactgtcacctccatccagattcttttaaattattgatccatccatagtatatattgctactcattcaagaatcctcaataagtattgagtatttaccatatgttgggatactgtgggctctggagagaggagggggcaatagagctaggaattaagaatcagttgagtaaaatgtgtaatatttattccccattaataactgactaggaaggactaaaagccagaaaggggatgaaaaaaaaatccttaattcagggccracattatctacttaaacaactttgagatatggtcttaattattttaaagcagaataatataattgaaagtttatagctaaaagagactatataggtcatttagtataattcttcattagtttamgaaccacaaaattgcaaataaataagctatgaactttgatgtacactataaatctccttaattctataaatttgtgtctgtaacctgaatagtttgaaaacttctttaaaaatctcttgtatttcatccgggcgcagtggctcacacctgtaatcccagcactttgggaggccgaggtgggcagatcacgaggtcaggagtttgagaccagcctgaccaacatggtaaaaccccatctctactaaaatacaaaaattggctgggcgtggtggcactcgcctgtaatctcagctacttgggaggctgaggcaggagaatcgcttgaacccgggaggcggaggttacagtgagccgagatcacatcactgcactccagcctgggcgacagagcgagactccatctcaaaaaaaaaaaaaaaactcttgtatctcaatatttttaaaccacaggcctaaataaaactaattttgctcaagttttctcaacctagggaaaaagaactatggttccatattcaaaataaatattatagacccttttcctaagtaggattttgtggtttactgattgggtaatttgatcattaaaattatgtgaaatctgcccgggcacacctcatgcctgtaatcccagcactctgggaggccaaggcagatgatcacctgaggtcaggagttctagaccagcctggctaacatggtgaaaccctgtatctgctaaaaatacaaaaattagccaggcgtggtggcgggctcctgtaatcccagctactttggaggcgaggcacgagaatcgcttgaacctgggaggcggagtttgcagtgagccgagatcacgccattgcactccagcctgggcgacagagcgagactgcgtctcaaaaaaaaaaaraaaagaaaaattatgtgaaatcatgtgatttgcctgggaaaacttgtttagatattgagctacttatgccttctagcctttatattaattgtatgtaatgttattaaatatatatatagttcatctttacatttggaaatgcccaacatttttttcatataagtccttaaacaagcgttcattttattttaaatctatacagtgaactggccaagatattttaagagggaactttaatatcccatttattgtttttataaccctggacttataaaaatgggttgtttgaagggttattttgaaagtgggggaaaaaaaaacttagttgctaatgtatctaaacttcagcagagctttttggtgatctcctacctgcaccctcaactcttgacaaagaagcaagactatagattcattttctgaaggggatcatgtatggaattttttgatgagtttttacttttacctctctactcttgattttctattattgaatactatctttttttcatgaactatcagaatatagtgaacacttttcaaatatttaaggacttaa

SEQ ID NO: 5826 - DNA, 4971 bp, Homo sapiens
gccagtcacttgcgggccggcgtcccgcagcccattcgcgccccgcccctgccccgccgcgggatgagtaacggttacgaagcactttctcggctacgatttctgcttagtcattgtcttccaggaaacagctccctcagtttggaatcagctctcccgctgcggccgcagtagccggagccggagccgcagccaccggtgccttcctttcccgccgccgcccagccgccgtccggcctccctcgggcccgagcgcagaccaggctccagccgcgcggcgccggcagcctcgcgctccctctcgggtctctctcgggcctcgggcaccgcgtcctgtggggcggccgcctgcctgcccgcccgcccgcagccccttcgctgckcggcccctgggcggccgctgccatgggcaccgacagccgcgcggccaaggcgctcctggcgcgggcccgcaccctgcacctgcagacggggaacctgctgaactggggccgcctgcggaagaagtgcccgtccacgcacagcgaggagcttcatgattgtatccaaaaaaccttgaatgaatggagttcccaaatcaacccagatttggtcagggagtttccagatgtcttggaatgmactgtatctcatgcagtagaaaagataaatcctgatgaaagagaagaaatgaaagtttctgcctgttcagtccttggagttgmacagctggattctgtgatcattgcttcacctcctattgaagatggagttaatctttccttggagcatttacagccttactgggaggaattagaaaacttagttcagagcaaaaagattgttgccataggtacctctgatctagacaaaacacagttggaacagctgtatcagtgggcacaggtaaaaccaaatagtaaccaagttaatcttgcctcctgctgtgtgatgccaccagatttgactgcatttgctaaacaatttgacatacagctgttgactcacaatgatccaaaagaactgctttctgaagcaagtttccaagaagctcttcaggaaagcattcctgacattcaagcgcacgagtgggtgccrctgtggctactgcggtattcggtcattgtgaaaagtagaggaattatcaaatcaaaaggctacattttacaagctaaaagaaggggttcttaactgacttaggagcataacttacctgtaatttccttcaatatgagagaaaattgagatgtgtaaaaatctagttactgcctgtaaatggtgtcattgaggcagatattctttcgtcatatttgacagtatgttgtctgtcaagttttaaatacttatcttgcctccatatcaatccattctcatgaacctctgtattgctttccttaaactattgttttctaattgaaattgtctataaagaaaatacttgcaatatatttttcctttatttttatgactaatataaatcaagaaaatttgttgttagatatattttggcctaggtatcagggtaatgtatatacatattttttatttccaaaaaaaattcattaattgcttcttaactcttattataaccaagcaatttaattacaattgttaaaactgaaatactggaagaagatatttttcctgtcattgatgagatatatcagagtaactggagtagctgggatttactagtagtgtaaataaaattcactcttcaatacatgaatggaaacttaaatttttttttatgtgtccttgcttatagtttagctgtaataatttaaccttgtattcttgtgccatattctgtctttttattacttataaagacaaaccaaagtaaatctgaaaggagactagaagctttgaaattattgtttgggggttttataaaagcaactactgtcacctccatccagattcttttaaattattgatccatccatagtatatattgctactcattcaagaatcctcaataagtattgagtatttaccatatgttgggatactgtgggctctggagagaggagggggcaatagagctaggaattaagaatcagttgagtaaaatgtgtaatatttattccccattaataactgactaggaaggactaaaagccagaaaggggatgaaaaaaaaatccttaattcagggccracattatctacttaaacaactttgagatatggtcttaattattttaaagcagaataatataattgaaagtttatagctaaaagagactatataggtcatttagtataattcttcattagtttamgaaccacaaaattgcaaataaataagctatgaactttgatgtacactataaatctccttaattctataaatttgtgtctgtaacctgaatagtttgaaaacttctttaaaaatctcttgtatttcatccgggcgcagtggctcacacctgtaatcccagcactttgggaggccgaggtgggcagatcacgaggtcaggagtttgagaccagcctgaccaacatggtaaaaccccatctctactaaaatacaaaaattggctgggcgtggtggcactcgcctgtaatctcagctacttgggaggctgaggcaggagaatcgcttgaacccgggaggcggaggttacagtgagccgagatcacatcactgcactccagcctgggcgacagagcgagactccatctcaaaaaaaaaaaaaaaactcttgtatctcaatatttttaaaccacaggcctaaataaaactaattttgctcaagttttctcaacctagggaaaaagaactatggttccatattcaaaataaatattatagacccttttcctaagtaggattttgtggtttactgattgggtaatttgatcattaaaattatgtgaaatctgcccgggcacacctcatgcctgtaatcccagcactctgggaggccaaggcagatgatcacctgaggtcaggagttctagaccagcctggctaacatggtgaaaccctgtatctgctaaaaatacaaaaattagccaggcgtggtggcgggctcctgtaatcccagctactttggaggcgaggcacgagaatcgcttgaacctgggaggcggagtttgcagtgagccgagatcacgccattgcactccagcctgggcgacagagcgagactgcgtctcaaaaaaaaaaaraaaagaaaaattatgtgaaatcatgtgatttgcctgggaaaacttgtttagatattgagctacttatgccttctagcctttatattaattgtatgtaatgttattaaatatatatatagttcatctttacatttggaaatgcccaacatttttttcatataagtccttaaacaagcgttcattttattttaaatctatacagtgaactggccaagatattttaagagggaactttaatatcccatttattgtttttataaccctggacttataaaaatgggttgtttgaagggttattttgaaagtgggggaaaaaaaaacttagttgctaatgtatctaaacttcagcagagctttttggtgatctcctacctgcaccctcaactcttgacaaagaagcaagactatagattcattttctgaaggggatcatgtatggaattttttgatgagtttttacttttacctctctactcttgattttctattattgaatactcttttaaaacactgatttttaaggctttatatatgttttccaggctgatgttcacatctttttttcatgaactatcagaatatagtgaacacttttcaaatatttaaggacttaatgtttaaaaagccataaaatagagagtggtaatactaccaaataattacttaaaactgaaagctaagttatcaatagtttatataagagatgttttctgaggagatgtgcatccagtgagaccaaggtagaaagtttatataattgttttttttccagtaaatatgaaaaaaaaaagctgtagcttgtttattacatgtccaaaatacagtggagccttactttaacacaatgtactgtaacttggaatttgttctgttatgagtctatcttgaattcccatccatgaaactgtagtcaccaaaagcaacaagtattttcacatgatgtaaaagaccatactatgatggccattgctagaaattgaatcacaaataatagctaataatttttcatttttcaaaaaagatcatttggatagcagctatgtataaaatggaaaataaaaaattattctattttgcatgaatagttcagactttcccataccacagccaagcagtaactaaaattaggatcttaattttcaatgataaaaggtctaaggttcatttaattatgctcctttaacactgtctttctagatttttcacccagtattttcaaaatttgggaatrtaaacaattgatatatttattgtatgttggctagcagttcatccttctgcaaaatatgcattcagagaaatgtgaagcttgttttaatgaagacttaaaccatttgtgtcatttgtgttttcatattcaaatacaccaaattaaaattctgaacctatatttttcatcattaacttcctaatataccagaacatatacctttttcatgtaaagttggcaatgggatatggcagttttatttttgaaaaatatgtaacatgactttaatatttttatagttttcagaattagaaacataggaagggaaaatgttttaattagataagtcaactttttatgtgtctgtagtggtgtactataatagcaaattataaagcattattaaatgtttataataatttttaatattacctacattatgaatttaactaaaataaagtgtgagttgtatattttttaattgggttgtttcaatagctggaagcatcctgaagcattatattgatttttgaactatttgaactcaaactgagtatgatttgaaaataaattaataatttaaaaacatccaaatcataaag

SEQ ID NO: 5827 - DNA, 985 bp, Homo sapiens
atgatgaaagtgaaggccagagtaaatggatttggccatactgggcacctggtcaccacggctgcttttaactctggcaaagtggatatcatcaccatcaatgacctcaactacatggtctaccatggaatcacatggttccagtatgattccacccacagcaagttccactgcaccatcaaggctgaaaatggaaatcccatcaccatcttccaggagggagatcccaccaaaatcacacagggtgacgctggtgctgattatgttatggagtccactggcatcttcactaccatggagaaggctggggctcacttagagggtggagccaaaagggtcattacctctgccccctctgctgatgcccccacgttcgtgatgggcatgagccataagaagtataaaaacctcaagatcatcagcaatgcctcctgcaccaccagctgcctaacctcctggccaaggtcatccataataactctggcatcatgaagcgactcagcatcacagtccatgccatcactgctacccagaagactctcatggcccctctgggaaactgtggtgtgatggccatggggctctccattacatcatccctgcatgtgtctactggtgctgccaaggctgtgggcaaggtcatccccaagccgaacaggaagctcagtggtgtggccttccatgtacccactgccaatgtgtcagtcatggacctgacctgctctctggagaaaccagccaaatatgatgacatcaaggaggtggtgaagcggcatcggagggggccatcgggggcatcgtgggccacactgagcaccaggctgtctcctccaactttaacagtgacacccactmttccaccttcaacactggggctggcattgccctcaacggcctctttgtcaggctcgtttccgggtatgacaatgaatttggctacagcaacaaagtgataacctttatgatccacatggcttccaagaag

SEQ ID NO: 5828 - DNA, 2364 bp, Homo sapiens
ggcgcggcctgtggatgggcggtgagcgcmgcggcgtccgaggcaacaagatggcagctgcggagccgtctccgcggcgcgtgggcttcgtgggcgcgggccgcatggcgggggccatcgcgcagggcctcatcagagcaggaaaagtggaagctcagcacatactggccagtrcaccaacagacaggaacctatgtcactttcaagctctgggttgccrgaccacgcactccaaccaggaggtgctgcagagctgcctgctcgtcatctttgccaccaagcctcatgtgctgccagctgtcctggcagargtggctcctgtggtcaccactgaacacatcttggtgtccgtggctgctgggrtgtctctgagcaccctggaggagctgctgcccccaaacacacgggtgctgcgggtcttgcccaacctgccctgtgtggtccaggaaggggccatagtgatggcgcggggccgccacgtggggagcagcgagaccmasctcctgcagcatctgctggaggcctgtgggcggtgygaggaggtgcctgaagcctacgtcgacatccacactggcctcagtggcagtggcgtggccttcgtgtgtgcattctccgaggccctggctgaaggagccgtcaagatgggcatgcccagcagcctggcccaccgcatcgctgcccagaccctgctggggacggccaagatgctgctgcacgagggccaacacccagcccagctgcgctcagacgtgtgcaccccgggtggcaccaccatctatggactccacgccctggagcagggcgggctgcgagcagccaccatgagcgccgtggaggctgccayctgcmgggccaaggagctcagcagaaagtaggctgggctctggccatcctttcctgcctctgtgcccctgcctctccctgtgtcccttcccctgaggactgcggctccctccctcctgcatgagggtctcctactgctccttctccccttgcacagggaaatgcagggggcaggacttgrgaggttccagcaggcgggggagccccgaccagtggggacactcctccctccccagtgagcagaaggcaccgtggtggtggctctgccccttgctgcagtgagcccaccttgctgcaacattggttctgaggggcccaagagatggcgtcttggtcatttgcccgcatggttgggcagttggttgaggccatgaacagaacttacggtaacaggcacggctggcccaatgcctggtctggagctggagcttgcctttggctttccaggtggctccgtgcagctacagccaggccggctgcctcatctcagctctagggggcacgagccatatggggtctgcacaagagaccctctcccctgcagtaaagccaggggccctggcctgatggggcccccatggggagctggagcctgccctgcagcctggagaagagggtggctgtggtgggcgtgctcatcccctgctaaggagcaggagctgctgggccaggtctgcggcagtgctggggtggcaccaggtgggcagtgtgcctaggtcaggggtcctggaataccccgtagctctggcaccaccacactggcctctgatggcaagacttggcccctccacctgtccctaacggacggcaggtcaggaaagccaggactcaggggagaagcaaacccccaggattgaaggctagggttctagggcctttgggtggggagggcccgggccggacagcctcagctccgtcccctgccccacaagattcacctgggcctccagtcccacgctggccccaactgctgcagctctcggcttccgcccaacagcctctggaggtgaggcgggagcatgccctcagcgaggctgggcggcgggtcctgctgtgccatctccctgtgcgcctgagcagatcaatccaccagtgcaaaacagggctaacggcacctgcaggacagcagcacgctccatccctcatgctcagctgcctctgcggccacggacttctgcccttcatctgctctctcttactctcctgagcctagcccgtccgtaagctccctcccctgcytggttcccagggcaggctgactcagttgactgcttggtccaagcctggccctggcacttgtcagggtcagcctaaggagatgggaataaagaggccagagagcaccaagtgagctcatgtttcaccagaggtggataaaaccaagttctgggctgggcccagtggctcacatctgtaattccagcactttgggaggccgaggcgggcagatcacaaagtcaggagtttgagaccaacctgaccaacatggagaaaccccatctctactaaaaatacaaaatt

SEQ ID NO: 5829 - DNA, 426 bp, Homo sapiens
ggcgcggcctgtggatgggcggtgagcgcmgcggcgtccgaggcaacaagatggcagctgcggagccgtctccgcggcgcgtgggcttcgtgggcgcgggccgcatggcgggggccatcgcgcagggcctcatcagagcaggaaaagtggaagctcagcacatactggccagtrcaccaacagacaggaacctatgtcactttcaactctctcttactctcctgagcctagcccgtccgtaagctccctcccctgcytggttcccagggcaggctgactcagttgactgcttggtccaagcctggccctggcacttgtcagggtcagcctaaggagatgggaataaagaggccagagagcaccaagtgagctcatgtttcaccagaggtggataaaaccaagttctgggctgggcccagtggctca

SEQ ID NO: 5830 - DNA, 2515 bp, Homo sapiens
ggcgcggcctgtggatgggcggtgagcgcmgcggcgtccgaggcaacaagatggcagctgcggagccgtctccgcggcgcgtgggcttcgtgggcgcgggccgcatggcgggggccatcgcgcagggcctcatcagagcaggaaaagtggaagctcagcacatactggccagtrcaccaacagacaggaacctatgtcactttcaagctctgggttgccrgaccacgcactccaaccaggaggtgctgcagagctgcctgctcgtcatctttgccaccaagcctcatgtgctgccagctgtcctggcagargtggctcctgtggtcaccactgaacacatcttggtgtccgtggctgctgggrtgtctctgagcaccctggaggagctgctgcccccaaacacacgggtgctgcgggtcttgcccaacctgccctgtgtggtccaggaaggggccatagtgatggcgcggggccgccacgtggggagcagcgagaccmasctcctgcagcatctgctggaggcctgtgggcggtgygaggaggtgcctgaagcctacgtcgacatccacactggcctcagtggcagtggcgtggccttcgtgtgtgcattctccgaggccctggctgaaggagccgtcaagatgggcatgcccagcagcctggcccaccgcatcgctgcccagaccctgctggggacggccaagatgctgctgcacgagggccaacacccagcccagctgcgctcagacgtgtgcaccccgggtggcaccaccatctatggactccacgccctggagcagggcgggctgcgagcagccaccatgagcgccgtggaggctgccayctgcmgggccaaggagctcagcagaaagtaggctgggctctggccatcctttcctgcctctgtgcccctgcctctccctgtgtcccttcccctgaggactgcggctccctccctcctgcatgagggtctcctactgctccttctccccttgcacagggaaatgcagggggcaggacttgrgaggttccagcaggcgggggagccccgaccagtggggacactcctccctccccagtgagcagaaggcaccgtggtggtggctctgccccttgctgcagtgagcccaccttgctgcaacattggttctgaggggcccaagagatggcgtcttggtcatttgcccgcatggttgggcagttggttgaggccatgaacagaacttacggtaacaggcacggctggcccaatgcctggtctggagctggagcttgcctttggctttccaggtggctccgtgcagctacagccaggccggctgcctcatctcagctctagggggcacgagccatatggggtctgcacaagagaccctctcccctgcagtaaagccaggggccctggcctgatggggcccccatggggagctggagcctgccctgcagcctggagaagagggtggctgtggtgggcgtgctcatcccctgctaaggagcaggagctgctgggccaggtctgcggcagtgctggggtggcaccaggtgggcagtggtaggtggggtggcttgaggtctgggagggtggccctggccagccaggacacatgcagacccctggctttagtctggatacaggctccctctttcctcccratcctaagctcctgacaagtggccaggtggctctgggccctcctgccccgtgcctaggtcaggggtcctggaataccccgtagctctggcaccaccacactggcctctgatggcaagacttggcccctccacctgtccctaacggacggcaggtcaggaaagccaggactcaggggagaagcaaacccccaggattgaaggctagggttctagggcctttgggtggggagggcccgggccggacagcctcagctccgtcccctgccccacaagattcacctgggcctccagtcccacgctggccccaactgctgcagctctcggcttccgcccaacagcctctggaggtgaggcgggagcatgccctcagcgaggctgggcggcgggtcctgctgtgccatctccctgtgcgcctgagcagatcaatccaccagtgcaaaacagggctaacggcacctgcaggacagcagcacgctccatccctcatgctcagctgcctctgcggccacggacttctgcccttcatctgctctctcttactctcctgagcctagcccgtccgtaagctccctcccctgcytggttcccagggcaggctgactcagttgactgcttggtccaagcctggccctggcacttgtcagggtcagcctaaggagatgggaataaagaggccagagagcaccaagtgagctcatgtttcaccagaggtggataaaaccaagttctgggctgggcccagtggctcacatctgtaattccagcactttgggaggccgaggcgggcagatcacaaagtcaggagtttgagaccaacctgaccaacatggagaaaccccatctctactaaaaatacaaaatt

SEQ ID NO: 5831 - DNA, 2288 bp, Homo sapiens
gggccttcatagccacaaaaggtcttttggtgccagccgacagtgggcatgcgcccccctgccccacgccgccctttcctgggtgccaagctctttccaagcgacatttgcgtccatctgggctgcctcgtcctagcctggctgctcaagctctaactaaggcagcctctggcctccctccccaggcccagggcaggagctggctgctggccagcggttgtcttctgggtcggtgggggtggagtctggctggtctgtcctccaccctttccgcctcctggcaagtcctgagctgcacctcattgcccggccaaagggcagagacacgagcgactgggggcacctctggtgaccaagaccgggctgcgctccaaagaggccgttgggcctggagtggggttggggggtccgagaggagttgggtgacatcccccaccccatcccgggtccagctgtttcagcccctctcggcgcgccgatactattagccccacccgtcctccatcgagtcccgtgccgctcccaaacsgcacgataagccccacagggagtgcgccataggccggggcgcgtcacggggccgggkcgggscggagtccggacgtcgggagcaggatggcggcggagcaggaccccgaggcgcgcgcggcggcgcggccgctgctcactgacctctaccaggccaccatggcgttgggctattggcgcgcgggccgggcgcgggacgccgccgagttcgagctcttcttccgccgctgcccgttcggcggcgccttcgccttggymgccggcttgcgcgactgtgtgcgcttyctgcgcgccttccgcctgcgggacgccgacgtgcagttcctggcctcggtgctgcccccagacacggatcctgcgttcttcgagcaccttcgggcyctcgactgctccgaggtgacggtgcgagccctgcccgagggctccctcgccttccccggagtgccgctcctgcaggtgtccgggccgctcctggtggtgcagctgctggagacaccgctgctctgcctggtcagctacgccagcctggtggccaccaacgcagcgcggcttcgcttgatcgcagggccagagaagcggctgctagagatgggcctgaggcgggctcagggccccgatgggggcctgacagcctccacctacagctacctgggcggcttcgacagcagcagcaacgtgctagcgggccagctgcgaggtgtgccggtggccgggaccctggcccactccttcgtcacttccttttcaggcagcgaggtgccccctgacccgatgttggcgccagcagctggtgagggccctggggtggacctggcggccaaagcccaggtgtggctggagcaggtgtgtgcccacctggggctgggggtgcaggagccgcatccaggcgagcgggcagcctttgtggcctatgccttggcttttccccgggccttccagggcctcctggacacctacagcgtgtggaggagtggtctcccyaacttcctagcagtcgccytggccctgggagagctgggctaccgggcagtgggcgtgaggctggayagtggtgacctgctacagcaggctcaggagatcygcaaggtcttccgagctgctgcagcccagttccaggtgccctggctggagtcagtcctcatcgtagtcagcaacaacattgacgaggaggcgctggcccgactggcccaggagggcagtgaggtgaatgtcattggcattggcaccagtgtggtcacctgcccccaacagccttccctgggtggtgtctataagctggtggccgtggggggccagccacgaatgaagctgaccgaggaccccgagaagcagacgttgcctgggagcaaggctgctttccggctcctgggytctgacgggtctccactcatggacatgctgcagttagcagaagagccagtgccacaggctgggcaggagctgagggtgtggcctccaggggcccaggagccctgcaccgtgaggccagcccaggtggagccactactgcggctctgcctccagcagggacagctgtgtgagccgctcccatccctggcagagtctagagccttggcccagctgtccctgagccgactcagccctgagcacaggcggctgcggagccctgcacagtaccaggtggtgctgtccgagaggctgcaggccctggtgaacagtctgtgtgcggggcagtccccctgagactcggagcggggctgactggaaacaacasgaatcactcacttttccccacagct

SEQ ID NO: 5832 - DNA, 1611 bp, Homo sapiens
ctagcgccaaggttggcygtcaaggtagattccagggtgtggaagtggctttgtggtgccacctctaaccgctcggaggtcaacccccattctacaccgaaaactaggccttggctgctatggaaggacagcggcaagaaagccacgcaaccctaacactcgcccaggctcatttcaacaatggagagtacgcggaggccgaggcactgtactccgcttacattcgccggtgcgcttgcgcggcctcyagcgacgagagtcccgggaggtaactatcgcgagacctggggccgcggcgaccccgggtggaggcgacgttggggttgtttgggctcctatctttgcctctggagctcacggtcggcgcttgtyataacccagcactaggactgagcgggcggacgttcgtctttctagaaaggcctaggcgaggcctaggacgagggcggcggagaacgcggggagaagcccacccgtgaggagccagctgccgcgacggtgcggagagatttccgggaaccaagccctctgcgcgatcctcgggcgcgggccgccgcctctcaccccgccgtctctccttccacgttcctcattcgcacccagagacttaggacagataggaattttccactcgtgattttagctggcgggaaatccgcgacctgggaagggaaggggtcacggctgcgtagggccacagtaccgcgactcccatctcagtgtcacggcgcaggctcttggtggtgtttttcacttgtgaaaaacgtttaaatatgtggaagagagcataacgaacgtctaggtgtttatcacttggcttaagcattatcagtttacctattgtattcatccatggatgtttcagaaggaaccaccatgtcatcatcacatagttacttaatatcaagtcgtcagtgttggaaccattctgatcgactaataagcaaatgcagccctgaggatttggctactgcatataacaacagggggcaaatcaagtacttcagggttgatttttatgaagccatggatgactacacatctgccatagaagtccaacccaattttgaagttccatattacaacagagggttgatactgtataggctgggatattttgatgatgctttggaagatttcaagaaggtcttasacttaaatcctggatttcaagatgctactttgagcttaaaacagacyattctagacaaagaagaaaaacaaagaagaaatgttgcaaaaaattattgayatttttaacttaatggaagtattgattcatgatccttacatctgcatctagttatcagtaatttagatattgagctattttgatttatatttaagaaattaatacattagcactgaaagttaaatagtgtgtttaaggtagttaatttcaggttgaaygggttttttttaatgaagtgtaaataataccaatgtataagtgtatattattatattaaatattatagtaaaaaggaatgtgtggtattttcttcagcaaaactatttttgtgatttttttattctcaactttttatttaaaaaatgttacatctgcagaaaagttgaaagtataataaactcttcagttaaattcatgag

SEQ ID NO: 5833 - DNA, 949 bp, Homo sapiens
cataaggcacaaacctagcgccaaggttggcygtcaaggtagattccagggtgtggaagtggctttgtggtgccacctctaaccgctcggaggtcaacccccattctacaccgaaaactaggccttggctgctatggaaggacagcggcaagaaagccacgcaaccctaacactcgcccaggctcatttcaacaatggagagtacgcggaggccgaggcactgtactccgcttacattcgccggtgcgcttgcgcggcctcyagcgacgagagtcccgggagcaaatgcagccctgaggatttggctactgcatataacaacagggggcaaatcaagtacttcagggttgatttttatgaagccatggatgactacacatctgccatagaagtccaacccaattttgaagttccatattacaacagagggttgatactgtataggctgggatattttgatgatgctttggaagatttcaagaaggtcttasacttaaatcctggatttcaagatgctactttgagcttaaaacagacyattctagacaaagaagaaaaacaaagaagaaatgttgcaaaaaattattgayatttttaacttaatggaagtattgattcatgatccttacatctgcatctagttatcagtaatttagatattgagctattttgatttatatttaagaaattaatacattagcactgaaagttaaatagtgtgtttaaggtagttaatttcaggttgaaygggttttttttaatgaagtgtaaataataccaatgtataagtgtatattattatattaaatattatagtaaaaaggaatgtgtggtattttcttcagcaaaactatttttgtgatttttttattctcaactttttatttaaaaaatgttacatctgcagaaaagttgaaagtataataaactcttcagttaaattcatgag

SEQ ID NO: 5834 - DNA, 5003 bp, Homo sapiens
cgcgcagcatgcccgccagcgccccgccgcgccgcccgcggccgccgccgcmgtcgctgtcgctgctgctggtgctgctgggcctgggcggccgccgcctgcgtgcggagccgggcgacggcgcgcagacctgggcccgtktctcgcggcctcctgcccccgaggccgcgggcctcttccagggcaccttccccgacggcttcctctgggccgtgggcagcgccgcctaccagaccgagggcggctggcagcagcacggcaagggtgcgtccatctgggayacgttcacccaccaccccctggcacccccgggagactcccggaacgccagtckgccgttgggcgccccgtcgccgctgcagcccgccaccggggacgtagccagcgacagctacaacaacgtcttccgcgacacggaggcgctgcgcgagctcggggtcactcactaccgcttctccatctcgtgggcgcgagtgctccccaatggcagcgcgggcgtccccaaccgcgaggggctgcgctactaccggcgcctgctggagcggctgcgggagctgggcgtgcagcccgtggtcaccctgtaccactgggacctgccccagcgcctgcaggacgcctacggcggctgggccaaccgcgccctggccgaccacttcagggattacgcggagctctgcttccgccacttcggcggtcaggtcaagtactggatcaccatcgacaacccctacgtggtggcctggcacggctacgccaccgggcgcctggcccccggcatccggggcagcccgcggctcgggtacctggtggcgcacaacctcctcctggctcatgccaaagtctggcatctctacaatacttctttccgtcccactcagggaggtcaggtgtccattgccctaagctctcactggatcaatcctcgaagaatgaccgaccacagcatcaaagaatgtcaaaaatctctggactttgtactaggttggtttgccaaacccgtatttattgatggtgactatcccgagagcatgaagaataacctttcatctattctgcctgatkttactgaatctgagaaaaagttcatcaaaggaactgctgacttttttgctctttsctttggacccaccttgagttttcaacttttggaccctcacatgaarttccgccaattggaatctcccaacctgaggcaactgctttcctggattgaccttgaatttaaccatcctcaaatatttattgtggaaaatggctggtttgtctcagggaccaccaagagagatgatgccaaatatatgtattacctcaaaaagttcatcatggaaaccttaaaagccatcaagctggatggggtggatgtcatcgggtataccgcatggtccctcatggatggtttcgagtggcacagaggttacagcatcaggcgtggactcttctatgttgactttctaagccaggacaagatgttgttgccaaagtcttcagccttgttctaccaaaagctgatagagaaaaatggcttccctcctttacctgaaaatcagyccctagaagggacatttccctgtgactttgcttggggagttgttgacaactayattcaagtagataccactctgtctcagtttaccgacctgaatgyttacctgtgggatgtccaccacagtaaaaggcttattaaagtggatggggttgtgaccaagaagaggaaatcctactgtgttgactttgctgccatccagccccagatcgctttactccaggaaatgcaygttacacattttcgcttctccctggactgggccctgattctccctctgggtaaccagtcccaggtgaaccacaccatcctgcagtactatygctgcatggccagcgagcttgtccgtgtcaacatcaccccagtggtggccctgtggcagcctatggccccgaaccaaggactgccgcgcctcctggccaggcagggcgcctgggagaacccctacactgccctggcctttgcagagtatgcccgactgtgctttcaagagctcggccatcacgtcaagctttggataacgatgaatgagccgtatacaaggaatatgacatacagtgctggccacaaccttctgaaggcccatgccctggcttggcatgtgtacaatgaaaagtttaggcatgctcagaatgggaaaatatccatagccttgcaggctgattggatagaacctgcctgccctttctcccaaaaggacaaagaggtggcyragagagttttggaatttgacattggctggctggctgagcccattttcggctctggagattatccatgggtgatgagggactggctgaaccaaagaaacaattttcttcttccttatttcactgaagatgaaaaaaagctaatccagggtacctttgactttttggctttaagccattataccaccatccttgtagactcagaaaaagaagatccaataaaatacaatgattacctagaagtgcaagaaatgaccgacatcacrtggctcaactcccccagtcaggtggcggtagtgccctgggggttgcgcaaagtgctgaactggctgaagttcaagtacggagacctccccatgtacataatatccaayggaatcgatgacgggctgcatgctgaggacgaccagctgagggtgtattatatgcagaattacataaacgaagctctcaaagcccacatactggatggtatcaatctttgcggatactttgcttattcgtttaacgaccgcacagctccgaggtttggcctctatcgttatgctgcagatcagtttgagcccaaggcatccatgaaacattacaggaaaattattgacagcaatggtttcccgggcccagaaactctggaaagattttgtccagaagaattcaccgtgtgtactgagtgcagtttttttcacacccgaaagtctttactggctttcatagcttttctattttttgcttctattatttctctctcccttatattttactrctcgaagaaaggcagaagaagttacaaatagttctgaacatttttctattcattcattttgaaataattatgcagacacatcagctgttaaccatttgcacctctaagtgttgtgaaactgtaaatttcatacatttgacttctagaaaacatttttgtggcttatgacagaggttttgaaatgggcataggtgatcgtaaaatattgaataatgcgaatagtgcctgaatttgttctctttttgggtgattaaaaaactgacaggcactataatttctgtaacacactaacaaaagcatgaaaaataggaaccacaccaatgcaacatttgtgcagaaatttgaatgacaagattaggaatattttcttctgcacccacttctaaatttaatgtttttctggaagtagtaattgcaagagttcgaatagaaagttatgtaccaagtaaccatttctcagctgccataataatgcctagtggcttcccctctgtcaaatctagtttcctatggaaaagaagatggcagatacaggagagacgacagagggtcctaggctggaatgttcctttcgaaagcaatgcttctatcaaatactagtattaatttatgtatctggttaatgacatacttggagagcaaattatggaaatgtgtattttatatgatttttgaggtcctgtctaaaccctgtgtccctgagggatctgtctcactggcatcttgttgagggccttgcacataggaaacttttgataagtatctgcggaaaaacaaacatgaatcctgtgatattgggctcttcaggaagcataaagcaattgtgaaatacagtataccgcagtggctctaggtggaggaaaggaggaaaaagtgcttattatgtgcaacattatgattaatctgattatacaccatttttgagcagatcttggaatgaatgacatgacctttccctagagaataaggatgaaataatcactcattctatgaacagtgacactactttctattctttagctgtactgtaatttctttgagttgatagttttacaaattcttaataggttcaaaagcaatctggtctgaataacactggatttgtttctgtgatctctgaggtctattttatgtttttgctgctacttctgtggaagtagctttgaactagttttactttgaactttcacgctgaaacatgctagtgatatctagaaagggctaattaggtctcatcctttaatgccccttaaataagtcttgctgattttcagacagggaagtctctctattacactggagctgttttatagataagtcaatattgtatcaggcaagataaaccaatgtcataacaggcattgccaacctcactgacacagggtcatagtgtataataatatactgtactatataatatatcatctttagaggtatgattttttcatgaaagataagcttttggtaatattcattttaaagtggacttattaaaattggatgctagagaatcaagtttattttatgtatatatttttctgattataagagtaatatatgttcattgtaaaaatttttaaaacacagaaactatatgcaaagaaaaaataaaaattatctataatctcagaacccagaaatagccactattaacatttcctacgtattttattttacatagatcatattgtatatagttagtatctttattaatttttattatgaaactttcctttgtcattattagtcttcaaaagcatgatttttaatagttgttgagtattccaccacaggaatgtatcacaacttaaccgttcccgtttgttagactagtttcttattaatgttgatgaatgttgtttaaaaataattttgttgctacatttactttaatttccttgactgtaaagagaagtaattttgctccttgataaagtattatattaataataaatctgcctgcaactttttgccttctttcataatc

SEQ ID NO: 5835 - DNA, 1655 bp, Homo sapiens
cgcgcagcatgcccgccagcgccccgccgcgccgcccgcggccgccgccgcmgtcgctgtcgctgctgctggtgctgctgggcctgggcggccgccgcctgcgtgcggagccgggcgacggcgcgcagacctgggcccgtktctcgcggcctcctgcccccgaggccgcgggcctcttccagggcaccttccccgacggcttcctctgggccgtgggcagcgccgcctaccagaccgagggcggctggcagcagcacggcaagggtgcgtccatctgggayacgttcacccaccaccccctggcacccccgggagactcccggaacgccagtckgccgttgggcgccccgtcgccgctgcagcccgccaccggggacgtagccagcgacagctacaacaacgtcttccgcgacacggaggcgctgcgcgagctcggggtcactcactaccgcttctccatctcgtgggcgcgagtgctccccaatggcagcgcgggcgtccccaaccgcgaggggctgcgctactaccggcgcctgctggagcggctgcgggagctgggcgtgcagcccgtggtcaccctgtaccactgggacctgccccagcgcctgcaggacgcctacggcggctgggccaaccgcgccctggccgaccacttcagggattacgcggagctctgcttccgccacttcggcggtcaggtcaagtactggatcaccatcgacaacccctacgtggtggcctggcacggctacgccaccgggcgcctggcccccggcatccggggcagcccgcggctcgggtacctggtggcgcacaacctcctcctggctcatgccaaagtctggcatctctacaatacttctttccgtcccactcagggaggtcaggtgtccattgccctaagctctcactggatcaatcctcgaagaatgaccgaccacagcatcaaagaatgtcaaaaatctctggactttgtactaggttggtttgccaaacccgtatttattgatggtgactatcccgagagcatgaagaataacctttcatctattctgcctgatkttactgaatctgagaaaaagttcatcaaaggaactgctgacttttttgctctttsctttggacccaccttgagttttcaacttttggaccctcacatgaarttccgccaattggaatctcccaacctgaggcaactgctttcctggattgaccttgaatttaaccatcctcaaatatttattgtggaaaatggctggtttgtctcagggaccaccaagagagatgatgccaaatatatgtattacctcaaaaagttcatcatggaaaccttaaaagccatcaagctggatggggtggatgtcatcgggtataccgcatggtccctcatggatggtttcgagtggcacagaggttacagcatcaggcgtggactcttctatgttgactttctaagccaggacaagatgttgttgccaaagtcttcagccttgttctaccaaaagctgatagagaaaaatggcttccctcctttacctgaaaatcagyccctagaagggacatttccctgtgactttgcttggggagttgttgacaactayattcaagtaagtcagctgacaaaaccaatcagcagtctcaccaagccctatcac

SEQ ID NO: 5836 - DNA, 8040 bp, Homo sapiens
gggaatggaaagggaagaacctccggggttaggcgtattctagattgacgccttttgctggaagagcgctgctggggttaggattctgcgcggcgaggcaagatgctcaagtccaagacgttcttaaaaaagacccgggcgggcggcgtgatgaagatcgtgcgcgagcactacctgcgagacgacatcggctgcggtgcgcccgggtgcgcagcgtgtggaggggcgcacgaggggccggccctggagccgcagccccaggacccggcgagcagcgtctgcccgcaaccgcactacttgctgcccgacactaatgtgttactgcaccagattgatgttcttgaggaccctgccatcaggaatgtaattgtgctacaaacagttcttcaagaagtgagaaatcgcagtgcccccgtatataaacgcatccgagatgtgactaataaccaagagaagcatttctatactttcactaatgagcaccatagagaaacctatgtagaacaagaacagggagaaaatgctaatgacaggaatgatagagcgattcgagtagcagcaaaatggtacaatgaacatttgaaaaaaatgtcagcagacaaccagctgcaagttatcttcataacaaatgacaggagaaacaaagagaaagccatagaagaaggaataccagctttcacttgtgaagaatatgtaaagagcctaactgctaaccccgaactcatagatcgtcttgcttgtttgtctgaagaagggaatgaaatagaaagtggaaaaataatattttcagagcatcttcccttaagtaagctacagcaaggcataaaatctggtacataccttcaaggaacatttagagctagcagggaaaattacttggaagctacagtatggattcatggcgacartgaagaaaataaagagataatcttacagggacttaaacatttaaacagagctgttcacgaagatattgtggctgtggagcttctccccaagagtcagtgggtagcaccatcttctgtggttttacatgatgaaggtcaaaatgaagaagatgtggagaaagaagaagagasagaacgaatgcttaagactgctgtaagcgagaaaatgttgaagcctacaggtagagttgtaggaataataaaaaggaattggagaccatattgtggcatgctttccaagtctgacattaaggagtcaagaagacatctctttacacctgctgataagagaatccctcgaattcgcatagaaaccagacaggcttccacattagaaggacggagaattattgttgctattgatggttggcccagaaattccagatatccaaatggacactttgtgagaaatttaggtgatgttggagagaaagagactgaaacagaagttttgttacttgaacacratgttccccatcagcctttttcacaggctgttcttagttttctgccaaagatgccctggagcattactgaaaaggacatgaaaaaccgagaagacctgaggcatctgtgtatttgtagtgtagacccaccaggatgtactgatatagacgatgctctacattgtcgagaactcgaaaatggaaatttggaggttggtgttcatattgctgatgtgagccattttattaggccaggaaatgccktggatcaagaatcagccagaagaggaacaactgtgtatctttgtgaaaagaggattgacatggttccagagttgcttagctctaacttgtgttccttaaaatgtgacgtggacaggctggcattttcatgtatttgggaaatgaatcacaatgctgaaatcttaaaaacgaagtttaccaaaagtgttattaattcaaaggcatctctgacrtatgctgaagctcagttgagaattgattcagcaaacatgaatgatgatattaccactagtctccgtggactgaataaactagccaaaattctgaagaaaagaaggattgaaaaaggggctttgactctatcctctyctgaagttcgattccacatggacagtgaaactcacgatcctatagatctgcagaccaaggaacttagggaaacaaattccatggttgaagaatttatgttacttgccaatatttctgttgcaaaaaaaattcatgaggaattttctgaacatgctctgcttcgaaaacatcctgctccacctccatcaaattatgaaattcttgttaaggcagccaggtcaaggaatttggaaattaagactgatacagccaagtctttggctgagtctttggatcaggccgaatctcctacttttccatatctaaacactctgttgagaatattagccactcgctgtatgatgcaagctgtgtacttctgttctggaatggataatgattttcatcactatggcttagcgtctccaatatacacacattttacttcacccattagaagatacgcagatgtcattgttcatcggcttttggctgtggctattggggctgactgtacttatccagagttgacagacaaacacaagcttgcagatatatgtaaaaatctaaatttccggcacaaaatggctcaatatgcccaacgtgcatcagtggcttttcatacccagttattcttcaaaagcaaaggartagtaagtgaagaagcctatattttatttgtaagaaagaatgccattgtggtattaattccaaagtatggtttagaagggacagtcttttttgaagaaaaggacaaaccaaacccacagcttatttatgatgatgagataccctcacttaaaatagaagatacagtgttccatgtatttgataaagttaaagtgaaaatcatgttagactcatctaatcttcaacatcagaagatccgaatgtccctggtagaaccacagataccaggaataagcattcctactgatacttcaaacatggaccttaatggaccaaagaaaaagaagatgaagcttggaaaatagctatattcaacaaaaatcttcaaagactggtttcttttttaaaagaaaaaacttgaaagaacacttctaagcctragtgtgtgatacagtttgttacttttaagtacattttaataatttcagacatctgcatttttattgaacagttgactgtatctgacccatcatactactatacttstgggttgaacagaattatttatgcagaataattcaattgaatatccatcacttaaatacagtgacaggacagcaacttcagggatctgtaaagatcatttaaatggagtgctcatctcattgaggagcagattaattttgcgtaagtactttgattatttaatatttgtaagaaaaaactttcattttcctacagaggaaaatagaacaattttagaagcaaggaacaatctcttttctaagtcttggaagctgtcagtgttgaggatgtaatctcctttgccatctttaattcacctaacttacactaggtgttctcttactgtctttaaaagcttcctgtattttattagtggtccttgaaaaactgtgaatgtttgggawttggtagaaaggcaaaaagtaggatattttgacctgactggaaagatggttgtgtttttattgccaggtaataagtgtgatcattgttgaacttcagctccagtgtctctccagaataagacattggcattcaaatgtctatatcttgttacttacaaaataaaaaacagattaattagtggcttttaaattgtagttatatcagtgtatatacacgaggggaactgtataaagacatactaaagggaacagattaaaataagtattattaataaaatttggtgtgccagactgactacttcccttgctaatcacagagattagtaatgattaaattaatatcttcaggaatattttgggatagggttgccttaaaacattttacttggcttattcaatttctaaagcacttacgttgtgccaggttccactcaagtaaaytatctctgccttcaaggagcttgcagtatagtgagaaaagcctgccaagtaaatcagcaggtatactaaataggtagtcatttaggcactcaataaatgttgactaatttttccagtttcctattactgaggaaaacctccatacactgaggcagaaacttgtgtcagttggaggaaaatagacttgagtagtctttggtccaggtaaaatgggtcagtgacactgaaacagtagagtaggagtcaaaaaaccttttctgtgaagtgctagaacattttagactttgttggctatggtctgtattgcaactatagtacacaactctgccgttgatagtgtgtaaggagccatatacaatatgtaaacaaatcaacatgactgtgtttcaacaaggcctgatttgttaagtttcatatatagtcatatgtcacttaatgacagggatatgttctgagacatgtcacttggcaatttcatcattgtgtgaaaatcatgatgtagttacacaaacctagatggtataccctatggtatcctatatgggatagcctattgctcctaacctacaaacctgtatggcatattactgtactgattactgtaggcagttgtaacacagtgctaagtatttgtgtatctaaacatatctaaacatagmaaaggtacagtaaaaatatatatatagatatatataagatataaaatggtacacctatttaggacatttaccatgaacaagttggcaggactggaagctggctctgggtgagtcagtaagtggttagtgaatgtgaaggccatgatattactgtgcactactgtagacttttataaacactatatacttaggctacataaagtaatttcactatgatgttaccatggctgtgtccccaggcaataggaatttttcagctccattgtaatcttacgggatcatcatcgtatatttggccattgttgaccaaaagttatgcagcacrtcattataattttgatgtgtcacaaaacattactcatttgatttcccccacccccgccaaccatttaaaaaagtttgccggctaggtgcggtggctcatgcctgtaatcctagcattttgggaggacgaggcgggtggatcactcgatgtcaggagtttgagaccagcctggccaacatggtaaaacgccgtctctactaaaaatacaaaaacttagctgggtgtaacggcggatgcctgtaatcccagctacttgggaggctgaggcaggagaatcgcttgaacctgggaggcggaagttgcagtgagccgagattgcaccactgcagttcagcctggatgatgagagtgagactccatcgcaaaaaaaaaaaaaaaaaaagaaaagaaaattagccaggtgtggtggcaagtgcctttaatcccacctcaggaggctgaggcaggagaatcgcttgaacctgggaggcagaggttgcagtgagccaagatcgcgccactgcactccagcctgggtgacagaacaagactgtctcaaaaaaaaaaaaaaagaagaaaaactgcctacaggccatagttaacctgcaatagagaagaaagggaagtagggcagtgcatgactggccttaggttttttctttccaagtttattttcttgtgcttcagctactagaaaggtttaattcagggataagtcccaattgagtagttcaagatgatcagagactttgctattttcccctaagttctattccataatctaaaatgttctgtttctagtgccagttcttatgctaagcaggttacgtggaatatatcacttaactcaaaaagccctgttaagccaggactgttatctccatttaacagatgagaaaatggaggtttatggtctgttctcacactgctacgaagaaataccccaaactgggtaattattataaaggaaagaggtttaatggactcagttccgcattgctggtgaggcctcaggacacttatacaatcatggcagaaaaaggagaagcaggcacctttttcacagggcggcaggatgaaaatgactgccagcagtggaaatgccagacgcttataaaaccttcagatctcatgagaccggctcactatcacaggaacagcatggaggaaaccgcccccatgatccagttacctccacctggtcccacccttgacacgtggggattgctacaattcaaggttagatttgggtgaggacacagagccataccatatcagcccagatcaagtagtgacagagtagggatttgaatacaggttatagtcactattgtgttatttcttgacttttgtactattaaaaaactgtagccagtgaggcttctacccttagtacccagaactccttttaggtatagcaattgtttttaggtaaatttatattgagtttaacacctgtgtgattaaagacaactttccaatgtagtatctgtagccatgtcccctaatggctattagtgttcatggttagtgtgttgaagatgagccaggtacataacgcggcacattttctgcaggtcagcagtaaggtttcaaggtacagttatggaggaaagaagaaaatgacacattgataacacaggtctttattcccttttgaatgagacagtttttaaaagttgatttataaatacaaaaatacattctccaaagatagtatttccaaactgttatatacccatctactcccaacatggatataagttttttaaaaaaatagttgtatataacatacatatctgccccagtgttacttcacaggcctatgccctacgggaactccactctcccagccccactttttctcttggttctcccacattcttattctcccacatccctacccacgtttgagctggaaaggatgtccctaccctaggcatgaggtatattttattctgggcaccacacatttgccccatagataacaatacacgtgatgatgtcactagtactacctttctagtatttacatacttaaaagtagtaactagaacagttatcactggaactaagaattttccccacagaggtgaacagaccaagaactaaaatttcaggaaacctgtttaatttcttttgtatctttgaaaagttagttttatatctaagatttcttcacataggttataattcatctgtatgttcaagcttttatgtaaaaatatatagtgccttcagttttaacatagtttcacatgttctcagaactgctaaattcagtgctaccagtaaggcttaataagtagttcattgaccctgtaagataggagcactcagctctgtcacaatttgttgttaaacacatcactcaatgtaagtataaaaatatttattgataaaaaataaacttataattcagcaacttgaagttccaggagcatttctgttgttcctatgtcagtaagcccttgatttttcacattaaggagggaaagctaagcatgttacttgaagtaattttttcccagtcaccatcatgttgatcctgtgcacaacgatatatgcgaggaactcttaagcttagtctttgattctgacagaggyattctatggactgctgcattgaaaagggcttgctgttttcatccaacacctctgtgttgtgtggtcttgctgtgaaaaagaagacaataccttgttttcagtttaagtaggaccactggaggatgcaattatcgggactgtttttaaaacctaaaagcacgtttctttagctgaactctgaagggacagtaaagatacagtattttataaatcaatattctgcatcaaaaagcatcccaacactttgagaggccaaggtgggaggatcgcacgagcccaggagtttgggactagccctggcaacatagtgagaccctgtctctaccaaaaattttaaaaagctgggtgtggtggcacatgcctgtagccctagctactcaggaggctgaggtggtaagactgcttgagtctgggaggtgaaggctacagtgagctgtggtcgtgccactacactctagcctgggtgacagaatgagaccttgtctc

SEQ ID NO: 5837 - DNA, 8117 bp, Homo sapiens
acgytgtgaggtggcgtccagaaggaagccccgcctaggccacgggcggaaatggctcctcgccttgctttgccgcccctccccactctcgcccaatccccgcggccgtcagagagccaaccaatgtttatctcggcattttcccgcgagaagtgttactaatatccgggaatggaaagggaagaacctccggggttaggcgtattctagattgacgccttttgctggaagagcgctgctggggttaggattctgcgcggcgaggcaagatgctcaagtccaagacgttcttaaaaaagacccgggcgggcggcgtgatgaagatcgtgcgcgagcactacctgcgagacgacatcggctgcggtgcgcccgggtgcgcagcgtgtggaggggcgcacgaggggccggccctggagccgcagccccaggacccggcgagcagcgtctgcccgcaaccgcactacttgctgcccgacactaatgtgttactgcaccagattgtaagtgcctggaggccggggacctgggcttctgtggcctccagcctgcgactcccaggcagcttagaaacctatgtagaacaagaacagggagaaaatgctaatgacaggaatgatagagcgattcgagtagcagcaaaatggtacaatgaacatttgaaaaaaatgtcagcagacaaccagctgcaagttatcttcataacaaatgacaggagaaacaaagagaaagccatagaagaaggaataccagctttcacttgtgaagaatatgtaaagagcctaactgctaaccccgaactcatagatcgtcttgcttgtttgtctgaagaagggaatgaaatagaaagtggaaaaataatattttcagagcatcttcccttaagtaagctacagcaaggcataaaatctggtacataccttcaaggaacatttagagctagcagggaaaattacttggaagctacagtatggattcatggcgacartgaagaaaataaagagataatcttacagggacttaaacatttaaacagagctgttcacgaagatattgtggctgtggagcttctccccaagagtcagtgggtagcaccatcttctgtggttttacatgatgaaggtcaaaatgaagaagatgtggagaaagaagaagagasagaacgaatgcttaagactgctgtaagcgagaaaatgttgaagcctacaggtagagttgtaggaataataaaaaggaattggagaccatattgtggcatgctttccaagtctgacattaaggagtcaagaagacatctctttacacctgctgataagagaatccctcgaattcgcatagaaaccagacaggcttccacattagaaggacggagaattattgttgctattgatggttggcccagaaattccagatatccaaatggacactttgtgagaaatttaggtgatgttggagagaaagagactgaaacagaagttttgttacttgaacacratgttccccatcagcctttttcacaggctgttcttagttttctgccaaagatgccctggagcattactgaaaaggacatgaaaaaccgagaagacctgaggcatctgtgtatttgtagtgtagacccaccaggatgtactgatatagacgatgctctacattgtcgagaactcgaaaatggaaatttggaggttggtgttcatattgctgatgtgagccattttattaggccaggaaatgccktggatcaagaatcagccagaagaggaacaactgtgtatctttgtgaaaagaggattgacatggttccagagttgcttagctctaacttgtgttccttaaaatgtgacgtggacaggctggcattttcatgtatttgggaaatgaatcacaatgctgaaatcttaaaaacgaagtttaccaaaagtgttattaattcaaaggcatctctgacrtatgctgaagctcagttgagaattgattcagcaaacatgaatgatgatattaccactagtctccgtggactgaataaactagccaaaattctgaagaaaagaaggattgaaaaaggggctttgactctatcctctyctgaagttcgattccacatggacagtgaaactcacgatcctatagatctgcagaccaaggaacttagggaaacaaattccatggttgaagaatttatgttacttgccaatatttctgttgcaaaaaaaattcatgaggaattttctgaacatgctctgcttcgaaaacatcctgctccacctccatcaaattatgaaattcttgttaaggcagccaggtcaaggaatttggaaattaagactgatacagccaagtctttggctgagtctttggatcaggccgaatctcctacttttccatatctaaacactctgttgagaatattagccactcgctgtatgatgcaagctgtgtacttctgttctggaatggataatgattttcatcactatggcttagcgtctccaatatacacacattttacttcacccattagaagatacgcagatgtcattgttcatcggcttttggctgtggctattggggctgactgtacttatccagagttgacagacaaacacaagcttgcagatatatgtaaaaatctaaatttccggcacaaaatggctcaatatgcccaacgtgcatcagtggcttttcatacccagttattcttcaaaagcaaaggartagtaagtgaagaagcctatattttatttgtaagaaagaatgccattgtggtattaattccaaagtatggtttagaagggacagtcttttttgaagaaaaggacaaaccaaacccacagcttatttatgatgatgagataccctcacttaaaatagaagatacagtgttccatgtatttgataaagttaaagtgaaaatcatgttagactcatctaatcttcaacatcagaagatccgaatgtccctggtagaaccacagataccaggaataagcattcctactgatacttcaaacatggaccttaatggaccaaagaaaaagaagatgaagcttggaaaatagctatattcaacaaaaatcttcaaagactggtttcttttttaaaagaaaaaacttgaaagaacacttctaagcctragtgtgtgatacagtttgttacttttaagtacattttaataatttcagacatctgcatttttattgaacagttgactgtatctgacccatcatactactatacttstgggttgaacagaattatttatgcagaataattcaattgaatatccatcacttaaatacagtgacaggacagcaacttcagggatctgtaaagatcatttaaatggagtgctcatctcattgaggagcagattaattttgcgtaagtactttgattatttaatatttgtaagaaaaaactttcattttcctacagaggaaaatagaacaattttagaagcaaggaacaatctcttttctaagtcttggaagctgtcagtgttgaggatgtaatctcctttgccatctttaattcacctaacttacactaggtgttctcttactgtctttaaaagcttcctgtattttattagtggtccttgaaaaactgtgaatgtttgggawttggtagaaaggcaaaaagtaggatattttgacctgactggaaagatggttgtgtttttattgccaggtaataagtgtgatcattgttgaacttcagctccagtgtctctccagaataagacattggcattcaaatgtctatatcttgttacttacaaaataaaaaacagattaattagtggcttttaaattgtagttatatcagtgtatatacacgaggggaactgtataaagacatactaaagggaacagattaaaataagtattattaataaaatttggtgtgccagactgactacttcccttgctaatcacagagattagtaatgattaaattaatatcttcaggaatattttgggatagggttgccttaaaacattttacttggcttattcaatttctaaagcacttacgttgtgccaggttccactcaagtaaaytatctctgccttcaaggagcttgcagtatagtgagaaaagcctgccaagtaaatcagcaggtatactaaataggtagtcatttaggcactcaataaatgttgactaatttttccagtttcctattactgaggaaaacctccatacactgaggcagaaacttgtgtcagttggaggaaaatagacttgagtagtctttggtccaggtaaaatgggtcagtgacactgaaacagtagagtaggagtcaaaaaaccttttctgtgaagtgctagaacattttagactttgttggctatggtctgtattgcaactatagtacacaactctgccgttgatagtgtgtaaggagccatatacaatatgtaaacaaatcaacatgactgtgtttcaacaaggcctgatttgttaagtttcatatatagtcatatgtcacttaatgacagggatatgttctgagacatgtcacttggcaatttcatcattgtgtgaaaatcatgatgtagttacacaaacctagatggtataccctatggtatcctatatgggatagcctattgctcctaacctacaaacctgtatggcatattactgtactgattactgtaggcagttgtaacacagtgctaagtatttgtgtatctaaacatatctaaacatagmaaaggtacagtaaaaatatatatatagatatatataagatataaaatggtacacctatttaggacatttaccatgaacaagttggcaggactggaagctggctctgggtgagtcagtaagtggttagtgaatgtgaaggccatgatattactgtgcactactgtagacttttataaacactatatacttaggctacataaagtaatttcactatgatgttaccatggctgtgtccccaggcaataggaatttttcagctccattgtaatcttacgggatcatcatcgtatatttggccattgttgaccaaaagttatgcagcacrtcattataattttgatgtgtcacaaaacattactcatttgatttcccccacccccgccaaccatttaaaaaagtttgccggctaggtgcggtggctcatgcctgtaatcctagcattttgggaggacgaggcgggtggatcactcgatgtcaggagtttgagaccagcctggccaacatggtaaaacgccgtctctactaaaaatacaaaaacttagctgggtgtaacggcggatgcctgtaatcccagctacttgggaggctgaggcaggagaatcgcttgaacctgggaggcggaagttgcagtgagccgagattgcaccactgcagttcagcctggatgatgagagtgagactccatcgcaaaaaaaaaaaaaaaaaaagaaaagaaaattagccaggtgtggtggcaagtgcctttaatcccacctcaggaggctgaggcaggagaatcgcttgaacctgggaggcagaggttgcagtgagccaagatcgcgccactgcactccagcctgggtgacagaacaagactgtctcaaaaaaaaaaaaaaagaagaaaaactgcctacaggccatagttaacctgcaatagagaagaaagggaagtagggcagtgcatgactggccttaggttttttctttccaagtttattttcttgtgcttcagctactagaaaggtttaattcagggataagtcccaattgagtagttcaagatgatcagagactttgctattttcccctaagttctattccataatctaaaatgttctgtttctagtgccagttcttatgctaagcaggttacgtggaatatatcacttaactcaaaaagccctgttaagccaggactgttatctccatttaacagatgagaaaatggaggtttatggtctgttctcacactgctacgaagaaataccccaaactgggtaattattataaaggaaagaggtttaatggactcagttccgcattgctggtgaggcctcaggacacttatacaatcatggcagaaaaaggagaagcaggcacctttttcacagggcggcaggatgaaaatgactgccagcagtggaaatgccagacgcttataaaaccttcagatctcatgagaccggctcactatcacaggaacagcatggaggaaaccgcccccatgatccagttacctccacctggtcccacccttgacacgtggggattgctacaattcaaggttagatttgggtgaggacacagagccataccatatcagcccagatcaagtagtgacagagtagggatttgaatacaggttatagtcactattgtgttatttcttgacttttgtactattaaaaaactgtagccagtgaggcttctacccttagtacccagaactccttttaggtatagcaattgtttttaggtaaatttatattgagtttaacacctgtgtgattaaagacaactttccaatgtagtatctgtagccatgtcccctaatggctattagtgttcatggttagtgtgttgaagatgagccaggtacataacgcggcacattttctgcaggtcagcagtaaggtttcaaggtacagttatggaggaaagaagaaaatgacacattgataacacaggtctttattcccttttgaatgagacagtttttaaaagttgatttataaatacaaaaatacattctccaaagatagtatttccaaactgttatatacccatctactcccaacatggatataagttttttaaaaaaatagttgtatataacatacatatctgccccagtgttacttcacaggcctatgccctacgggaactccactctcccagccccactttttctcttggttctcccacattcttattctcccacatccctacccacgtttgagctggaaaggatgtccctaccctaggcatgaggtatattttattctgggcaccacacatttgccccatagataacaatacacgtgatgatgtcactagtactacctttctagtatttacatacttaaaagtagtaactagaacagttatcactggaactaagaattttccccacagaggtgaacagaccaagaactaaaatttcaggaaacctgtttaatttcttttgtatctttgaaaagttagttttatatctaagatttcttcacataggttataattcatctgtatgttcaagcttttatgtaaaaatatatagtgccttcagttttaacatagtttcacatgttctcagaactgctaaattcagtgctaccagtaaggcttaataagtagttcattgaccctgtaagataggagcactcagctctgtcacaatttgttgttaaacacatcactcaatgtaagtataaaaatatttattgataaaaaataaacttataattcagcaacttgaagttccaggagcatttctgttgttcctatgtcagtaagcccttgatttttcacattaaggagggaaagctaagcatgttacttgaagtaattttttcccagtcaccatcatgttgatcctgtgcacaacgatatatgcgaggaactcttaagcttagtctttgattctgacagaggyattctatggactgctgcattgaaaagggcttgctgttttcatccaacacctctgtgttgtgtggtcttgctgtgaaaaagaagacaataccttgttttcagtttaagtaggaccactggaggatgcaattatcgggactgtttttaaaacctaaaagcacgtttctttagctgaactctgaagggacagtaaagatacagtattttataaatcaatattctgcatcaaaaagcatcccaacactttgagaggccaaggtgggaggatcgcacgagcccaggagtttgggactagccctggcaacatagtgagaccctgtctctaccaaaaattttaaaaagctgggtgtggtggcacatgcctgtagccctagctactcaggaggctgaggtggtaagactgcttgagtctgggaggtgaaggctacagtgagctgtggtcgtgccactacactctagcctgggtgacagaatgagaccttgtctc

SEQ ID NO: 5838 - DNA, 8121 bp, Homo sapiens
acgytgtgaggtggcgtccagaaggaagccccgcctaggccacgggcggaaatggctcctcgccttgctttgccgcccctccccactctcgcccaatccccgcggccgtcagagagccaaccaatgtttatctcggcattttcccgcgagaagtgttactaatatccgggaatggaaagggaagaacctccggggttaggcgtattctagattgacgccttttgctggaagagcgctgctggggttaggattctgcgcggcgaggcaagatgctcaagtccaagacgttcttaaaaaagacccgggcgggcggcgtgatgaagatcgtgcgcgagcactacctgcgagacgacatcggctgcggtgcgcccgggtgcgcagcgtgtggaggggcgcacgaggggccggccctggagccgcagccccaggacccggcgagcagcgtctgcccgcaaccgcactacttgctgcccgacactaatgtgttactgcaccagattgtaagtgcctggaggccggggacctgggcttctgtggcctccagcctgcgactcccaggcagcttagaaacctatgtagaacaagaacagggagaaaatgctaatgacaggaatgatagagcgattcgagtagcagcaaaatggtacaatgaacatttgaaaaaaatgtcagcagacaaccagctgcaagttatcttcataacaaatgacaggagaaacaaagagaaagccatagaagaaggaataccagctttcacttgtgaagaatatgtaaagagcctaactgctaaccccgaactcatagatcgtcttgcttgtttgtctgaagaagggaatgaaatagaaagtggaaaaataatattttcagagcatcttcccttaagtaagctacagcaaggcataaaatctggtacataccttcaaggaacatttagagctagcagggaaaattacttggaagctacagtatggattcatggcgacartgaagaaaataaagaggcaaataatcttacagggacttaaacatttaaacagagctgttcacgaagatattgtggctgtggagcttctccccaagagtcagtgggtagcaccatcttctgtggttttacatgatgaaggtcaaaatgaagaagatgtggagaaagaagaagagasagaacgaatgcttaagactgctgtaagcgagaaaatgttgaagcctacaggtagagttgtaggaataataaaaaggaattggagaccatattgtggcatgctttccaagtctgacattaaggagtcaagaagacatctctttacacctgctgataagagaatccctcgaattcgcatagaaaccagacaggcttccacattagaaggacggagaattattgttgctattgatggttggcccagaaattccagatatccaaatggacactttgtgagaaatttaggtgatgttggagagaaagagactgaaacagaagttttgttacttgaacacratgttccccatcagcctttttcacaggctgttcttagttttctgccaaagatgccctggagcattactgaaaaggacatgaaaaaccgagaagacctgaggcatctgtgtatttgtagtgtagacccaccaggatgtactgatatagacgatgctctacattgtcgagaactcgaaaatggaaatttggaggttggtgttcatattgctgatgtgagccattttattaggccaggaaatgccktggatcaagaatcagccagaagaggaacaactgtgtatctttgtgaaaagaggattgacatggttccagagttgcttagctctaacttgtgttccttaaaatgtgacgtggacaggctggcattttcatgtatttgggaaatgaatcacaatgctgaaatcttaaaaacgaagtttaccaaaagtgttattaattcaaaggcatctctgacrtatgctgaagctcagttgagaattgattcagcaaacatgaatgatgatattaccactagtctccgtggactgaataaactagccaaaattctgaagaaaagaaggattgaaaaaggggctttgactctatcctctyctgaagttcgattccacatggacagtgaaactcacgatcctatagatctgcagaccaaggaacttagggaaacaaattccatggttgaagaatttatgttacttgccaatatttctgttgcaaaaaaaattcatgaggaattttctgaacatgctctgcttcgaaaacatcctgctccacctccatcaaattatgaaattcttgttaaggcagccaggtcaaggaatttggaaattaagactgatacagccaagtctttggctgagtctttggatcaggccgaatctcctacttttccatatctaaacactctgttgagaatattagccactcgctgtatgatgcaagctgtgtacttctgttctggaatggataatgattttcatcactatggcttagcgtctccaatatacacacattttacttcacccattagaagatacgcagatgtcattgttcatcggcttttggctgtggctattggggctgactgtacttatccagagttgacagacaaacacaagcttgcagatatatgtaaaaatctaaatttccggcacaaaatggctcaatatgcccaacgtgcatcagtggcttttcatacccagttattcttcaaaagcaaaggartagtaagtgaagaagcctatattttatttgtaagaaagaatgccattgtggtattaattccaaagtatggtttagaagggacagtcttttttgaagaaaaggacaaaccaaacccacagcttatttatgatgatgagataccctcacttaaaatagaagatacagtgttccatgtatttgataaagttaaagtgaaaatcatgttagactcatctaatcttcaacatcagaagatccgaatgtccctggtagaaccacagataccaggaataagcattcctactgatacttcaaacatggaccttaatggaccaaagaaaaagaagatgaagcttggaaaatagctatattcaacaaaaatcttcaaagactggtttcttttttaaaagaaaaaacttgaaagaacacttctaagcctragtgtgtgatacagtttgttacttttaagtacattttaataatttcagacatctgcatttttattgaacagttgactgtatctgacccatcatactactatacttstgggttgaacagaattatttatgcagaataattcaattgaatatccatcacttaaatacagtgacaggacagcaacttcagggatctgtaaagatcatttaaatggagtgctcatctcattgaggagcagattaattttgcgtaagtactttgattatttaatatttgtaagaaaaaactttcattttcctacagaggaaaatagaacaattttagaagcaaggaacaatctcttttctaagtcttggaagctgtcagtgttgaggatgtaatctcctttgccatctttaattcacctaacttacactaggtgttctcttactgtctttaaaagcttcctgtattttattagtggtccttgaaaaactgtgaatgtttgggawttggtagaaaggcaaaaagtaggatattttgacctgactggaaagatggttgtgtttttattgccaggtaataagtgtgatcattgttgaacttcagctccagtgtctctccagaataagacattggcattcaaatgtctatatcttgttacttacaaaataaaaaacagattaattagtggcttttaaattgtagttatatcagtgtatatacacgaggggaactgtataaagacatactaaagggaacagattaaaataagtattattaataaaatttggtgtgccagactgactacttcccttgctaatcacagagattagtaatgattaaattaatatcttcaggaatattttgggatagggttgccttaaaacattttacttggcttattcaatttctaaagcacttacgttgtgccaggttccactcaagtaaaytatctctgccttcaaggagcttgcagtatagtgagaaaagcctgccaagtaaatcagcaggtatactaaataggtagtcatttaggcactcaataaatgttgactaatttttccagtttcctattactgaggaaaacctccatacactgaggcagaaacttgtgtcagttggaggaaaatagacttgagtagtctttggtccaggtaaaatgggtcagtgacactgaaacagtagagtaggagtcaaaaaaccttttctgtgaagtgctagaacattttagactttgttggctatggtctgtattgcaactatagtacacaactctgccgttgatagtgtgtaaggagccatatacaatatgtaaacaaatcaacatgactgtgtttcaacaaggcctgatttgttaagtttcatatatagtcatatgtcacttaatgacagggatatgttctgagacatgtcacttggcaatttcatcattgtgtgaaaatcatgatgtagttacacaaacctagatggtataccctatggtatcctatatgggatagcctattgctcctaacctacaaacctgtatggcatattactgtactgattactgtaggcagttgtaacacagtgctaagtatttgtgtatctaaacatatctaaacatagmaaaggtacagtaaaaatatatatatagatatatataagatataaaatggtacacctatttaggacatttaccatgaacaagttggcaggactggaagctggctctgggtgagtcagtaagtggttagtgaatgtgaaggccatgatattactgtgcactactgtagacttttataaacactatatacttaggctacataaagtaatttcactatgatgttaccatggctgtgtccccaggcaataggaatttttcagctccattgtaatcttacgggatcatcatcgtatatttggccattgttgaccaaaagttatgcagcacrtcattataattttgatgtgtcacaaaacattactcatttgatttcccccacccccgccaaccatttaaaaaagtttgccggctaggtgcggtggctcatgcctgtaatcctagcattttgggaggacgaggcgggtggatcactcgatgtcaggagtttgagaccagcctggccaacatggtaaaacgccgtctctactaaaaatacaaaaacttagctgggtgtaacggcggatgcctgtaatcccagctacttgggaggctgaggcaggagaatcgcttgaacctgggaggcggaagttgcagtgagccgagattgcaccactgcagttcagcctggatgatgagagtgagactccatcgcaaaaaaaaaaaaaaaaaaagaaaagaaaattagccaggtgtggtggcaagtgcctttaatcccacctcaggaggctgaggcaggagaatcgcttgaacctgggaggcagaggttgcagtgagccaagatcgcgccactgcactccagcctgggtgacagaacaagactgtctcaaaaaaaaaaaaaaagaagaaaaactgcctacaggccatagttaacctgcaatagagaagaaagggaagtagggcagtgcatgactggccttaggttttttctttccaagtttattttcttgtgcttcagctactagaaaggtttaattcagggataagtcccaattgagtagttcaagatgatcagagactttgctattttcccctaagttctattccataatctaaaatgttctgtttctagtgccagttcttatgctaagcaggttacgtggaatatatcacttaactcaaaaagccctgttaagccaggactgttatctccatttaacagatgagaaaatggaggtttatggtctgttctcacactgctacgaagaaataccccaaactgggtaattattataaaggaaagaggtttaatggactcagttccgcattgctggtgaggcctcaggacacttatacaatcatggcagaaaaaggagaagcaggcacctttttcacagggcggcaggatgaaaatgactgccagcagtggaaatgccagacgcttataaaaccttcagatctcatgagaccggctcactatcacaggaacagcatggaggaaaccgcccccatgatccagttacctccacctggtcccacccttgacacgtggggattgctacaattcaaggttagatttgggtgaggacacagagccataccatatcagcccagatcaagtagtgacagagtagggatttgaatacaggttatagtcactattgtgttatttcttgacttttgtactattaaaaaactgtagccagtgaggcttctacccttagtacccagaactccttttaggtatagcaattgtttttaggtaaatttatattgagtttaacacctgtgtgattaaagacaactttccaatgtagtatctgtagccatgtcccctaatggctattagtgttcatggttagtgtgttgaagatgagccaggtacataacgcggcacattttctgcaggtcagcagtaaggtttcaaggtacagttatggaggaaagaagaaaatgacacattgataacacaggtctttattcccttttgaatgagacagtttttaaaagttgatttataaatacaaaaatacattctccaaagatagtatttccaaactgttatatacccatctactcccaacatggatataagttttttaaaaaaatagttgtatataacatacatatctgccccagtgttacttcacaggcctatgccctacgggaactccactctcccagccccactttttctcttggttctcccacattcttattctcccacatccctacccacgtttgagctggaaaggatgtccctaccctaggcatgaggtatattttattctgggcaccacacatttgccccatagataacaatacacgtgatgatgtcactagtactacctttctagtatttacatacttaaaagtagtaactagaacagttatcactggaactaagaattttccccacagaggtgaacagaccaagaactaaaatttcaggaaacctgtttaatttcttttgtatctttgaaaagttagttttatatctaagatttcttcacataggttataattcatctgtatgttcaagcttttatgtaaaaatatatagtgccttcagttttaacatagtttcacatgttctcagaactgctaaattcagtgctaccagtaaggcttaataagtagttcattgaccctgtaagataggagcactcagctctgtcacaatttgttgttaaacacatcactcaatgtaagtataaaaatatttattgataaaaaataaacttataattcagcaacttgaagttccaggagcatttctgttgttcctatgtcagtaagcccttgatttttcacattaaggagggaaagctaagcatgttacttgaagtaattttttcccagtcaccatcatgttgatcctgtgcacaacgatatatgcgaggaactcttaagcttagtctttgattctgacagaggyattctatggactgctgcattgaaaagggcttgctgttttcatccaacacctctgtgttgtgtggtcttgctgtgaaaaagaagacaataccttgttttcagtttaagtaggaccactggaggatgcaattatcgggactgtttttaaaacctaaaagcacgtttctttagctgaactctgaagggacagtaaagatacagtattttataaatcaatattctgcatcaaaaagcatcccaacactttgagaggccaaggtgggaggatcgcacgagcccaggagtttgggactagccctggcaacatagtgagaccctgtctctaccaaaaattttaaaaagctgggtgtggtggcacatgcctgtagccctagctactcaggaggctgaggtggtaagactgcttgagtctgggaggtgaaggctacagtgagctgtggtcgtgccactacactctagcctgggtgacagaatgagaccttgtctc

SEQ ID NO: 5839 - DNA, 8044 bp, Homo sapiens
gggaatggaaagggaagaacctccggggttaggcgtattctagattgacgccttttgctggaagagcgctgctggggttaggattctgcgcggcgaggcaagatgctcaagtccaagacgttcttaaaaaagacccgggcgggcggcgtgatgaagatcgtgcgcgagcactacctgcgagacgacatcggctgcggtgcgcccgggtgcgcagcgtgtggaggggcgcacgaggggccggccctggagccgcagccccaggacccggcgagcagcgtctgcccgcaaccgcactacttgctgcccgacactaatgtgttactgcaccagattgatgttcttgaggaccctgccatcaggaatgtaattgtgctacaaacagttcttcaagaagtgagaaatcgcagtgcccccgtatataaacgcatccgagatgtgactaataaccaagagaagcatttctatactttcactaatgagcaccatagagaaacctatgtagaacaagaacagggagaaaatgctaatgacaggaatgatagagcgattcgagtagcagcaaaatggtacaatgaacatttgaaaaaaatgtcagcagacaaccagctgcaagttatcttcataacaaatgacaggagaaacaaagagaaagccatagaagaaggaataccagctttcacttgtgaagaatatgtaaagagcctaactgctaaccccgaactcatagatcgtcttgcttgtttgtctgaagaagggaatgaaatagaaagtggaaaaataatattttcagagcatcttcccttaagtaagctacagcaaggcataaaatctggtacataccttcaaggaacatttagagctagcagggaaaattacttggaagctacagtatggattcatggcgacartgaagaaaataaagaggcaaataatcttacagggacttaaacatttaaacagagctgttcacgaagatattgtggctgtggagcttctccccaagagtcagtgggtagcaccatcttctgtggttttacatgatgaaggtcaaaatgaagaagatgtggagaaagaagaagagasagaacgaatgcttaagactgctgtaagcgagaaaatgttgaagcctacaggtagagttgtaggaataataaaaaggaattggagaccatattgtggcatgctttccaagtctgacattaaggagtcaagaagacatctctttacacctgctgataagagaatccctcgaattcgcatagaaaccagacaggcttccacattagaaggacggagaattattgttgctattgatggttggcccagaaattccagatatccaaatggacactttgtgagaaatttaggtgatgttggagagaaagagactgaaacagaagttttgttacttgaacacratgttccccatcagcctttttcacaggctgttcttagttttctgccaaagatgccctggagcattactgaaaaggacatgaaaaaccgagaagacctgaggcatctgtgtatttgtagtgtagacccaccaggatgtactgatatagacgatgctctacattgtcgagaactcgaaaatggaaatttggaggttggtgttcatattgctgatgtgagccattttattaggccaggaaatgccktggatcaagaatcagccagaagaggaacaactgtgtatctttgtgaaaagaggattgacatggttccagagttgcttagctctaacttgtgttccttaaaatgtgacgtggacaggctggcattttcatgtatttgggaaatgaatcacaatgctgaaatcttaaaaacgaagtttaccaaaagtgttattaattcaaaggcatctctgacrtatgctgaagctcagttgagaattgattcagcaaacatgaatgatgatattaccactagtctccgtggactgaataaactagccaaaattctgaagaaaagaaggattgaaaaaggggctttgactctatcctctyctgaagttcgattccacatggacagtgaaactcacgatcctatagatctgcagaccaaggaacttagggaaacaaattccatggttgaagaatttatgttacttgccaatatttctgttgcaaaaaaaattcatgaggaattttctgaacatgctctgcttcgaaaacatcctgctccacctccatcaaattatgaaattcttgttaaggcagccaggtcaaggaatttggaaattaagactgatacagccaagtctttggctgagtctttggatcaggccgaatctcctacttttccatatctaaacactctgttgagaatattagccactcgctgtatgatgcaagctgtgtacttctgttctggaatggataatgattttcatcactatggcttagcgtctccaatatacacacattttacttcacccattagaagatacgcagatgtcattgttcatcggcttttggctgtggctattggggctgactgtacttatccagagttgacagacaaacacaagcttgcagatatatgtaaaaatctaaatttccggcacaaaatggctcaatatgcccaacgtgcatcagtggcttttcatacccagttattcttcaaaagcaaaggartagtaagtgaagaagcctatattttatttgtaagaaagaatgccattgtggtattaattccaaagtatggtttagaagggacagtcttttttgaagaaaaggacaaaccaaacccacagcttatttatgatgatgagataccctcacttaaaatagaagatacagtgttccatgtatttgataaagttaaagtgaaaatcatgttagactcatctaatcttcaacatcagaagatccgaatgtccctggtagaaccacagataccaggaataagcattcctactgatacttcaaacatggaccttaatggaccaaagaaaaagaagatgaagcttggaaaatagctatattcaacaaaaatcttcaaagactggtttcttttttaaaagaaaaaacttgaaagaacacttctaagcctragtgtgtgatacagtttgttacttttaagtacattttaataatttcagacatctgcatttttattgaacagttgactgtatctgacccatcatactactatacttstgggttgaacagaattatttatgcagaataattcaattgaatatccatcacttaaatacagtgacaggacagcaacttcagggatctgtaaagatcatttaaatggagtgctcatctcattgaggagcagattaattttgcgtaagtactttgattatttaatatttgtaagaaaaaactttcattttcctacagaggaaaatagaacaattttagaagcaaggaacaatctcttttctaagtcttggaagctgtcagtgttgaggatgtaatctcctttgccatctttaattcacctaacttacactaggtgttctcttactgtctttaaaagcttcctgtattttattagtggtccttgaaaaactgtgaatgtttgggawttggtagaaaggcaaaaagtaggatattttgacctgactggaaagatggttgtgtttttattgccaggtaataagtgtgatcattgttgaacttcagctccagtgtctctccagaataagacattggcattcaaatgtctatatcttgttacttacaaaataaaaaacagattaattagtggcttttaaattgtagttatatcagtgtatatacacgaggggaactgtataaagacatactaaagggaacagattaaaataagtattattaataaaatttggtgtgccagactgactacttcccttgctaatcacagagattagtaatgattaaattaatatcttcaggaatattttgggatagggttgccttaaaacattttacttggcttattcaatttctaaagcacttacgttgtgccaggttccactcaagtaaaytatctctgccttcaaggagcttgcagtatagtgagaaaagcctgccaagtaaatcagcaggtatactaaataggtagtcatttaggcactcaataaatgttgactaatttttccagtttcctattactgaggaaaacctccatacactgaggcagaaacttgtgtcagttggaggaaaatagacttgagtagtctttggtccaggtaaaatgggtcagtgacactgaaacagtagagtaggagtcaaaaaaccttttctgtgaagtgctagaacattttagactttgttggctatggtctgtattgcaactatagtacacaactctgccgttgatagtgtgtaaggagccatatacaatatgtaaacaaatcaacatgactgtgtttcaacaaggcctgatttgttaagtttcatatatagtcatatgtcacttaatgacagggatatgttctgagacatgtcacttggcaatttcatcattgtgtgaaaatcatgatgtagttacacaaacctagatggtataccctatggtatcctatatgggatagcctattgctcctaacctacaaacctgtatggcatattactgtactgattactgtaggcagttgtaacacagtgctaagtatttgtgtatctaaacatatctaaacatagmaaaggtacagtaaaaatatatatatagatatatataagatataaaatggtacacctatttaggacatttaccatgaacaagttggcaggactggaagctggctctgggtgagtcagtaagtggttagtgaatgtgaaggccatgatattactgtgcactactgtagacttttataaacactatatacttaggctacataaagtaatttcactatgatgttaccatggctgtgtccccaggcaataggaatttttcagctccattgtaatcttacgggatcatcatcgtatatttggccattgttgaccaaaagttatgcagcacrtcattataattttgatgtgtcacaaaacattactcatttgatttcccccacccccgccaaccatttaaaaaagtttgccggctaggtgcggtggctcatgcctgtaatcctagcattttgggaggacgaggcgggtggatcactcgatgtcaggagtttgagaccagcctggccaacatggtaaaacgccgtctctactaaaaatacaaaaacttagctgggtgtaacggcggatgcctgtaatcccagctacttgggaggctgaggcaggagaatcgcttgaacctgggaggcggaagttgcagtgagccgagattgcaccactgcagttcagcctggatgatgagagtgagactccatcgcaaaaaaaaaaaaaaaaaaagaaaagaaaattagccaggtgtggtggcaagtgcctttaatcccacctcaggaggctgaggcaggagaatcgcttgaacctgggaggcagaggttgcagtgagccaagatcgcgccactgcactccagcctgggtgacagaacaagactgtctcaaaaaaaaaaaaaaagaagaaaaactgcctacaggccatagttaacctgcaatagagaagaaagggaagtagggcagtgcatgactggccttaggttttttctttccaagtttattttcttgtgcttcagctactagaaaggtttaattcagggataagtcccaattgagtagttcaagatgatcagagactttgctattttcccctaagttctattccataatctaaaatgttctgtttctagtgccagttcttatgctaagcaggttacgtggaatatatcacttaactcaaaaagccctgttaagccaggactgttatctccatttaacagatgagaaaatggaggtttatggtctgttctcacactgctacgaagaaataccccaaactgggtaattattataaaggaaagaggtttaatggactcagttccgcattgctggtgaggcctcaggacacttatacaatcatggcagaaaaaggagaagcaggcacctttttcacagggcggcaggatgaaaatgactgccagcagtggaaatgccagacgcttataaaaccttcagatctcatgagaccggctcactatcacaggaacagcatggaggaaaccgcccccatgatccagttacctccacctggtcccacccttgacacgtggggattgctacaattcaaggttagatttgggtgaggacacagagccataccatatcagcccagatcaagtagtgacagagtagggatttgaatacaggttatagtcactattgtgttatttcttgacttttgtactattaaaaaactgtagccagtgaggcttctacccttagtacccagaactccttttaggtatagcaattgtttttaggtaaatttatattgagtttaacacctgtgtgattaaagacaactttccaatgtagtatctgtagccatgtcccctaatggctattagtgttcatggttagtgtgttgaagatgagccaggtacataacgcggcacattttctgcaggtcagcagtaaggtttcaaggtacagttatggaggaaagaagaaaatgacacattgataacacaggtctttattcccttttgaatgagacagtttttaaaagttgatttataaatacaaaaatacattctccaaagatagtatttccaaactgttatatacccatctactcccaacatggatataagttttttaaaaaaatagttgtatataacatacatatctgccccagtgttacttcacaggcctatgccctacgggaactccactctcccagccccactttttctcttggttctcccacattcttattctcccacatccctacccacgtttgagctggaaaggatgtccctaccctaggcatgaggtatattttattctgggcaccacacatttgccccatagataacaatacacgtgatgatgtcactagtactacctttctagtatttacatacttaaaagtagtaactagaacagttatcactggaactaagaattttccccacagaggtgaacagaccaagaactaaaatttcaggaaacctgtttaatttcttttgtatctttgaaaagttagttttatatctaagatttcttcacataggttataattcatctgtatgttcaagcttttatgtaaaaatatatagtgccttcagttttaacatagtttcacatgttctcagaactgctaaattcagtgctaccagtaaggcttaataagtagttcattgaccctgtaagataggagcactcagctctgtcacaatttgttgttaaacacatcactcaatgtaagtataaaaatatttattgataaaaaataaacttataattcagcaacttgaagttccaggagcatttctgttgttcctatgtcagtaagcccttgatttttcacattaaggagggaaagctaagcatgttacttgaagtaattttttcccagtcaccatcatgttgatcctgtgcacaacgatatatgcgaggaactcttaagcttagtctttgattctgacagaggyattctatggactgctgcattgaaaagggcttgctgttttcatccaacacctctgtgttgtgtggtcttgctgtgaaaaagaagacaataccttgttttcagtttaagtaggaccactggaggatgcaattatcgggactgtttttaaaacctaaaagcacgtttctttagctgaactctgaagggacagtaaagatacagtattttataaatcaatattctgcatcaaaaagcatcccaacactttgagaggccaaggtgggaggatcgcacgagcccaggagtttgggactagccctggcaacatagtgagaccctgtctctaccaaaaattttaaaaagctgggtgtggtggcacatgcctgtagccctagctactcaggaggctgaggtggtaagactgcttgagtctgggaggtgaaggctacagtgagctgtggtcgtgccactacactctagcctgggtgacagaatgagaccttgtctc

SEQ ID NO: 5840 - DNA, 3728 bp, Homo sapiens
ggagcggcggggctcaaacgggccctgcggccttgcggccgcccgggactccccgccaaagaagggaccgtcggtggcgtctgcggccccaggaggagctcatccgccarcccccaggagcaagaccaagaccgcaggaaggactggggccacgtggagctgctggaggtgctccaggcgcggrtgcggcagctgcaggctgggagcgtgtcggaggtggtggtgaacagggtggatgtggcgcggctcccagaatgtggcagtggaggtggtagcctccagccacccaggaaggtccagatgggggtcaaggatgccaccccggtgccctgtggccgctgggcaaagagactggagaaggataagcggacccagcagatgcgtatgcagcggttgaaggcgaagctgcagatgccattccagagcggggagttcaaggcgctgaccaggcgcctgcaggtggagccccggctcctgagcaagcagatggccgggtgcctggagcactgcacgcgccaggccccccgagagcccctgggaggagcagctggcccggctgctgcaggaggcccctgggaagctgagcctcgatgtggagcaggccccgtcggcgcagcactcgcaggcccagctctcaggtcagcagcagaggctcctggccttcttcaagtgctgcctgctcactgaccaactgcccctcgcccaccacctgctggtggtccaccacggccagcggcagaagcggaagctgctcacgctggacatgtacaacgccgtgatgcttggctgggcgcggcagggtgcyttcaaggagctggtgtatgtgttattcatggtgaaggatgccggcttgaccccggacctgctgtcctatgcggctgccctccagtgcatggggaggcaggaccaggacgccgggaccatcgaaaggtgtctggaacagatgagccacgaggggctgaagctgcaggcactcttcaccgccgtgcccctgtctgaggaggatcgggccactgttctgaaggccgtgcacaaggtgaagcccaccttcagcctcccgctgcagctgccgcccccggtcaacacctccaagctgctcagggacgtgtatgccaaggatgggcgtgtgtcctacccgaagctgcacctgcccctgaagaccctgcagtgcctctttgagaagcagctccacgtggagctggccagcaggatgtgcgtggtgtccgtggagaagcccacgttgccaagcaaggaggtcacgcacgcgcggaagaccctgaagaccctgcgggaccaatgggagaaagcactgtgccgggagctacgggagaccaagaaccgcctagagcgccaggtgtacgagggccggttctcactgtaccccttcctgtgcctgctggacgagtgcgaggtggtgcggatgctcctgcaggtcctgcaggcgctgcccgcccaaggtgagtccttcaccaccctggcccgggagctgagtgcgcgcactttcagccggcacgtggtgcagaggcagcgggtcagtgcccaggtgcaggcgctgcagaaccactacaggaagtacctatgcctgctggcctccgacgccgaggtgcccgagccttgcttgccgcggcagtactgtgaggcgctgggggcgcccgaggccctgcgggagcagccctggcccctgccagtgcagatggagctgggcaagctgctggcggagatgctggtgcaggctacgcagatgccatgcagcctggacaagccgcatcgctcctctcggcttgtccctgtggtctaccacgtgtattccttccgcaacgtccagcaratcggcatcctgaagccgcacccggcctacgtgcagctgctggagaaggctacggagcccacgctgaccttcgaggcggtggatgtacccatgttttgccccccgctgccctggacatcgccgcactctggtgccttcctgctcagccccaccaagctgatgcgcacggtggaaggcgccacgcagcaccaggagctgctggaaacctgcccgcccaccgcgctgcatggcgcgctggacgccctcgcccaactgggcaactgcgcctggcgcgtcaacgggcgcgtgctggacctggtgctgcagctcttccaggccaagggctgcccctacctaggcgtgccggccccgccctccgaggcgccccagccgcccgaagcccacctgccgcacagcgccgcgcccgcccgcaaggccgagctgcgccgggagctggcgcactgccagaaggtggcccgggagatgcacagcctgcgggcggaagcgctgtaccgcctctcgctggcgcagcacctgcgggaccgcgtcttctggcggccgcacaacatggacttccgcagccgcacctacccctgcccgccgcacttcaaccacctgggcagcgacgtggcgcgggccctgctggagttcgcccagggccgcccgctcggcccgcgcggcctggattggctcaagatccacctggtcaacctcacggggttgaagaagcgggagcctctgcggaagcgcctggcctttgcggaggaggtgatggatgacatcttggactcygcggaccaacccttgrcgggccgaaagtggtggatgggcgcggaggaaccctggcagacgctggcctgctgtatggaggtggcgaacactgtgcgcgcctccgaccctgccgcctatgtctcccacctccccgtccatcaggacggctcttgcaacggcctgcagcattatgctgctctgggccgcgacagcgtgggcgccgcctccgtcaacctggagccctcggatgtgccgcaggacgtgtacagcggcgtggctgggcaggtggaggtgttccgtaggcaagacgcccagcggggcacgcgggtggcacaggtgctggaaggtttcatcacccgcgaggtggtgaagcagacggtgatgaccatggtgtacggggtcacccgctatggcgggcgcctgcagattgagaagcgcctccgggagctgaacgactttccccaggagttcgtgtgggaggcctcccactatctcgtacgccaggtcttcaagagtctacaggagatgttctcggggacccgggccatccagcactggctgaccgagagcgcccgcctcatctcccacacgggctccgtggtggagtgggtcacacccctgggcgtccccgtcatccagccstatcgcctggactccaaggtcaagcaaataggaggtggaattcagagcatcacctacacccacaacggagacatcagccgaaagcccaacacacgaaagtagaagaacggcttcccgcccaacttcatccactcgctggactcctcacacatgatgctcaccgccctgcactgctacaggaagggcctgaccttcgtctctgtgcacgactgttactggacgcacgcagctgatgtctcttgtcatgaaccaggtgtgccgggagcagtttgtccgcttgcacagcgagcccatcctgcaggacctgtccaggttcctggtcaagcggttctgctctgagccccagaagatcttttaggccagccagctgaaggagacactgcaggcggtgcccaagccaggggccttcgacctggagcaggtgaagcgttccacctacttcttcagctgacaccccacgagccttgtgccagtgtgtaaataaagctcttttgccaaaaaaaaaaaa

SEQ ID NO: 5841 - DNA, 1844 bp, Homo sapiens
ggagcggcggggctcaaacgggccctgcggccttgcggccgcccgggactccccgccaaagaagggaccgtcggtggcgtctgcggccccaggaggagctcatccgccarcccccaggagcaagaccaagaccgcaggaaggactggggccacgtggagctgctggaggtgctccaggcgcggrtgcggcagctgcaggctgggagcgtgtcggaggtggtggtgaacagggtggatgtggcgcggctcccagaatgtggcagtggaggtggtagcctccagccacccaggaaggtccagatgggggtcaaggatgccaccccggtgccctgtggccgctgggcaaagagactggagaaggataagcggacccagcagatgcgtatgcagcggttgaaggcgaagctgcagatgccattccagagcggggagttcaaggcgctgaccaggcgcctgcaggtggagccccggctcctgagcaagcagatggccgggtgcctggagcactgcacgcgccaggccccccgagagcccctgggaggagcagctggcccggctgctgcaggaggcccctgggaagctgagcctcgatgtggagcaggccccgtcggcgcagcactcgcaggcccagctctcaggtcagcagcagaggctcctggccttcttcaagtgctgcctgctcactgaccaactgcccctcgcccaccacctgctggtggtccaccacggccagcggcagaagcggaagctgctcacgctggacatgtacaacgccgtgatgcttggctgggcgcggcagggtgcyttcaaggagctggtgtatgtgttattcatggtgaaggatgccggcttgaccccggacctgctgtcctatgcggctgccctccagtgcatggggaggcaggaccaggacgccgggaccatcgaaaggtgtctggaacagatgagccacgaggggctgaagctgcaggcactcttcaccgccgtgcccctgtctgaggaggatcgggccactgttctgaaggccgtgcacaaggtgaagcccaccttcagcctcccgctgcagctgccgcccccggtcaacacctccaagctgctcagggacgtgtatgccaaggatgggcgtgtgtcctacccgaagctgcacctgcccctgaagaccctgcagtgcctctttgagaagcagctccacgtggagctggccagcaggatgtgcgtggtgtccgtggagaagcccacgttgccaagcaaggaggtcacgcacgcgcggaagaccctgaagaccctgcgggaccaatgggagaaagcactgtgccgggagctacgggagaccaagaaccgcctagagcgccaggtcaagcaaataggaggtggaattcagagcatcacctacacccacaacggagacatcagccgaaagcccaacacacgaaagtagaagaacggcttcccgcccaacttcatccactcgctggactcctcacacatgatgctcaccgccctgcactgctacaggaagggcctgaccttcgtctctgtgcacgactgttactggacgcacgcagctgatgtctcttgtcatgaaccaggtgtgccgggagcagtttgtccgcttgcacagcgagcccatcctgcaggacctgtccaggttcctggtcaagcggttctgctctgagccccagaagatcttttaggccagccagctgaaggagacactgcaggcggtgcccaagccaggggccttcgacctggagcaggtgaagcgttccacctacttcttcagctgacaccccacgagccttgtgccagtgtgtaaataaagctcttttgccaaaaaaaaaaaa

SEQ ID NO: 5842 - DNA, 2964 bp, Homo sapiens
tccagcctgggcaacagagcaagactccatctcagggtgcyttcaaggagctggtgtatgtgttattcatggtgaaggatgccggcttgaccccggacctgctgtcctatgcggctgccctccagtgcatggggaggcaggaccaggacgccgggaccatcgaaaggtgtctggaacagatgagccacgaggggctgaagctgcaggcactcttcaccgccgtgcccctgtctgaggaggatcgggccactgttctgaaggccgtgcacaaggtgaagcccaccttcagcctcccgctgcagctgccgcccccggtcaacacctccaagctgctcagggacgtgtatgccaaggatgggcgtgtgtcctacccgaagctgcacctgcccctgaagaccctgcagtgcctctttgagaagcagctccacgtggagctggccagcaggatgtgcgtggtgtccgtggagaagcccacgttgccaagcaaggaggtcacgcacgcgcggaagaccctgaagaccctgcgggaccaatgggagaaagcactgtgccgggagctacgggagaccaagaaccgcctagagcgccaggtgtacgagggccggttctcactgtaccccttcctgtgcctgctggacgagtgcgaggtggtgcggatgctcctgcaggtcctgcaggcgctgcccgcccaaggtgagtccttcaccaccctggcccgggagctgagtgcgcgcactttcagccggcacgtggtgcagaggcagcgggtcagtgcccaggtgcaggcgctgcagaaccactacaggaagtacctatgcctgctggcctccgacgccgaggtgcccgagccttgcttgccgcggcagtactgtgaggcgctgggggcgcccgaggccctgcgggagcagccctggcccctgccagtgcagatggagctgggcaagctgctggcggagatgctggtgcaggctacgcagatgccatgcagcctggacaagccgcatcgctcctctcggcttgtccctgtggtctaccacgtgtattccttccgcaacgtccagcaratcggcatcctgaagccgcacccggcctacgtgcagctgctggagaaggctacggagcccacgctgaccttcgaggcggtggatgtacccatgttttgccccccgctgccctggacatcgccgcactctggtgccttcctgctcagccccaccaagctgatgcgcacggtggaaggcgccacgcagcaccaggagctgctggaaacctgcccgcccaccgcgctgcatggcgcgctggacgccctcgcccaactgggcaactgcgcctggcgcgtcaacgggcgcgtgctggacctggtgctgcagctcttccaggccaagggctgcccctacctaggcgtgccggccccgccctccgaggcgccccagccgcccgaagcccacctgccgcacagcgccgcgcccgcccgcaaggccgagctgcgccgggagctggcgcactgccagaaggtggcccgggagatgcacagcctgcgggcggaagcgctgtaccgcctctcgctggcgcagcacctgcgggaccgcgtcttctggcggccgcacaacatggacttccgcagccgcacctacccctgcccgccgcacttcaaccacctgggcagcgacgtggcgcgggccctgctggagttcgcccagggccgcccgctcggcccgcgcggcctggattggctcaagatccacctggtcaacctcacggggttgaagaagcgggagcctctgcggaagcgcctggcctttgcggaggaggtgatggatgacatcttggactcygcggaccaacccttgrcgggccgaaagtggtggatgggcgcggaggaaccctggcagacgctggcctgctgtatggaggtggcgaacactgtgcgcgcctccgaccctgccgcctatgtctcccacctccccgtccatcaggacggctcttgcaacggcctgcagcattatgctgctctgggccgcgacagcgtgggcgccgcctccgtcaacctggagccctcggatgtgccgcaggacgtgtacagcggcgtggctgggcaggtggaggtgttccgtaggcaagacgcccagcggggcacgcgggtggcacaggtgctggaaggtttcatcacccgcgaggtggtgaagcagacggtgatgaccatggtgtacggggtcacccgctatggcgggcgcctgcagattgagaagcgcctccgggagctgaacgactttccccaggagttcgtgtgggaggcctcccactatctcgtacgccaggtcttcaagagtctacaggagatgttctcggggacccgggccatccagcactggctgaccgagagcgcccgcctcatctcccacacgggctccgtggtggagtgggtcacacccctgggcgtccccgtcatccagccstatcgcctggactccaaggtcaagcaaataggaggtggaattcagagcatcacctacacccacaacggagacatcagccgaaagcccaacacacgaaagtagaagaacggcttcccgcccaacttcatccactcgctggactcctcacacatgatgctcaccgccctgcactgctacaggaagggcctgaccttcgtctctgtgcacgactgttactggacgcacgcagctgatgtctcttgtcatgaaccaggtgtgccgggagcagtttgtccgcttgcacagcgagcccatcctgcaggacctgtccaggttcctggtcaagcggttctgctctgagccccagaagatcttttaggccagccagctgaaggagacactgcaggcggtgcccaagccaggggccttcgacctggagcaggtgaagcgttccacctacttcttcagctgacaccccacgagccttgtgccagtgtgtaaataaagctcttttgccaaaaaaaaaaaa

SEQ ID NO: 5843 - DNA, 2917 bp, Homo sapiens
tcgcggccccgcgcgccggatcggcgtgcgtgcggctggagccttaagcgtttcccccgcccggcttcatccctgctggcggcccagcgtcgttctcctcctgcgcgaggcggccaaggcctgctggcccggagccgcgcctccacccgcgcgaggtatcgtccttggagaagatggaagcggagaggcggccggcgccgggctcgccctccgagggcctgtttgcggacgrgcacctgatcttgtggacgctgtgctcggtcctgctgccggtgttcatcaccttctggtgtagcctccagcggtcgcgccggcagctgcaccgcagggacatcttccgcaagagcaagcacggrtggcgcgacacggacctgttcagccagcccacctactgctgcgtgtgcgcgcagcacattctgcagggcgccttctgcgactgctgcgggctccgcgtggacgagggctgcctcaggaaggccgacaagcgcttccagtgcaaggagattatgctcaagaatgacaccaaggtcctggacgccatgccccaccactggatccggggcaacgtgcccctgtgcagttactgtatggtttgcaagcagcagtgtggctgtcaacccaagctttgcgattacaggtgcatttggtgccagaaaacagtacatgatgagtgcatgaaaaatagtttaaagaatgaaaaatgtgattttggagaattcaaaaacctaatcattccaccaagttatttaacmtccattaatcagatgcgtaaagacaaaaaaacagattatgaagtgctagcctctaagcttggaaagcagtggaccccattaataatcctggccaactctcgtagtggaactaatatgggagaaggactgttgggagaatttaggatcttgttgaatccagtccaggtttttgatgtaactaaaactcctcctatcaaagccctacaactctgtactcttctcccatattattcagctcgagtacttgtttgtggaggggatgggactgtagggtgggtcctggatgcagttgatgacatgaagattaagggacaagaaaagtacattccacaagttgcagttttgcctctgggaacaggcaacgatctatccaatacattgggttggggtacaggttatgctggagaaattccagttgcgcaggttttgcgaaatgtaatggaagcagatggaattaaactagatcgatggaaagttcaagtaacaaataaaggatactacaacttaagaaaacccaaggaattcacaatgaacaactatttttctgttggacctgatgctctcatggctctcaattttcatgctcatcgtgagaaggcaccatctctgttttctagcagaattcttaataaggcggtttacttattctatggaaccaaagattgtttagtgcaagaatgtaaagatttgaataaaaaagttgagctagaactggatggtgagcgagtagcactgcccagcttggaaggtattatagttctgaacatcggatactggggcggtggctgcagactatgggaagggatgggggacgagacttaccctctagccaggcatgacgatggtctgctggaagtcgttggagtatatgggtctttccactgtgctcagattcaagtaaaactggctaatccttttcgaataggacaggcacatacagtgaggctgattttgaagtgctccatgatgccaatgcaggtggatggggagccttgggcccaagggccctgcactgtcaccataactcacaagacacatgcaatgatgttatatttctctggagaacaaacagatgatgacatctctagtacttcggatcaagaagatataaaggcgactgaatagatggatgagggagtgaaaactttgcatagaatcctcacgcaagtagatacatgttcatccaaaagtattaatagaaattctctatcagctattcagtcttaatttcactagtagtataatgggtatacatttttgtaaatagcatccccaaaccagccagccttcagttatttacaaatgtttgttcttttttcagcaaaatacttcaaatgaatagtattaacttacaaaaagtcacgaaaacttacatgagagtgaaaatttgttatgactgttttgagagtgggactcactctgaagtatgtgctgtctcatgtcttatttttgaaccatgcatatgatggacacacaatggatggacacattatatctccaacaaggtgtgggtggaaagatcaaattaacctgcttttttgaaaggaaatgattactgtcaaaccagcatggttaattgtgagcatcctcctgcagcatgccccttaagattttctacaacccaaaccaagtgtatgtattgatttctaggaacccccaaaaggagaatagtaaaaaaagatcatacttaaaatttgtattacaatttttattttaggaacttattcagacacgtaaatgttgtttaattctgtaggtaaccatttgagctgcaattcaggatcttttttataacaccagtgtagccaaaagagaaacagataagtgaattggtaagaaataagattcagagcacttgggattgtaagttataggttctgagctgaacagtttatcagccgctctttttattaaaagacagtgtcaacacttcaaaaaacgtgcttaaaggagacaacggtgagattaattgcttagaaaaagctcaaggctgactgataagttttaaaaatttggtggtcttgtagtattttgaaatacagtagtcttttaacagaatttccccttagggaggtaagtggacagaaatctttgctaaaatgtttatatcatatttattttaaaatgagagagatatatttttaaattatttattatttaccttg

SEQ ID NO: 5844 - DNA, 5064 bp, Homo sapiens
ggcaattaaagtcaagagctaaggagggagggagagggtttagaaataccagcataataagtagtatgactgggtgctctgtaaattaactcaattagacaamgcctgacttaacgggggaagatggtgagaagcgctaccctcattaaatttggttgttagaggcgcttctaaggaaattaagtctgttagttgtttgaatcacataaaattgtgtgtgcacgttcatgtacacatgtgcacacatgtaacctctgtgattcttgtgggtatttttttaagaagaaaggaatagaaagcaaagaaaaataaaaaatactgaaaagaaaagactgaaagagtagaagataaggagaaaagtrcgacagagacaaggaaagtaagagagagagagagctctcccaattataaagccatgagccccctttggtgggggtttctgctcagttgcttgggctgcaaaatcctgccaggagcccagggtcagttcccccgagtctgcatgacggtggacagcctagtgaacaaggagtgctgcccacgcctgggtgcagagtcggccaatgtctgtggctctcagcaaggccgggggcagtgcacagaggtgcgagccgacacaaggccctggagtggtccctacatcctacgaaaccaggatgaccgtgagctgtggccaagaaaattcttccaccggacctgcaagtgcacaggaaactttgccggctataattgtggagactgcaagtttggctggacyggtcccaactgcgagcggaagaaaccaccagtgattcggcagaacatccattccttgagtcctcaggaaagagagcagttcttgggcgccttagatctcgcgaagaagagagtacaccccgactacgtgatcaccacacaacactggctgggcctgcttgggcccartggaacccagccgcagtttgccaactgcagtgtttatgatttttttgtgtggctccattattattctgttagagatacattattaggaccaggacgcccytacagggccatagatttctcacatcaaggacctgcatttgttacctggcaccggtaccatttgttgtgtctggaaagagatctccagcgactcattggcaatgagtcttttgctttgccctactggaactttgccactgggaggaacgagtgtgatgtgtgtacagaccagctgtttggggcagcgagaccagacgatccgactctgattagtcrgaactcaagattctccagctgggaaactgtctgtgatagcttggatgactacaaccacctggtcaccttgtgcaatggaacctatgaaggtttgctgagaagaaatcaaatgggaagaaacagcatgaaattgccaaccttaaaagacatacgagattgcctgtctctccagaagtttgacaatcctcccttcttccagaactctaccttcagtttcaggaatgctttggaagggtttgataaagcagatgggactctggattctcaagtgatgagccttcataatttggttcattccttcctgaacgggacaaacgctttgccacattcagccgccaatgatcccatttttgtggttcttcattcctttactgatgccatctttgatgagtggatgaaaagatttaatcctcctgcagatgcctggcctcaggagctggcccctattggtcacaatcggatgtacaacatggttcctttcttccctccagtgactaatgaagaactctttttaacctcagaccaacttggctacagctatgccatcgatctgccagtttcagttgaagaaactccaggttggcccacaactctcttagtagtcatgggaacactggtggctttggttggtctttttgtgctgttggcttttcttcaatatagaagacttcgaaaaggatatacacccctaatggagacacatttaagcagcaagagatacacagaagaagcctagggtgctcatgccttacctaagagaagaggctggccaagccacagttctgacgctgacaataaaggaactaatcctcactgttccttcttgagttgaagatctttgacataggttcttctatagtgatgatgatctcattcagaagatgcttagctgtagtttccgctttgcttgcttgtttaacaaacccaactaaagtgcttgaggctacctctaccttcaaataaagatagacctgacaatttgtgatatctaataataaccccccccccaatattgattaagcctcctccttttctgaaagcatttaaaaaaaacaaaaaaaatcccaaaacattgatccaggggagtcatttaaatttgcaggtcagtgcaatgtgagacctggccaagaccatacatcaatctttcttagccccagtgtctttattggtaatgccatggaggtgggagttggtaggtgctagatgagtctccaagatcccttttagctataaacatctctgcttctaggcaccctcctgattatcttccttgggcttctttttcttcttttctctatatttttcctctccagcttagaagatgagaataagccttgttttctttacaggatggaaaatgactaaatgaaggatcaattccactctattgtgtaaactagattttacggattttacttaaaatctgcagttttaaacagtagacctatattacaggattcaatagctggatacacattgattctatagtgataaatagagaagataataaaattatagagtttcctggttagttgatatrctactgtaaacctattaacaaatacagaattactctttccaaggaaggctgactgaaggctggtgaggctgtaaacctgaacatgagacaatttgacttgagtcccattactctgaggtctctttggctgatcctctaccaatttctttactaggtagcctcagatgaaaaattattcccacataatgcactgggcttatttttaagcattgatgttagattgattaatgttgccgaatactcacagttacttatgaatgctgatcaattaagtcttatcatttgaaagcaaaccatctgtacaaaacatgacaattcagaattaagtggttatattctgctatgcaatcaycagatcatgaggaataagaatgagacaatctttactacgatgttcagacttatcatgatggaccccacttcagagaagttaatggctcttgagatttccaggcaaatttcatctgctcatatctggtttctgtgcatcaggagtgagactgaagttctagggcgtggcttgtctgtcgaggcccctctctactggaatgaatgaatgtaaagaatgggtgttaagaggtccctggagctgccttcaacataaggggtcctagagggtgcaagactcatcaagaaccagtttaccccatgcaawaggactgctaaagccagagaaatggacaaagcccagttggaactgaatttgaatctcataaagctacaggtgcatctgagagcaggctcagtggtgaagatcaagatagcccggtaaagccctgcttgggctttttagcctcagccacatggatacctctcagttcctgccattaacaatattcatggaaaatacagcactgtgtctttcacatgctccactctggaaggtttatgctctgagctcaggatagttggggaacacatttttaaatcttggttttaaacaaaaagagaaatttattaaaatggagatataattgtgcatggtacatatatttctgaaaagttatgtataaatcaattatgttaaaagcgccagaagttactttttataagtgaactattacgaataatttcataaagcaaataaccacctctagcttatctgtcaggtatatcagaattctcatatatcatagtctcataagacttggttaaagcagatctatcttaggtaggaaaaaatagtaatcgattatacttagctgcttttatctgtagtgtgggtgactttttataactattatgttttataatgtcttcctgagagaatttcctaattttgtagttcatataagagaaatacaattttctagcattttctgaccttacaataaatcaattatgaatgcattttaacaaatattaaggtaggataaaccaacagaataaaaagttggtatttacttacattgaatatcatgcaaataaactcagaaaatgtcaccaaatactgtgggctatatttctcaatgatagggggaagaattcaaccttggagaaaatgaccagatcactttactgcttatatcttcagtattagaaaaactgcatgtatgattttaatagaaatrctttttataaagctaacattcagaaatgggataaaatgcaataacatctttcctttgtgcattaaattcccttctaattctaaaattgacatttgtatcttgcttaggatttaacattgttaattataatacttttaatgactagttttaatctcattattaagaagtagaaaacttactaaaaaggaaactaaaaataaatgttgttttgcagattattgtttgtcttttgaggattattgttttttaagtagtgtgcatcaattcccatcttttgggcactcagcatgtatattgaaatatatatacatgtaaaatatataataacaacctcagtctgaaaaataatctcttaaactgatatgctattttctggtgagtttccaaacaattgctattttctgaatctgtttgaacaggtaggaaaaggagagccagcctttcctcaggtgaagttacttttgatattccccacagtttagtgactaatcctggggtggaagcaggtggctgcttcaagtgactgaccagggaagagaggtcctgcagtagctaacttggtgatctcccagataagccttcaagatgggtcaatttgttggagactctaaggttgaagctcttcctatttctatagtgccttacttatcctgagtaytttataaatattctttgaatgaataagtgaatgaataaactaatttcaaagtagaa

SEQ ID NO: 5845 - DNA, 2742 bp, Homo sapiens
agcttgaaaaggcaaggaggattctagcctagagtctccagggagagtgcagccgcctggctgacacacgccagtcctgccaacaccttcattttagacttctggccttcagaacagaccaggacgcccytacagggccatagatttctcacatcaaggacctgcatttgttacctggcaccggtaccatttgttgtgtctggaaagagatctccagcgactcattggcaatgagtcttttgctttgccctactggaactttgccactgggaggaacgagtgtgatgtgtgtacagaccagctgtttggggcagcgagaccagacgatccgactctgattagtcrgaactcaagattctccagctgggaaactgtctgtgatagcttggatgactacaaccacctggtcaccttgtgcaatggaacctatgaaggtttgctgagaagaaatcaaatgggaagaaacagcatgaaattgccaaccttaaaagacatacgagattgcctgtctctccagaagtttgacaatcctcccttcttccagaactctaccttcagtttcaggaatgctttggaagggtttgataaagcagatgggactctggattctcaagtgatgagccttcataatttggttcattccttcctgaacgggacaaacgctttgccacattcagccgccaatgatcccatttttgtggttcttcattcctttactgatgccatctttgatgagtggatgaaaagatttaatcctcctgcagatgcctggcctcaggagctggcccctattggtcacaatcggatgtacaacatggttcctttcttccctccagtgactaatgaagaactctttttaacctcagaccaacttggctacagctatgccatcgatctgccagatttccaggcaaatttcatctgctcatatctggtttctgtgcatcaggagtgagactgaagttctagggcgtggcttgtctgtcgaggcccctctctactggaatgaatgaatgtaaagaatgggtgttaagaggtccctggagctgccttcaacataaggggtcctagagggtgcaagactcatcaagaaccagtttaccccatgcaawaggactgctaaagccagagaaatggacaaagcccagttggaactgaatttgaatctcataaagctacaggtgcatctgagagcaggctcagtggtgaagatcaagatagcccggtaaagccctgcttgggctttttagcctcagccacatggatacctctcagttcctgccattaacaatattcatggaaaatacagcactgtgtctttcacatgctccactctggaaggtttatgctctgagctcaggatagttggggaacacatttttaaatcttggttttaaacaaaaagagaaatttattaaaatggagatataattgtgcatggtacatatatttctgaaaagttatgtataaatcaattatgttaaaagcgccagaagttactttttataagtgaactattacgaataatttcataaagcaaataaccacctctagcttatctgtcaggtatatcagaattctcatatatcatagtctcataagacttggttaaagcagatctatcttaggtaggaaaaaatagtaatcgattatacttagctgcttttatctgtagtgtgggtgactttttataactattatgttttataatgtcttcctgagagaatttcctaattttgtagttcatataagagaaatacaattttctagcattttctgaccttacaataaatcaattatgaatgcattttaacaaatattaaggtaggataaaccaacagaataaaaagttggtatttacttacattgaatatcatgcaaataaactcagaaaatgtcaccaaatactgtgggctatatttctcaatgatagggggaagaattcaaccttggagaaaatgaccagatcactttactgcttatatcttcagtattagaaaaactgcatgtatgattttaatagaaatrctttttataaagctaacattcagaaatgggataaaatgcaataacatctttcctttgtgcattaaattcccttctaattctaaaattgacatttgtatcttgcttaggatttaacattgttaattataatacttttaatgactagttttaatctcattattaagaagtagaaaacttactaaaaaggaaactaaaaataaatgttgttttgcagattattgtttgtcttttgaggattattgttttttaagtagtgtgcatcaattcccatcttttgggcactcagcatgtatattgaaatatatatacatgtaaaatatataataacaacctcagtctgaaaaataatctcttaaactgatatgctattttctggtgagtttccaaacaattgctattttctgaatctgtttgaacaggtaggaaaaggagagccagcctttcctcaggtgaagttacttttgatattccccacagtttagtgactaatcctggggtggaagcaggtggctgcttcaagtgactgaccagggaagagaggtcctgcagtagctaacttggtgatctcccagataagccttcaagatgggtcaatttgttggagactctaaggttgaagctcttcctatttctatagtgccttacttatcctgagtaytttataaatattctttgaatgaataagtgaatgaataaactaatttcaaagtagaa

SEQ ID NO: 5846 - DNA, 1126 bp, Homo sapiens
ggcaattaaagtcaagagctaaggagggagggagagggtttagaaataccagcataataagtagtatgactgggtgctctgtaaattaactcaattagacaamgcctgacttaacgggggaagatggtgagaagcgctaccctcattaaatttggttgttagaggcgcttctaaggaaattaagtctgttagttgtttgaatcacataaaattgtgtgtgcacgttcatgtacacatgtgcacacatgtaacctctgtgattcttgtgggtatttttttaagaagaaaggaatagaaagcaaagaaaaataaaaaatactgaaaagaaaagactgaaagagtagaagataaggagaaaagtrcgacagagacaaggaaagtaagagagagagagagctctcccaattataaagccatgagccccctttggtgggggtttctgctcagttgcttgggctgcaaaatcctgccaggagcccagggtcagttcccccgagtctgcatgacggtggacagcctagtgaacaaggagtgctgcccacgcctgggtgcagagtcggccaatgtctgtggctctcagcaaggccgggggcagtgcacagaggtgcgagccgacacaaggccctggagtggtccctacatcctacgaaaccaggatgaccgtgagctgtggccaagaaaattcttccaccggacctgcaagtgcacaggaaactttgccggctataattgtggagactgcaagtttggctggacyggtcccaactgcgagcggaagaaaccaccagtgattcggcagaacatccattccttgagtcctcaggaaagagagcagttcttgggcgccttagatctcgcgaagaagagagtacaccccgactacgtgatcaccacacaacactggctgggcctgcttgggcccartggaacccagccgcagtttgccaactgcagtgtttatgatttttttgtgtggctccattattattctgttagagatacattattaggtgggttttttccttggctgaaggtatattattacaggtttgkgattgggttgagggtatggcagtgggaagtaatttcatgcaagttaattaagagagcaaccacaaggcagcct

SEQ ID NO: 5847 - DNA, 4108 bp, Homo sapiens
ggagtttcactttgtaacttttaagtggtcggaacacgccccgcgctgctgggtcccgccagacacgccgccgccgcaggaaagtctacagtttggtaccccaggactcgctggtcaggaaagccctgcaggacatgagtgttaggcccgacgcctggcccttggcagcttgggaggtggctggggctgcttttgcctttgccagagacagctccaactgaggacctctccaacgggcccatccacagtccttccttcccctagtgtctgggargacaggcgcgatgatggactccccgttcctggagctgtggcagtccaaggcagtgtccatcagggagcagctgggactcggggaccggcccaacgactcctattgctacaactcggccaaaaacagcaccgtgctccagggggtcacctttggtggcatccccactgtcctgctcatagacgtcagctgcttcctgttcttaatcttggtgttttctattataagaagaagattctgggactatggccgcattgccctggtgtcagaagcagacagcgagtccagatttcagagattgtcatcgacttcctcctcaggtcaacaagactttgaaaatgagctgggatgctgtccctggctgactgccatcttccgtctgcatgatgaccagatcctggaatggtgtggggaggacgccatccactacctgtccttccagaggcacatcatcttcctgttggtggtggtcagctttttgtccctgtgtgtcatcctgcctgtcaacctctcaggggayttgctggacaaagacccgtatagttttgggaggacaacaatagcaaacctacagactgacaatgacctcctttggctgcacaccatctttgctgtcatttacctcttcytcactgtgggtttcatgcggcaccacactcagtccattaagtacaaagaggagaacctggtgaggcggaccctgttcatcacaggactccccagagatgccaggaaggagactgtggagagccacttccgggacgcgtatcccacgtgtgaggtggttgatgtgcagctgtgctacaacgtggccaaactgatctacctgtgcaaggagaaaaagaagactgagaagagcctgacctattacacaaacctgcaggtgaagacaggccagcggaccctcatcaaccccaagccctgtggccagttttgctgctgtgaagtgctgggctgtgagtgggaagacgccatctcttactacacacggatgaaggacaggctgctggagaggatcacagaggaagaacgccacgtccaggaccagcccctgggaatggccttcgtcaccttccaggagaagtccatggccacctacatcctgaaagatttcaatgcctgcaagtgtcagagccttcagtgcaaaggtgagccccagccgtcctcccatagcagggagctctatacctccaagtggacagtcacctttgctgctgaccctgaggacatctgctggaagaacctctctatccagggcctccgctggtggctacagtggctgggcatcaacttcaccctcttcctggggctrtttttcctgaccacaccctccatcatcctgtccaccatggacaagtttaatgtcaccaaacccatccatgcgctgaataacccgatcatcagccagttcttccccaccctcctgctctggtccttctcggccctgctcccctccattgtctactactctacactgctggagtctcactggaccaagtcgggggaaaaccagatcatgatgaccaaagtctacatattcttgatcttcatggtgctgatcctgccctccctgggtctcaccagtctagattttttcttccggtggctctttgacaaaacttcctcggaggcctccatcaggttggagtgygtcttcctgcctgaccagggtgccttctttgtgaactatgtcatcgcctcrgccttcatcggcaatggcatggagctgctgcggctgccaggtctcatcctctataccttccgcatgatcatggccaagacggctgctgaccgcaggaatgtcaagcagaaccaggccttccagtacgagtttggagccatgtatgcatggatgctgtgtgtcttcactgtcatcrtggcctacagcatcacttgtcccatcatcgcgccatttggcctcatctacatcctgctcaagcacatggtggaccggcacaacctctacttcgtctacctcccagccaagctggagaaggggatccactttgccgctgtgaaccaggccttggcagcccccatcctgtgcctcttctggctctacttcttttccttcctgcgcctgggtatgaaggcccccgccactctgttcaccttcctggtgctgctgctcaccatcctggtctgcctggctcacacctgctttggatgcttcaagcacctcagccctctgaactacaaaacagaagagcctgcaagtgacaaaggaagtgaggcagaggcccacatgcccccaccgttcacaccctaygtgcctcggattctgaacggcttggcctcggagaggacagcactgtctccgcagcagcagcagcagcagacctatggtgccatccacaacatcagcgggactatccctggacagtgcttggcgcagagcgccacrggcagtgtggctgctgccccccaggaggcctgaggctgggtctcactgctctgaaaagacacaaccagaatggcctggggctcaggcccttggctgagtgggaatgcgttgggactgcccagctgagctatcaggtgcccatcttttctggtcccagcagtggtgaggagagcacaggcaggcctcgcccctcccttgctcacccagtttcccctccggcacaagcttccagctctgcagctggggtgacatccccagtggtttgtcgccaagaccatgtggtggacttttcgccccccaaactgatgagtccgggagaatatatggagagagagatgtaacaaggggaaggcctcctcccttctgagcacacacacaaccgataaccaaagagatgctgcagtccaggtctgaggtcccgctggcatccagctccctgctccatggccagtccctccccagcccagcagtccctccaggctacatccaggagtaagctatggggaacaggttgggaggtggccagtgctcctgccagctgtgcacacatctctgtatcccgctagagttctgtgtttttgtatcatgttgtcagggacgctagctgggtcagggttaccccatagcaggcagggacaaggaccactcataatatgcccattggaccacagttaagatccagcctctctcacctcttcagggcygagtgcatgagtctgcacctccaggcaggctctgtgcagtactcaccccctccgtctgctccctccaaggtgtgggggtgggcagtgctcagggcctcctcggagccaaaggacagcatggtcggcacagaggaaggggtacctgggctgggtgcagggccatcccactgcccktgagctgtggctctggcaggaaggaggggcagcccatccctcttctccctcctggggattctggggaatgggatgcaacttaagacttctgcctgagaagcctcctccctgctgcctccagggggcaccaaggcacaagcctgtgcagtwggggcgggatgggggtgtggaagagcaggtccaggctcctagcacaactggcctggggccttggcacctctgtaggccctgcctgtgcctgtccgctggcctggggggcctgggcttatctgggccttctcactcagggactctcttgacgctgacttgcccccgcagyggtggccagtgctgcctctgctccaagctgcccctgcgctgggaggggtgggggcggtgccattggtctggtgcagcatagccctggccagtggcctcatccccagcaggcctcccgtgcctctgccagcaaggaggggccggccagctctgcttgcacagggggccccatgtggggtcagcgcacgctcatgtcactgagttccagccgcttttagagtaaagtcgtttatcatc

SEQ ID NO: 5848 - DNA, 1085 bp, Homo sapiens
gtagtcaactttgggcctggtccagccaagctgccacactcagtgttgttagagatacaaaaggaattattagactacaaaggaattggcattagtattcttgaaatgagtcacaggccgtcagattttatcaagattattaacaatgcagagaatcytgtgcggggattgctagctgttccagacaactacgaggtgatttttgtgcaaggaggtgggtcgagccagttcagtgctgtccccttaaagttgattggcttgaaagcaggaaggagtgcggactatgtggtgacaggagcttggtcagctaaggctgtagaagaagcctgggactataaatattgttcactctaaacttgggagttatacctaaattccagatccaagcacctggaacctcaacccggaagcctcctacgtgtattattgtgcaaatgggacggtgcatggcgtggaatttgactttatacccgatgtcaaaggagcagtactggtttgtgacatgttctcaaacttcctgtcgaagccagtggatgtttccaagtttgatgtgattttttctggtgcccagaagaatgttggctctgctggggtcactgtggtgatagtccgtgatgaccaactggggtttgccctccgagagtccccttcagtactggaatgcaaagtgcaggctggaaacagctcctcgtacaacacgcctccatgtttcagcatctacatcatgggcttgctcctggaatggactaaaaacaatggaggtgctgctgccatggagaagcttagctccatcaaatcccaaatgatttatgagattactgataattctcaaggattctacgtatgtccagtggagacccaaaatagaagcaagatgaatattccgttctgcattggcaatgtcaaaggagatgatgctttagtaaaaagatttctcgataaagcttttgaaactcaatatgttgtccttgaaagggcacaggtctgtgggaagcatccaggcctctctgtataattctgtcacaattgaagatgttcaggagctggccgccttcatgaaaaaatttttggagatgcgtcagcta

SEQ ID NO: 5849 - DNA, 1802 bp, Homo sapiens
cgcgttyctttcggagcggcggtgaaggtcctgggtgaggtagggktgkatggtgcttgccgcgtatcatggctgcctccggaaaactcagcacttgccgtctccctccgttgcccacgattcgagaaatcattaagttgttaagactgcaagcagcgaagcagctatcacagaatttcctcctggacttgaggctgacagataagattgtaaggaaagctggcaatctgacaaatgcttatgtttacgaagtgggccctgggccagggggaatcacaagatctattcttaatgccgacgtcgctgaacttctggtggttgaaaaggacactcgatttattcctggattacagatgctttctgatgcagcacctgggaaactgagaattgttcatggagatgtcttgacatttaaggtagaaaaggctttttcagaaagtcttaaaagaccctgggaagatgatcctccaaatgtacatattattggaaatctgccttttagtgtttcaactccactgattatcaagtggcttgaaaatatttcctgtagagatggaccttttgtttatggcagaactcagatgactttgacttttcaaaaggaagtggcagagagacttgcagccaatacaggaagcaaacagcgtagtcgcctctctgttatggctcagtacctctgcaatgttcgacacatctttacrattccaggacaagcttttgtccccaaaccagaggtggacgtgggcgtggtgcacttcactcccttgatacagcccaagatagagcagccattcaagctggtggaaaaagtggttcagaatgtatttcagttccgaaggaaatactgccatcgagggctcagaatgttattccctgaagcgcagcgcttggaaagcacgggcaggctgttagagttggcagacatagaccctactcttcggccccgccagctctccatctcacactttaagagcctctgtgatgtatacagaaaaatgtgtgatgaagacccacaactctttgcatataatttcagagaagaactcaagcgaagaaaaagcaaaaatgaagaaaaagaagaggatgacgcagagaattacagactctagctgctgcctgggggcgagcagcctaccagatgtcgatttgcactacgtggagcttcttatataggtactcttttgtctttacagaatgacgatacaaatgccaatgaccagatgtgacttattttccttttactatacagcttggcagagaaaataaatatcatcaaataagatacagtacaagctttcttttaatatatactgtatagatagwtatgacatgtttagtataaacagcatctattacaatcttacaaaaatgaagtatctgcacattttgcycctaaaccacattaaaataacttaaatatgctttaaataaagcaaaaactaacaaacagctgaaagaaaatgcccagaggatttwaaaaaatggccctttgaaaactattaatcacgacttccccagccttactttttccacataacttaattattagaatgtaattttaaggatcctaaatcatttgatacctgctcaaagtggatataaactaagtaatttacagattctgaccagtttcatctaggtttctgatccacaataaattaaaataacttaaatctttacaaccattttgtgggaaaatgtatactgcacaaaacccaggaatgaacagtttttttttttttttttttttgcaatttccactttaccaccagtttaaaagtaaaatgaggaatttaacccat

SEQ ID NO: 5850 - DNA, 2492 bp, Homo sapiens
cgccggtggggccggctgggactcgccgctcgcacgcccttgggcagcggcggggcgcctgctcttccttccgcttgcgctgtgagctgaggcggtgtatgtgcggcaataacatgtcaaccccgctgcccrccatcgtgcccgccscccggaaggccaccrctgaggtgattttcctgcatggattgggagatactgggcacggatgggcagaagcctttgcmggtatcakaagttcacatatcaaatatatctgcccgcatgcgcctgttaggcctgttaacattaaatatgaacatagctatgccttcatggtttgatattattgggctttcaccagattcacaggaggatgaatctgggattaaacaggcagcacaaaatataaaagctttgattgatcaagaagtgaagaatggcattccttctaacagaattattttgggagggttttctcagggaggagctttatctttatatactgcccttaccacgcaccagaaactggcaggtgtcactgcactcaattgctggcttccactttgggcttcctttccacagggtcctatyggtggtgcyaatagagatatttctattctccagtgccacggggattgtgaccctttggttcccctgatgtttggttctcttacggttgaaaaactaaaaaacattggtgaatccagccaatgtgacctttaaaacctatgaaggtatgatgcacagttcgtgtcaacaggaaatgatgaatgtcaagcaattcattgataaactcctacctccaattgattgacgtcactaagaggccttgtgtagaagtacaccagcatcattgtagtagagtataaaccttttcccatgcccagtcttcaaatttctaatgttttgcagtgttaaaatgttttgcaaatacatgccaataacacagatcaaataatgtctcctcatgagaaatttatgatcttttaagtttctatacatgtattcttataagacgacccaggatctactatattagaatagatgaagcaggtagcttcttttttctcaaatgtaattcagcaaaataatacagtactgccaccagattttttattacatcatttgaaaattagcagtatgcttaatgaaaatttgttcaggtataaatgagcagttaagatataaacaatttatgcatgytgtgacttagtctatggatttattccaaaattgcttagtcacyatgcagtgtctgtatttttatatatgygttcatatatacataatgattataatacataataagaatgaggtggtattacattattcctaataatagggataatgctgtttattgtcaagaaaaagtaaaatcgttctcttcawttaatggcccttttattttgggaccaggcttttattttccctgatattatttctatttaatactcttttctctcaagaaaaaaaaaaagtwtgttttttctttwttgtccttcatagcagrccaagtattgcctctctgcmatagacagctactgtcaatacatgctgtaatttgacattctgggtcacagatataaggtatttaaaatctatttatgctttatagagaaaccagacattaaaacttcatgcactacttatttcgaattactgtaccttatccaaatttacacctagctattaggatcttcaacccaggtaacaggaataattctgtggttttatttttctgtaaacagctgaaagaataattagatcatattctagtatgttctgaaatatctttaagactgatcttaaaaactaacttctaagatgatttcactttcccatagcatagagtttactttgtatacatgtttgaaaccaactactgtaggagatgaggaatttattgtaattttttgctttactttcatctgccagtggacttatttgaaattttcactttagtcaaattattttttgtattagtttttcatgcaaacataaaaatagcaatcattttaaattgtcaaaatttccagattactggtaaaaattatttgaaaacaaacttatgggtaataaaggctagtcagaaccctacacataaaatgtagttaccatacagattaatatgtagcaaaaatgtatgcttgatatttctgaactgtgttaatttttctgctgtattccagctgaccaaaacaatattaagaatgcatctttataaatgggtgctaattgataatggaaataatttagtaatggaccttataggatgttaataatgaagccatatgtttatgtctggatttaaaaattttaaacaaccatttactatgtcatttttctttaccttggagaacataaactgttatttcacttctacaaatcagcaagatattatttatggcaagaaatattccgttgaaatattgtgctgtaacatgggaaaatgtaaatgtttttcatggtttctatcaatgtgaaataaaatttaattctgaaaaaaaagagat

SEQ ID NO: 5851 - DNA, 2026 bp, Homo sapiens
gccatcgcgccattcctagttaaggcggcacagggccgagkcgtagtgtgggtgactcctccgttccttgggtcccgtcgtctgtgatactgcagygcagccatggcagaaccgcagcccccgtccggcggcctcacggacgaggccgccctcagttgctgctccgacgcggaccccagtaccaaggattttytattgcagcagaccatgctacgagtgaaggatcctaagaagtcactggatttttatactagagttcttggaatgacgctaatccaaaaatgtgattttcccattatgaagttttcactctacttcttggcttatgaggataaaaatgacatccctaaagaaaaagatgaaaaaatagcctgggcgctctccagaaaagctacacttgagctgacacacaattggggcactgaagatgatgmgacccagagttaccacaatggcaattcagaccctcgaggwttcggtcatattggaattgctgttcctgatgtatacagtgcttgtaaaaggtttgaagaactgggagtcaaatttgtgaagaaacctgatgatggtaaaatgaaaggcctggcatttattcaagatcctgatggctactggattgaaattttgaatcctaacaaaatggcaaccttaatgtagtgctgtgagaattctcctttgagatttcagaagaaaggaaacaatgtgattcaagatatttacataccagaagcatctaggactgatggatcactgtcccrattcaaattattcttcagtccatttccccttcctatttcagctgttccttttcacctaactgttcagtcattctggttttcaagcagtgctttatctcatgtccttgaatatagttgtgtaactttattttttaggtaataattagaacagttcccttcagaggctgcatttgccttcttctgccacctaaatattacttcccttcaaatctgcctttgaatcatcatttttaaaaaaaaattaacatgtttttgttgtagttatcttctggggtttcaattcctcagaaacaacttttttcacaacggaaaggaaagaacactagtgttctttcagtaaagtacaaagtgtttattttacaaaagagtaggtactcttgagagcaattcaaatcatgctgacaaggatactgatagaaaaagtgatttcttcttattataaagtacatttaaagttcaaggactaaccttatttatttgggaaaggggaggaggaaggaaatgatatggtacccagacactgggctaggctgcaactttatctcatttaatactcccagctgtcatgtgagaaagaaagcaggctaggcatgtgaaatcactttcatggattattaatggatttaagagggcatcaatcagctcaactcaagatttcataatcatttttagtatttagattgtgcctcaaagttgtagtacctcacaatacctccactggtttcctgttgtaaaaaccttcagtgagtttgaccattgtgctcttggctcttgggctggagtaccgtggtgagggagtaaacactagaagtctttagtacaaaactgctctagggacacctggtgattcctacacaagtgatgtttatatttctcataaagagtcttccctatcccaaggtcttcatgatgccagtagccatatatgataaattatgttcagtgataacttagttatcagaaatcagctcagtggtcttccccgccatgattcacatttgatgagtttttaaaaatcaaagtgattttgaaaatctctaatggctcagaaaataaaaacatccagtttgtggatgactatatttagatttctctagactctagtggaagacctttggaaaggccatgccaaccgtgcttgtactgctagaagcactttatgtttcctttttgrgtgaaatggatttatgtgagtgctttaaacaaatagcaatacttatagactgaaataaaatgaaacttcaaataagactatgtttaatttgtaa

SEQ ID NO: 5852 - DNA, 1938 bp, Homo sapiens
gccatcgcgccattcctagttaaggcggcacagggccgagkcgtagtgtgggtgactcctccgttccttgggtcccgtcgtctgtgatactgcagygcagccatggcagaaccgcagcccccgtccggcggcctcacggacgaggccgccctcagttgctgctccgacgcggaccccagtaccaaggattttytattgcagcagaccatgctacgagtgaaggatcctaagaagtcactggatttttatactagagttcttggaatgacgctaatccaaaaatgtgattttcccattatgaagttttcactctacttcttggcttatgaggataaaaatgacatccctaaagaaaaagatgaaaaaatagcctgggcgctctccagaaaagctacacttgagctgacacacaattggggcactgaagatgatgmgacccagagttaccacaatggcaattcagaccctcgaggwttcggtcatattggaattgctgttcctgatgtatacagtgcttgtaaaaggtttgaagaactgggagtcaaatttgtgaagaaacctgatgatggtaaaatgaaaggcctggcatttattcaagatcctgatggctactggattgaaattttgaatcctaacaaaatggcaaccttaatgtagtgctgtgagaattctcctttgagatttcagaagaaaggaaacaatgtgattcaagatatttacataccagaagcatctaggactgatggatcactgtcccrattcaaattattcttcagtccatttccccttcctatttcagctgttccttttcacctaactgttcagtcattctggttttcaagcagtgctttatctcatgtccttgaatatagttgtgtaactttattttttaggtaataattagaacagttcccttcagaggctgcatttgccttcttctgccacctaaatattacttcccttcaaatctgcctttgaatcatcatttttaaaaaaaaattaacatgtttttgttgtagttatcttctggggtttcaattcctcagaaacaacttttttcacaacggaaaggaaagaacactagtgttctttcagtaaagtacaaagtgtttattttacaaaagagtaggtactcttgagagcaattcaaatcatgctgacaaggatactgatagaaaaattatttgggaaaggggaggaggaaggaaatgatatggtacccagacactgggctaggctgcaactttatctcatttaatactcccagctgtcatgtgagaaagaaagcaggctaggcatgtgaaatcactttcatggattattaatggatttaagagggcatcaatcagctcaactcaagatttcataatcatttttagtatttagattgtgcctcaaagttgtagtacctcacaatacctccactggtttcctgttgtaaaaaccttcagtgagtttgaccattgtgctcttggctcttgggctggagtaccgtggtgagggagtaaacactagaagtctttagtacaaaactgctctagggacacctggtgattcctacacaagtgatgtttatatttctcataaagagtcttccctatcccaaggtcttcatgatgccagtagccatatatgataaattatgttcagtgataacttagttatcagaaatcagctcagtggtcttccccgccatgattcacatttgatgagtttttaaaaatcaaatggctcagaaaataaaaacatccagtttgtggatgactatatttagatttctctagactctagtggaagacctttggaaaggccatgccaaccgtgcttgtactgctagaagcactttatgtttcctttttgrgtgaaatggatttatgtgagtgctttaaacaaatagcaatacttatagactgaaataaaatgaaacttcaaataaga

SEQ ID NO: 5853 - DNA, 3022 bp, Homo sapiens
cgtcatccccagccagatttagctgctgacagctgcttgggactctgccgccagggcctggcccagacctgcctgcctctctcctctccctcagtgactcctgagccacagcccctccatggcccagaaggaagaggctgctgtggccactgaggctgcctcccagaatggggaggatctggagaacctggacgaccctgagaagctgaaagagctgattgagctgccgccctttgagattgtcacaggagaacggctgcctgccaacttctttaaattccagttccggaaygtggagtacagttccrggaggaacaagacsttcctctgctatgtggttgaagcacagggcaaggggggccaagtgcaggcatctcggggatacctagaggatgagcatgcggctgcccatgcagaggaagctttcttcaacaccatcctgccagccttcgacccagccctgcggtacaatgtcacctggtatgtgtcctccagcccctgtgcagcgtgtgctgaccgcattaycaaaacccttagcaagaccaagaacctgcgtctgctcattctggtgggtcgactcttcatgtgggaggagccggagatccaggctgctctgaagaagctgaaggaggctggctgtaaactgcgcatcatgaagccccaggacttcraatatgtctggcagaattttgtggagcaagaagagggtgaayccaaggcctttcagccctgggaggacattcaggagaacttcctatactacgaggagaagttggcagacatcctgaagtagggcaactgggctttgcctcacgtattcctgctgccaccaagagacagcaatgacatgtacagccatctgggacatgcctgtcttcctaataccatttggagctggacaacatttgacaccaaccaatcatactggacaaggcccttagaggacttgaaatatacttctcatgctgtagtttatttaggctgtgactctctctctaatgctgctctcgggaaggacgaaagtgacctgcaaggagagaaatgcaaccatacatgggctccagtcaactatgggactgaaggtcctaattgctcacccaagggggctgcttaacacaaacagcctcagacccgaggtttagatttctgaaatatgcattttatgttaagttgggtatttttttaaaaaaagaaaaacagcaacattaataaaagaagtggtgtgtttttcccgtggccagatttttaagaaacttgaacatctggaagttgccacagacaagcgagctagtccagacacagggacactccaggctatgaaccaagccatggttaaaccaagacttgcctagacaatgcagaataactctcccatacagacttcttacgacaatcaagtgagggcctttcccttctctgaaggcaagtaatagggcagaaggtggaacaaaaagcatgagaaatctaaggtagccacatcccaaatgccagttaataagcaactagcttctttattagagaggagcgggtgaaaagtagtagtttaatgttcagatatacaatcatttaaaagtattcaatacatggtgtttgatggtaatggcaggatgatgtcaagtctctctttttttttttttaaaggtttgtttgagtcctatgtggaagcaaaaattcacaggtgaatttccgggtgtttgccaaactctaactaggtttccaggaataatgtgttcactctgattaccagggcatgcctcctttcctcaggcttcaagtgtgataagtcgtcggaatttgacccaagactactatcggcaaatgacaaagtgctttatcacattcctgctaagtcccagaattccacttacagccaatcctgaatgagactaggttttgtctaaagaatcaaggctcaaacgccaagaaaaaaataataataataaccataatctctttaaaagtaaaggaagcctagaaaatccatgttttgacttgtgttaaggtttacagatggtactcaatttacaatggtttgtcttgcaatttttggactttacaacggtgcaaaagccatacacattcagtacacccttcaactgaactcaacttaagatggggttacccagacatagacctaagttgaggagcatctgtaattgcagagttaagcaaaatattttaagtttctttaagtttcttatcccccactctcactttcaattttgtgtatttagataatctctccttcctttttcccttcaactttatgtggacaaaagcaatgcttcaagaaaagcctcaatctaaaagtttgataatgaacttgaccctccactgcccctaccccaacaacatgaagaacttgtctgttccacctagaaatacaaaagtgaaatacttttttgaaactgttgcctcttatcaggctgatatgtgataagaacacagtctaaagtacaaagattatatttaaccagtactttcctggtgttttaaccagccccttctaaaatacagttgttcttttatacttgggaaagcagcaagtcctgtgacagacccaaagtcactctagggagaaaatcaatagcaagtctggctgttttaactctcamcaccactgtaagggaaaacaagaaaatgtctagtttcccgaatagctctgatactgaaccattggctaaatccatgaactttattttcctaccatgaccacaatagacgactggtctttgcagcttcggaagaaaagaggactaatatttagaccccagctggctgcacatccaaatcttctatggaggttaaaaacacaaaagtggccatcccactccaccaccaaatttttttttttaattgagatagggtcttgctctgttgcccacactggagtgcagtggcacaatcacagctcaatgcaacttcaacctcccaggctcaagccatcctcccgcctcaacctctagagtagctggaactacaggcctgcaccaccaggcccagctaatttttaatttctttt

SEQ ID NO: 5854 - DNA, 3520 bp, Homo sapiens
ctgaggcggcggcggcggcggcgctcggggagggttgggccaggcaagggcgggagggcggcggcggcggccggagcggcgagcatggcccgcgcggcgccgggcgctgactgagggtcgtgctgcggcagcctggcgcccgacatgtgaaggggaacctgccaggggattactgtgagctcacagcaggataggctggccccgggggagtggggatgggcagaacctgggccaggagtattaggaaggagacctggaccctggtagggagctcagcacaagctcgcctgacccagatggtattggacacagtgccccgctgaacagcagctgttcccagcgccagaggaccccacagccacagtaggagctttgcgacccctacgcaactgcagctggggctggggccaccaggagaagggaccagcacctcagatgggaagcagaagggcaagacctactgcggaaaggatctcgatctctgcagcggagttttcccacactcacagagcttcctgtttttgtcctctcagggttggggtctggctcccctcctctggcagaggttttgggccaggaggtgggacaacacttgcatggaacccaagtcccctgaagcccctgtgctctctgttgtgattggagttctagggcttccccgctgccgggaacgaggggccgcctcattgtctgctcatgaaccacaaggaccccgactgctccagactggattatttcaagccgccaaagagggggacccctagagctggcagccagcaatcccaagggactagagggctgcaatggactgacctccccctcaccagggtggcaggagaggcagagcctctgtggcctagctagtgacggagagacccgatgaagccctaagcaggggccccgcctgactcagggacaggacagccactcctgccaacgtgtgttctccctacatgagggagggcgtggcaagggacccctgccactgtcccctgctgcagcacgtgcccctatgccctttrcatgtggtgccagaataggcaggctacgccgtggctggcccctcagcgggctgggaaaagagtggccacggtgaccgtcacccgcctgccggcaccatgaagtgctccctgcgggtgtggttcctctccgtggccttcctgctggtgttcatcatgtccctgctcttcacctactcgcaccacagcatggccacgctcccctacctggactcaggggccctggatgggacgcaccgggtgaagctggtgcccggctatgccggcctgcagcgcctcagcaaggagaggctctcrggcaagagctgtgcctgtcgccgctgcatgggcgatgccggtgcctccgactggtttgacagccactttgacggtaacatttcccccgtctggacccgagagaacatggatcttccaccggacgtccagaggtggtggatgatgctgcagccccagttcaagtcacacaacaccaatgaggtgctggagaagctgttccagatagtgcctggcgagaacccctaccgcttccgggacccccaccagtgccggcgctgtgccgtggtggggaactcgggcaacctgcggggctctggctatgggcaggacgtggacgggcacaacttcatcatgaggatgaatcaggcgccaaccgtgggctttgagcaggatgttggcagccgaaccacccaccatttcatgtaccctgagagtgccaagaacctgcccgccaacgtcagcttcgtgctggtgcccttcaaggtcctggaccttctgtggatcgccagcgccttgtccacggggcagatccgattcacctacgccccagtgaagtccttccttcgagtggataaagaaaaggtccagatctacaacccagccttcttcaagtatatccacgacaggtggacagagcatcacgggcggtacccttccacggggatgctggtgcttttctttgccctgcatgtgtgtgatgaggtgaacgtgtacgggttcggggccgacagccggggcaactggcaccactactgggagaacaaccggtacgcgggcgagttccggaagactggcgtgcacgacgcggacttcgaggcccacatcatcgacatgctggccaaggccagcaagatcgaagtctaccggggcaactgagccgggcctcgccgcgacccttscrgcccatctatcgggcaccggggctccggcccgggacccaggaccagcaacccgcgaccaatcatgctgcagcccaggggcgtctgctgtgccccgccaatcacgagactgggggaccggccgggcctggcaccaatctgcgctgcggtcgggcggagcttctgtttctcccagccaatcatgtgactcaaggaaaacttccggcgctgtgtccagtctcctccaatcaatggccttcgggggcgggccagcggccgctcaatccccactccctcatgctttgggttagggttttctttcacgctttctgaggaggagagcatggcgcgggcytcggcgaagcacttccgtcagcctcgggcggaggatcgtcttagtagctggccagacctggaggagagcgggcggtctttgcgggcctcaggagataggtggccgcccggcccctttccccgcctgcccggataggtgcgtgcagacccaccaaagaaaagcggtcgctgcgggacccccagtcccacctcggccgcgctgtgggatggctgcgcccccagggcttcctgcgtctccaggaagccgggagtggcgccctctgcggggtggggtgctcccgggccgaactccggacaggtggaggggacagggcagagctcgaggaagccctgtccccttcagtgcaaggtgctgtcactcacgtgtgccctcgaccctcccgttcacccgcagccttctcagcgcctctccctgggccggaggcctcctcaccagcctacctgttgctctggaaaaaaatcccgtcccccgactccgtccctacccccagtcttcggccggctctggcccctggggagggggctgcacggcggaaggaggctggctatgggcccggctgcccgctgcatgtacctcctcctccacccatcgcctcttgcctgggggtaactttgcctggggctcattctttggttaagctgaagctgccgtgggtggccaaaccgcagattctttgcaaattctgagctggcagagctcgcagccgggagccggccggggaagaggagacttgcgcgccgcaagccgcctgcctccaccctgctctccatctcccgctctagaagggctgggaagctcgcggccggggttccacctggaagctgcttgcatggctgaacccagcttaggtccctgacggggctgctggtggaattctcccccttcgaagctggggaggtttaggagggggaaggcttctgtgaagctctcaaaccactaatagagccccctccccaacagtgacggcgcagatgctcccccttttcttagtt

SEQ ID NO: 5855 - DNA, 3854 bp, Homo sapiens
ctgaggcggcggcggcggcggcgctcggggagggttgggccaggcaagggcgggagggcggcggcggcggccggagcggcgagcatggcccgcgcggcgccgggcgctgactgagggtcgtgctgcggcagcctggcgcccgacatgtgaaggggaacctgccaggggattactgtgagctcacagcaggataggctggccccgggggagtggggatgggcagaacctgggccaggagtattaggaaggagacctggaccctggtagggagctcagcacaagctcgcctgacccagatggtattggacacagtgccccgctgaacagcagctgttcccagcgccagaggaccccacagccacagtaggagctttgcgacccctacgcaactgcagctggggctggggccaccaggagaagggaccagcacctcagatgggaagcagaagggcaagacctactgcggaaaggatctcgatctctgcagcggagttttcccacactcacagagcttcctgtttttgtcctctcagggttggggtctggctcccctcctctggcagaggttttgggccaggaggtgggacaacacttgcatggaacccaagtcccctgaagcccctgtgctctctgttgtgattggagttctagggcttccccgctgccgggaacgaggggccgcctcattgtctgctcatgaaccacaaggaccccgactgctccagactggattatttcaagccgccaaagagggggacccctagagctggcagccagcaatcccaagggactagagggctgcaatggactgacctccccctcaccagggtggcaggagaggcagagcctctgtggcctagctagtgacggagagacccgatgaagccctaagcaggggccccgcctgactcagggacaggacagccactcctgccaacgtgtgttctccctacatgagggagggcgtggcaagggacccctgccactgtcccctgctgcagcacgtgcccctatgccctttrcatgtggtgccagaataggcaggctacgccgtggctggcccctcagcgggctgggaaaagagtggccacggtgaccgtcacccgcctgccggcaccatgaagtgctccctgcgggtgtggttcctctccgtggccttcctgctggtgttcatcatgtccctgctcttcacctactcgcaccacagcatggccacgctcccctacctggactcaggggccctggatgggacgcaccgggtgaagctggtgcccggctatgccggcctgcagcgcctcagcaaggagaggctctcrggcaagagctgtgcctgtcgccgctgcatgggcgatgccggtgcctccgactggtttgacagccactttgacggtaacatttcccccgtctggacccgagagaacatggatcttccaccggacgtccagaggtggtggatgatgctgcagccccagttcaagtcacacaacaccaatgaggtgctggagaagctgttccagatagtgcctggcgagaacccctaccgcttccgggacccccaccagtgccggcgctgtgccgtggtggggaactcgggcaacctgcggggctctggctatgggcaggacgtggacgggcacaacttcatcatgaggatgaatcaggcgccaaccgtgggctttgagcaggatgttggcagccgaaccacccaccatttcatgtaccctgagagtgccaagaacctgcccgccaacgtcagcttcgtgctggtgcccttcaaggtcctggaccttctgtggatcgccagcgccttgtccacggggcagatccgattcacctacgccccagtgaagtccttccttcgagtggataaagaaaaggtccagatctacaacccagccttcttcaagtatatccacgacaggtggacagagcatcacgggcggtacccttccacggggatgctggtgcttttctttgccctgcatgtgtgtgatgaggtgaacgtgtacgggttcggggccgacagccggggcaactggcaccactactgggagaacaaccggtacgcgggcgagttccggaagactggcgtgcacgacgcggacttcgaggcccacatcatcgacatgctggccaaggccagcaagatcgaagtctaccggggcaactgagccgggcctcgccgcgacccttscrgcccatctatcgggcaccggggctccggcccgggacccaggaccagcaacccgcgaccaatcatgctgcagcccaggggcgtctgctgtgccccgccaatcacgagactgggggaccggccgggcctggcaccaatctgcgctgcggtcgggcggagcttctgtttctcccagccaatcatgtgactcaaggaaaacttccggcgctgtgtccagtctcctccaatcaatggccttcgggggcgggccagcggccgctcaatccccactccctcatgctttgggttagggttttctttcacgctttctgaggaggagagcatggcgcgggcytcggcgaagcacttccgtcagcctcgggcggaggatcgtcttagtagctggccagacctggaggagagcgggcggtctttgcgggcctcaggagataggtggccgcccggcccctttccccgcctgcccggataggtgcgtgcagacccaccaaagaaaagcggtcgctgcgggacccccagtcccacctcggccgcgctgtgggatggctgcgcccccagggcttcctgcgtctccaggaagccgggagtggcgccctctgcggggtggggtgctcccgggccgaactccggacaggtggaggggacagggcagagctcgaggaagccctgtccccttcagtgcaaggtgctgtcactcacgtgtgccctcgaccctcccgttcacccgcagccttctcagcgcctctccctgggccggaggcctcctcaccagcctacctgttgctctggaaaaaaatcccgtcccccgactccgtccctacccccagtcttcggccggctctggcccctggggagggggctgcacggcggaaggaggctggctatgggcccggctgcccgctgcatgtacctcctcctccacccatcgcctcttgcctgggggtaactttgcctggggctcattctttggttaagctgaagctgccgtgggtggccaaaccgcagattctttgcaaattctgagctggcagagctcgcagccgggagccggccggggaagaggagacttgcgcgccgcaagccgcctgcctccaccctgctctccatctcccgctctagaagggctgggaagctcgcggccggggttccacctggaagctgcttgcatggctgaacccagcttaggtccctgacggggctgctggtggaattctcccccttcggttgggatgggcagtgggcccctgaaagttaatatattggaacctagctcgagtgtcgttctttccaattccgaaagtagaaagagtaaaaataggggtgattggggtggggttagtagaatgcctctctcagggcgctcccccctcccccaccgttttagagagctaggcctcagccagtcttgccactcccatctcagtgcttcctgaagaggctgttttgagtgttgatgaaaagcaatgcaattatgccaaacagtattgagcagaataatttatttcttttttttcttttgctttaaatcatgaatcccgccaggtacggtggctcacacctgtcatcccagcactttgggaggccaaggcgggcggattacttaatacttaaggtcaggagttcgagaccagcctggccaatatggtgaaacctcgtctctacc

SEQ ID NO: 5856 - DNA, 3405 bp, Homo sapiens
ggtcgtgctgcggcagcctggcgcccgacatgtgaaggggaacctgccaggggattactgtgagctcacagcaggataggctggccccgggggagtggggatgggcagaacctgggccaggagtattaggaaggagacctggaccctggtagggagctcagcacaagctcgcctgacccagatggtattggacacagtgccccgctgaacagcagctgttcccagcgccagaggaccccacagccacagtaggagctttgcgacccctacgcaactgcagctggggctggggccaccaggagaagggaccagcacctcagatgggaagcagaagggcaagacctactgcggaaaggatctcgatctctgcagcggagttttcccacactcacagagcttcctgtttttgtcctctcagggttggggtctggctcccctcctctggcagaggttttgggccaggaggtgggacaacacttgcatggaacccaagtcccctgaagcccctgtgctctctgttgtgattggagttctagggcttccccgctgccgggaacgaggggccgcctcattgtctgctcatgaaccacaaggaccccgactgctccagactggattatttcaagccgccaaagagggggacccctagagctggcagccagcaatcccaagggactagagggctgcaatggactgacctccccctcaccagggtggcaggagaggcagagcctctgtggcctagctagtgacggagagacccgatgaagccctaagcaggggccccgcctgactcagggacaggacagccactcctgccaacgtgtgttctccctacatgagggagggcgtggcaagggacccctgccactgtcccctgctgcagcacgtgcccctatgccctttrcatgtggtgccagaataggcaggctacgccgtggctggcccctcagcgggctgggaaaagagtggccacggtgaccgtcacccgcctgccggcaccatgaagtgctccctgcgggtgtggttcctctccgtggccttcctgctggtgttcatcatgtccctgctcttcacctactcgcaccacagcatggccacgctcccctacctggactcaggggccctggatgggacgcaccgggtgaagctggtgcccggctatgccggcctgcagcgcctcagcaaggagaggctctcrggcaagagctgtgcctgtcgccgctgcatgggcgatgccggtgcctccgactggtttgacagccactttgacggtaacatttcccccgtctggacccgagagaacatggatcttccaccggacgtccagaggtggtggatgatgctgcagccccagttcaagtcacacaacaccaatgaggtgctggagaagctgttccagatagtgcctggcgagaacccctaccgcttccgggacccccaccagtgccggcgctgtgccgtggtggggaactcgggcaacctgcggggctctggctatgggcaggacgtggacgggcacaacttcatcatgaggatgaatcaggcgccaaccgtgggctttgagcaggatgttggcagccgaaccacccaccatttcatgtaccctgagagtgccaagaacctgcccgccaacgtcagcttcgtgctggtgcccttcaaggtcctggaccttctgtggatcgccagcgccttgtccacggggcagatccgattcacctacgccccagtgaagtccttccttcgagtggataaagaaaaggtccagatctacaacccagccttcttcaagtatatccacgacaggtggacagagcatcacgggcggtacccttccacggggatgctggtgcttttctttgccctgcatgtgtgtgatgaggtgaacgtgtacgggttcggggccgacagccggggcaactggcaccactactgggagaacaaccggtacgcgggcgagttccggaagactggcgtgcacgacgcggacttcgaggcccacatcatcgacatgctggccaaggccagcaagatcgaagtctaccggggcaactgagccgggcctcgccgcgacccttscrgcccatctatcgggcaccggggctccggcccgggacccaggaccagcaacccgcgaccaatcatgctgcagcccaggggcgtctgctgtgccccgccaatcacgagactgggggaccggccgggcctggcaccaatctgcgctgcggtcgggcggagcttctgtttctcccagccaatcatgtgactcaaggaaaacttccggcgctgtgtccagtctcctccaatcaatggccttcgggggcgggccagcggccgctcaatccccactccctcatgctttgggttagggttttctttcacgctttctgaggaggagagcatggcgcgggcytcggcgaagcacttccgtcagcctcgggcggaggatcgtcttagtagctggccagacctggaggagagcgggcggtctttgcgggcctcaggagataggtggccgcccggcccctttccccgcctgcccggataggtgcgtgcagacccaccaaagaaaagcggtcgctgcgggacccccagtcccacctcggccgcgctgtgggatggctgcgcccccagggcttcctgcgtctccaggaagccgggagtggcgccctctgcggggtggggtgctcccgggccgaactccggacaggtggaggggacagggcagagctcgaggaagccctgtccccttcagtgcaaggtgctgtcactcacgtgtgccctcgaccctcccgttcacccgcagccttctcagcgcctctccctgggccggaggcctcctcaccagcctacctgttgctctggaaaaaaatcccgtcccccgactccgtccctacccccagtcttcggccggctctggcccctggggagggggctgcacggcggaaggaggctggctatgggcccggctgcccgctgcatgtacctcctcctccacccatcgcctcttgcctgggggtaactttgcctggggctcattctttggttaagctgaagctgccgtgggtggccaaaccgcagattctttgcaaattctgagctggcagagctcgcagccgggagccggccggggaagaggagacttgcgcgccgcaagccgcctgcctccaccctgctctccatctcccgctctagaagggctgggaagctcgcggccggggttccacctggaagctgcttgcatggctgaacccagcttaggtccctgacggggctgctggtggaattctcccccttcgaagctggggaggtttaggagggggaaggcttctgtgaagctctcaaaccactaatagagccccctccccaacagtgacggcgcagatgctcccccttttcttagtt

SEQ ID NO: 5857 - DNA, 3950 bp, Homo sapiens
ccgggctgaggcggcggcggcggcggcgctcggggagggttgggccaggcaagggcgggactagcccacggcgggcggacgagagagctgcgagctaacgggtccggacgacggcggcggcggcggcggcggcggcgacggctttctgcgcgggcggcggcggcggccggagcggcgagcatggcccgcgcggcgccgggcgctgactgagggtcgtgctgcggcagcctggcgcccgacatgtgaaggggaacctgccaggggattactgtgagctcacagcaggataggctggccccgggggagtggggatgggcagaacctgggccaggagtattaggaaggagacctggaccctggtagggagctcagcacaagctcgcctgacccagatggtattggacacagtgccccgctgaacagcagctgttcccagcgccagaggaccccacagccacagtaggagctttgcgacccctacgcaactgcagctggggctggggccaccaggagaagggaccagcacctcagatgggaagcagaagggcaagacctactgcggaaaggatctcgatctctgcagcggagttttcccacactcacagagcttcctgtttttgtcctctcagggttggggtctggctcccctcctctggcagaggttttgggccaggaggtgggacaacacttgcatggaacccaagtcccctgaagcccctgtgctctctgttgtgattggagttctagggcttccccgctgccgggaacgaggggccgcctcattgtctgctcatgaaccacaaggaccccgactgctccagactggattatttcaagccgccaaagagggggacccctagagctggcagccagcaatcccaagggactagagggctgcaatggactgacctccccctcaccagggtggcaggagaggcagagcctctgtggcctagctagtgacggagagacccgatgaagccctaagcaggggccccgcctgactcagggacaggacagccactcctgccaacgtgtgttctccctacatgagggagggcgtggcaagggacccctgccactgtcccctgctgcagcacgtgcccctatgccctttrcatgtggtgccagaataggcaggctacgccgtggctggcccctcagcgggctgggaaaagagtggccacggtgaccgtcacccgcctgccggcaccatgaagtgctccctgcgggtgtggttcctctccgtggccttcctgctggtgttcatcatgtccctgctcttcacctactcgcaccacagcatggccacgctcccctacctggactcaggggccctggatgggacgcaccgggtgaagctggtgcccggctatgccggcctgcagcgcctcagcaaggagaggctctcrggcaagagctgtgcctgtcgccgctgcatgggcgatgccggtgcctccgactggtttgacagccactttgacggtaacatttcccccgtctggacccgagagaacatggatcttccaccggacgtccagaggtggtggatgatgctgcagccccagttcaagtcacacaacaccaatgaggtgctggagaagctgttccagatagtgcctggcgagaacccctaccgcttccgggacccccaccagtgccggcgctgtgccgtggtggggaactcgggcaacctgcggggctctggctatgggcaggacgtggacgggcacaacttcatcatgaggatgaatcaggcgccaaccgtgggctttgagcaggatgttggcagccgaaccacccaccatttcatgtaccctgagagtgccaagaacctgcccgccaacgtcagcttcgtgctggtgcccttcaaggtcctggaccttctgtggatcgccagcgccttgtccacggggcagatccgattcacctacgccccagtgaagtccttccttcgagtggataaagaaaaggtccagatctacaacccagccttcttcaagtatatccacgacaggtggacagagcatcacgggcggtacccttccacggggatgctggtgcttttctttgccctgcatgtgtgtgatgaggtgaacgtgtacgggttcggggccgacagccggggcaactggcaccactactgggagaacaaccggtacgcgggcgagttccggaagactggcgtgcacgacgcggacttcgaggcccacatcatcgacatgctggccaaggccagcaagatcgaagtctaccggggcaactgagccgggcctcgccgcgacccttscrgcccatctatcgggcaccggggctccggcccgggacccaggaccagcaacccgcgaccaatcatgctgcagcccaggggcgtctgctgtgccccgccaatcacgagactgggggaccggccgggcctggcaccaatctgcgctgcggtcgggcggagcttctgtttctcccagccaatcatgtgactcaaggaaaacttccggcgctgtgtccagtctcctccaatcaatggccttcgggggcgggccagcggccgctcaatccccactccctcatgctttgggttagggttttctttcacgctttctgaggaggagagcatggcgcgggcytcggcgaagcacttccgtcagcctcgggcggaggatcgtcttagtagctggccagacctggaggagagcgggcggtctttgcgggcctcaggagataggtggccgcccggcccctttccccgcctgcccggataggtgcgtgcagacccaccaaagaaaagcggtcgctgcgggacccccagtcccacctcggccgcgctgtgggatggctgcgcccccagggcttcctgcgtctccaggaagccgggagtggcgccctctgcggggtggggtgctcccgggccgaactccggacaggtggaggggacagggcagagctcgaggaagccctgtccccttcagtgcaaggtgctgtcactcacgtgtgccctcgaccctcccgttcacccgcagccttctcagcgcctctccctgggccggaggcctcctcaccagcctacctgttgctctggaaaaaaatcccgtcccccgactccgtccctacccccagtcttcggccggctctggcccctggggagggggctgcacggcggaaggaggctggctatgggcccggctgcccgctgcatgtacctcctcctccacccatcgcctcttgcctgggggtaactttgcctggggctcattctttggttaagctgaagctgccgtgggtggccaaaccgcagattctttgcaaattctgagctggcagagctcgcagccgggagccggccggggaagaggagacttgcgcgccgcaagccgcctgcctccaccctgctctccatctcccgctctagaagggctgggaagctcgcggccggggttccacctggaagctgcttgcatggctgaacccagcttaggtccctgacggggctgctggtggaattctcccccttcggttgggatgggcagtgggcccctgaaagttaatatattggaacctagctcgagtgtcgttctttccaattccgaaagtagaaagagtaaaaataggggtgattggggtggggttagtagaatgcctctctcagggcgctcccccctcccccaccgttttagagagctaggcctcagccagtcttgccactcccatctcagtgcttcctgaagaggctgttttgagtgttgatgaaaagcaatgcaattatgccaaacagtattgagcagaataatttatttcttttttttcttttgctttaaatcatgaatcccgccaggtacggtggctcacacctgtcatcccagcactttgggaggccaaggcgggcggattacttaatacttaaggtcaggagttcgagaccagcctggccaatatggtgaaacctcgtctctacc

SEQ ID NO: 5858 - DNA, 3616 bp, Homo sapiens
ccgggctgaggcggcggcggcggcggcgctcggggagggttgggccaggcaagggcgggactagcccacggcgggcggacgagagagctgcgagctaacgggtccggacgacggcggcggcggcggcggcggcggcgacggctttctgcgcgggcggcggcggcggccggagcggcgagcatggcccgcgcggcgccgggcgctgactgagggtcgtgctgcggcagcctggcgcccgacatgtgaaggggaacctgccaggggattactgtgagctcacagcaggataggctggccccgggggagtggggatgggcagaacctgggccaggagtattaggaaggagacctggaccctggtagggagctcagcacaagctcgcctgacccagatggtattggacacagtgccccgctgaacagcagctgttcccagcgccagaggaccccacagccacagtaggagctttgcgacccctacgcaactgcagctggggctggggccaccaggagaagggaccagcacctcagatgggaagcagaagggcaagacctactgcggaaaggatctcgatctctgcagcggagttttcccacactcacagagcttcctgtttttgtcctctcagggttggggtctggctcccctcctctggcagaggttttgggccaggaggtgggacaacacttgcatggaacccaagtcccctgaagcccctgtgctctctgttgtgattggagttctagggcttccccgctgccgggaacgaggggccgcctcattgtctgctcatgaaccacaaggaccccgactgctccagactggattatttcaagccgccaaagagggggacccctagagctggcagccagcaatcccaagggactagagggctgcaatggactgacctccccctcaccagggtggcaggagaggcagagcctctgtggcctagctagtgacggagagacccgatgaagccctaagcaggggccccgcctgactcagggacaggacagccactcctgccaacgtgtgttctccctacatgagggagggcgtggcaagggacccctgccactgtcccctgctgcagcacgtgcccctatgccctttrcatgtggtgccagaataggcaggctacgccgtggctggcccctcagcgggctgggaaaagagtggccacggtgaccgtcacccgcctgccggcaccatgaagtgctccctgcgggtgtggttcctctccgtggccttcctgctggtgttcatcatgtccctgctcttcacctactcgcaccacagcatggccacgctcccctacctggactcaggggccctggatgggacgcaccgggtgaagctggtgcccggctatgccggcctgcagcgcctcagcaaggagaggctctcrggcaagagctgtgcctgtcgccgctgcatgggcgatgccggtgcctccgactggtttgacagccactttgacggtaacatttcccccgtctggacccgagagaacatggatcttccaccggacgtccagaggtggtggatgatgctgcagccccagttcaagtcacacaacaccaatgaggtgctggagaagctgttccagatagtgcctggcgagaacccctaccgcttccgggacccccaccagtgccggcgctgtgccgtggtggggaactcgggcaacctgcggggctctggctatgggcaggacgtggacgggcacaacttcatcatgaggatgaatcaggcgccaaccgtgggctttgagcaggatgttggcagccgaaccacccaccatttcatgtaccctgagagtgccaagaacctgcccgccaacgtcagcttcgtgctggtgcccttcaaggtcctggaccttctgtggatcgccagcgccttgtccacggggcagatccgattcacctacgccccagtgaagtccttccttcgagtggataaagaaaaggtccagatctacaacccagccttcttcaagtatatccacgacaggtggacagagcatcacgggcggtacccttccacggggatgctggtgcttttctttgccctgcatgtgtgtgatgaggtgaacgtgtacgggttcggggccgacagccggggcaactggcaccactactgggagaacaaccggtacgcgggcgagttccggaagactggcgtgcacgacgcggacttcgaggcccacatcatcgacatgctggccaaggccagcaagatcgaagtctaccggggcaactgagccgggcctcgccgcgacccttscrgcccatctatcgggcaccggggctccggcccgggacccaggaccagcaacccgcgaccaatcatgctgcagcccaggggcgtctgctgtgccccgccaatcacgagactgggggaccggccgggcctggcaccaatctgcgctgcggtcgggcggagcttctgtttctcccagccaatcatgtgactcaaggaaaacttccggcgctgtgtccagtctcctccaatcaatggccttcgggggcgggccagcggccgctcaatccccactccctcatgctttgggttagggttttctttcacgctttctgaggaggagagcatggcgcgggcytcggcgaagcacttccgtcagcctcgggcggaggatcgtcttagtagctggccagacctggaggagagcgggcggtctttgcgggcctcaggagataggtggccgcccggcccctttccccgcctgcccggataggtgcgtgcagacccaccaaagaaaagcggtcgctgcgggacccccagtcccacctcggccgcgctgtgggatggctgcgcccccagggcttcctgcgtctccaggaagccgggagtggcgccctctgcggggtggggtgctcccgggccgaactccggacaggtggaggggacagggcagagctcgaggaagccctgtccccttcagtgcaaggtgctgtcactcacgtgtgccctcgaccctcccgttcacccgcagccttctcagcgcctctccctgggccggaggcctcctcaccagcctacctgttgctctggaaaaaaatcccgtcccccgactccgtccctacccccagtcttcggccggctctggcccctggggagggggctgcacggcggaaggaggctggctatgggcccggctgcccgctgcatgtacctcctcctccacccatcgcctcttgcctgggggtaactttgcctggggctcattctttggttaagctgaagctgccgtgggtggccaaaccgcagattctttgcaaattctgagctggcagagctcgcagccgggagccggccggggaagaggagacttgcgcgccgcaagccgcctgcctccaccctgctctccatctcccgctctagaagggctgggaagctcgcggccggggttccacctggaagctgcttgcatggctgaacccagcttaggtccctgacggggctgctggtggaattctcccccttcgaagctggggaggtttaggagggggaaggcttctgtgaagctctcaaaccactaatagagccccctccccaacagtgacggcgcagatgctcccccttttcttagtt

SEQ ID NO: 5859 - DNA, 4485 bp, Homo sapiens
cggtggaaggcggaagtaggagaggagttcggcgccgcttctgtggccacggcagcttcacggtgatgatatggcatctgccagctctagccgggcaggagtggccctgccttttgagaagtctcagctcactttgaaagtggtgtcygcaaagcccaaggtgcataatcgtcaacckcgaattaactcctacgtggaggtggcggtggatggactccccagtgagaccaagaagactgggaagcgcattgggagctctgagcttctctggaatgagatcatcattttgaatgtcacggcacagagtcatttagatttaaaggtctggagctgccataccttgagaaatgaactgctaggcaccgcatctgtcaacctctccaacgtcttgaagaacaatgggggcaaaatggagaacatgcagctgaccctgaacctgcagacggagaacaaaggcagcgttgtctcaggcggagagctgacaattttcctggacgggccaactgttgatctgggaaatgtgcctaatggcagtgccctgacagatggatcacagctgccttcgagagactccagtggaacagcagtagctccagagaaccggcaccagccccccagcacaaactgctttggtggaagatcccggacgcacagacattcgggtgcttcagccagaacaaccccagcaaccggcgagcaaagccccggtgctcggagccggcaccgccagcccgtcaagaactcaggccacagtggcttggccaatggcacagtgaatgatgaacccacaacagccactgatcccgaagaaccttccgttgttggtgtgacgtccccacctgctgcaccyttgagtgtgaccccgaatcccaacacgacttctctccctgccccagccacaccggctgaaggagaggaacccagcacttcgggtacacagcagctcccagcggctgcccaggcccccgacgctctgcctgctggatgggaacagcgagagctgcccaacggacgtgtctattatgttgaccacaataccaagaccaccacctgggagcggccccttcctccaggctgggaaaaacgcacagatccccgaggcaggttttactatgtggatcacaatactcggaccaccacctggcagcgtccgaccgcggagtacgtgcgcaactatgagcagtggcagtcgcagcggaatcagctccagggggccatgcagcacttcagccaaagattcctctaccagtcttcgagtgcttcgactgaccatgatcccctgggccccctccctcctggctgggagaaragacaggacaatggacgggtgtattacgtgaaccataacactcgcacracccagtgggaggatccccggacccaggggatgatccaggaaccagctctgcccccaggatgggagatgaaatacaccagcgagggggtgcgatactttgtggaccacaatacccgcaccaccacctttaaggatcctcgcccggggtttgagtcggggacgaagcaaggttcccctggtgcttatgaccgcagttttcggtggaagtatcaccagttccgtttcctctgccattcaaatgccctacctagccacgtgaagatcagcgtttccaggcagacgcttttcgaagattccttccaacagatcatgaacatgaaaccctatgacctgcgccgccggctctacatcatcatgcgtggcgaggagggcctggactatgggggcatcgccagagagtggtttttcctcctgtctcaygaggtgctcaaccctatgtattgtttatttgaatatgccggaaagaacaattactgcctgcagatcaacccygcctcctccatcaacccggaccacctcacctactttcgctttataggcagattcatcgccatggcgctgtaccatggaaagttcatcgacacgggcttcaccctccctttctacaagcggatgctcaataagagaccaaccctgaaagacctggagtccattgaccctgagttctacaactccattgtctggatcaaagagaacaacctggaagaatgtggcctggagctgtacttcatccaggacatggagatactgggcaaggtgacgacccacgagctgaaggagggcggcgagagcatccgggtcacrgaggagaacaaggaagagtacatcatgctgctgactgactggcgtttcacccgaggcgtggaagagcagaccaaagccttcctggatggcttcaacgaggtggccccgctggagtggctgcgctactttgacgagaaagagctggagctgatgctgtgcggcatgcaggagatagacatgagcgactggcagaagagcaccatctaccggcactacaccaagaacagcaagcagatccastggttctggcaggtggtgaaggagatggacaacgagaagaggatccggctgctgcagtttgtcaccggtacctgccgcctgcccgtcgggggatttgccgaactcatcggtagcaacggaccacagaagttttgcattgacaaagttggcaaggaaacctggytgcccagaagccacacctgcttcaaccgtctggatcttccaccctacaagagctacgaacagctgagagagaagctgctgtatgccattgaggagaccgarggctttggacaggagtaaccgaggccgcccctcccacgccccccagcgcacatgtagtcctgagtcctccctgcctgagaggccactggccccgcagcccttgggaggcccccgtggatgtggccctgtgtgggaccacactgtcatctcgctgctggcagaaaagcctgatcccaggaggccctgcagttcccccgacccgcggatggcagtctggaataaagccccctagttgcctttggccccacctttgcaaagttccagagggctgaccctctctgcaaaactctcccctgtcctctagaccccaccctgggtgtatgtgagtgtgcaagggaaggtgttgcatccccaggggctgccgcagaggccggagacctcctggactagttcggcgaggagactggccactgggggtggctgttcgggactgagagcgccaagggtctttgccagcaaaggaggttctgcctgtaattgagcctctctgatgatggagatgaagtgaaggtctgagggagcgggccctggggcgaggccatctctgcctgcctccctagcaggcgccagcggtggaggctgagtcgcaggacacatgccggccagttaattcattctcagcmaatgaaggtttgtctaagctgcctgggtatccacgggacaaaaacagcaaactccctcagactttgtccatgtataaacttgaagtggttgtgttgtrgggttgcaggttttttgttacgctgctgtcactttctgtccaggagctggcaccccaggtgttctgagaccttgagggacccagacctttgggtccaagagtttcccaaacarccacgcctctcaggaacccacctggcggttccgtgagctcaggcaggcctgacccggcggcacagcctggcagggacctcgtccccaagcctggcagaatgagaggggttgaggtcccgagcgccactcctagccttgccgccttcaatagagaagaaatccctttgctagatagggtcccccaggcagtccccagtggcgggacacaggggtccggctgtggagctcccctgccagcccctggagctccaggagggcctgttggtcccctgttcagaatggagtgcagcccgccagcggaaagtgttcattctgcataggtgtgaggctttatctgcacacaggacatgaaaaccagcagaaaggccctgagctgctgcatagccccatctgatttctgcagttcccgccagcctccaacacggggactctgccgtaactggaatcttcataggtcatattgaaatcttcaaggtgaccatgccccaccggggtgctggggcagtagtcatggcagactcccggcctgggcccccaggattctaggacccccaggcagccccttggactggtcccgggtgccttccaagcacagtctccatgctcccagattctcgaccttcccccggcccgggaggtgcagcctgcgtctgcctctgtcgtgtgtgctgatttgagtggcttagcttgccacagcgcarcctcttctgtccctttcagtcatttgctgtacttccctgtggcacgttaccatggaagccgctccagggtgggtcagggtgcaagctgctggtgaggtttggaagcatcaggctcacgggtgttcatgtgtgttcgtgcgtgtgtgtgcgtacgtgtatataactgaagtgtctgtacggaatgccctttgctagccatgggctggtcaccagattgttttgtaatgcccgccccttgcctcgatattgccagtttcttgtgcaataaactatcagcagctgtgg

SEQ ID NO: 5860 - DNA, 4483 bp, Homo sapiens
atgaaacagaaaggctaaagagggctggagtcaggggacttctcttccaccagcttcacggtgatgatatggcatctgccagctctagccgggcaggagtggccctgccttttgagaagtctcagctcactttgaaagtggtgtcygcaaagcccaaggtgcataatcgtcaacckcgaattaactcctacgtggaggtggcggtggatggactccccagtgagaccaagaagactgggaagcgcattgggagctctgagcttctctggaatgagatcatcattttgaatgtcacggcacagagtcatttagatttaaaggtctggagctgccataccttgagaaatgaactgctaggcaccgcatctgtcaacctctccaacgtcttgaagaacaatgggggcaaaatggagaacatgcagctgaccctgaacctgcagacggagaacaaaggcagcgttgtctcaggcggagagctgacaattttcctggacgggccaactgttgatctgggaaatgtgcctaatggcagtgccctgacagatggatcacagctgccttcgagagactccagtggaacagcagtagctccagagaaccggcaccagccccccagcacaaactgctttggtggaagatcccggacgcacagacattcgggtgcttcagccagaacaaccccagcaaccggcgagcaaagccccggtgctcggagccggcaccgccagcccgtcaagaactcaggccacagtggcttggccaatggcacagtgaatgatgaacccacaacagccactgatcccgaagaaccttccgttgttggtgtgacgtccccacctgctgcaccyttgagtgtgaccccgaatcccaacacgacttctctccctgccccagccacaccggctgaaggagaggaacccagcacttcgggtacacagcagctcccagcggctgcccaggcccccgacgctctgcctgctggatgggaacagcgagagctgcccaacggacgtgtctattatgttgaccacaataccaagaccaccacctgggagcggccccttcctccaggctgggaaaaacgcacagatccccgaggcaggttttactatgtggatcacaatactcggaccaccacctggcagcgtccgaccgcggagtacgtgcgcaactatgagcagtggcagtcgcagcggaatcagctccagggggccatgcagcacttcagccaaagattcctctaccagtcttcgagtgcttcgactgaccatgatcccctgggccccctccctcctggctgggagaaragacaggacaatggacgggtgtattacgtgaaccataacactcgcacracccagtgggaggatccccggacccaggggatgatccaggaaccagctctgcccccaggatgggagatgaaatacaccagcgagggggtgcgatactttgtggaccacaatacccgcaccaccacctttaaggatcctcgcccggggtttgagtcggggacgaagcaaggttcccctggtgcttatgaccgcagttttcggtggaagtatcaccagttccgtttcctctgccattcaaatgccctacctagccacgtgaagatcagcgtttccaggcagacgcttttcgaagattccttccaacagatcatgaacatgaaaccctatgacctgcgccgccggctctacatcatcatgcgtggcgaggagggcctggactatgggggcatcgccagagagtggtttttcctcctgtctcaygaggtgctcaaccctatgtattgtttatttgaatatgccggaaagaacaattactgcctgcagatcaacccygcctcctccatcaacccggaccacctcacctactttcgctttataggcagattcatcgccatggcgctgtaccatggaaagttcatcgacacgggcttcaccctccctttctacaagcggatgctcaataagagaccaaccctgaaagacctggagtccattgaccctgagttctacaactccattgtctggatcaaagagaacaacctggaagaatgtggcctggagctgtacttcatccaggacatggagatactgggcaaggtgacgacccacgagctgaaggagggcggcgagagcatccgggtcacrgaggagaacaaggaagagtacatcatgctgctgactgactggcgtttcacccgaggcgtggaagagcagaccaaagccttcctggatggcttcaacgaggtggccccgctggagtggctgcgctactttgacgagaaagagctggagctgatgctgtgcggcatgcaggagatagacatgagcgactggcagaagagcaccatctaccggcactacaccaagaacagcaagcagatccastggttctggcaggtggtgaaggagatggacaacgagaagaggatccggctgctgcagtttgtcaccggtacctgccgcctgcccgtcgggggatttgccgaactcatcggtagcaacggaccacagaagttttgcattgacaaagttggcaaggaaacctggytgcccagaagccacacctgcttcaaccgtctggatcttccaccctacaagagctacgaacagctgagagagaagctgctgtatgccattgaggagaccgarggctttggacaggagtaaccgaggccgcccctcccacgccccccagcgcacatgtagtcctgagtcctccctgcctgagaggccactggccccgcagcccttgggaggcccccgtggatgtggccctgtgtgggaccacactgtcatctcgctgctggcagaaaagcctgatcccaggaggccctgcagttcccccgacccgcggatggcagtctggaataaagccccctagttgcctttggccccacctttgcaaagttccagagggctgaccctctctgcaaaactctcccctgtcctctagaccccaccctgggtgtatgtgagtgtgcaagggaaggtgttgcatccccaggggctgccgcagaggccggagacctcctggactagttcggcgaggagactggccactgggggtggctgttcgggactgagagcgccaagggtctttgccagcaaaggaggttctgcctgtaattgagcctctctgatgatggagatgaagtgaaggtctgagggagcgggccctggggcgaggccatctctgcctgcctccctagcaggcgccagcggtggaggctgagtcgcaggacacatgccggccagttaattcattctcagcmaatgaaggtttgtctaagctgcctgggtatccacgggacaaaaacagcaaactccctcagactttgtccatgtataaacttgaagtggttgtgttgtrgggttgcaggttttttgttacgctgctgtcactttctgtccaggagctggcaccccaggtgttctgagaccttgagggacccagacctttgggtccaagagtttcccaaacarccacgcctctcaggaacccacctggcggttccgtgagctcaggcaggcctgacccggcggcacagcctggcagggacctcgtccccaagcctggcagaatgagaggggttgaggtcccgagcgccactcctagccttgccgccttcaatagagaagaaatccctttgctagatagggtcccccaggcagtccccagtggcgggacacaggggtccggctgtggagctcccctgccagcccctggagctccaggagggcctgttggtcccctgttcagaatggagtgcagcccgccagcggaaagtgttcattctgcataggtgtgaggctttatctgcacacaggacatgaaaaccagcagaaaggccctgagctgctgcatagccccatctgatttctgcagttcccgccagcctccaacacggggactctgccgtaactggaatcttcataggtcatattgaaatcttcaaggtgaccatgccccaccggggtgctggggcagtagtcatggcagactcccggcctgggcccccaggattctaggacccccaggcagccccttggactggtcccgggtgccttccaagcacagtctccatgctcccagattctcgaccttcccccggcccgggaggtgcagcctgcgtctgcctctgtcgtgtgtgctgatttgagtggcttagcttgccacagcgcarcctcttctgtccctttcagtcatttgctgtacttccctgtggcacgttaccatggaagccgctccagggtgggtcagggtgcaagctgctggtgaggtttggaagcatcaggctcacgggtgttcatgtgtgttcgtgcgtgtgtgtgcgtacgtgtatataactgaagtgtctgtacggaatgccctttgctagccatgggctggtcaccagattgttttgtaatgcccgccccttgcctcgatattgccagtttcttgtgcaataaactatcagcagctgtgg

SEQ ID NO: 5861 - DNA, 3284 bp, Homo sapiens
cggtggaaggcggaagtaggagaggagttcggcgccgcttctgtggccacggcagcttcacggtgatgatatggcatctgccagctctagccgggcaggagtggccctgccttttgagaagtctcagctcactttgaaagtggtgtcygcaaagcccaaggtgcataatcgtcaacckcgaattaactcctacgtggaggtggcggtggatggactccccagtgagaccaagaagactgggaagcgcattgggagctctgagcttctctggaatgagatcatcattttgaatgtcacggcacagagtcatttagatttaaaggtctggagctgccataccttgagaaatgaactgctaggcaccgcatctgtcaacctctccaacgtcttgaagaacaatgggggcaaaatggagaacatgcagctgaccctgaacctgcagacggagaacaaaggcagcgttgtctcaggcggagagctgacaattttcctggacgggccaactgttgatctgggaaatgtgcctaatggcagtgccctgacagatggatcacagctgccttcgagagactccagtggaacagcagtagctccagagaaccggcaccagccccccagcacaaactgctttggtggaagatcccggacgcacagacattcgggtgcttcagccagaacaaccccagcaaccggcgagcaaagccccggtgctcggagccggcaccgccagcccgtcaagaactcaggccacagtggcttggccaatggcacagtgaatgatgaacccacaacagccactgatcccgaagaaccttccgttgttggtgtgacgtccccacctgctgcaccyttgagtgtgaccccgaatcccaacacgacttctctccctgccccagccacaccggctgaaggagaggaacccagcacttcgggtacacagcagctcccagcggctgcccaggcccccgacgctctgcctgctggatgggaacagcgagagctgcccaacggacgtgtctattatgttgaccacaataccaagaccaccacctgggagcggccccttcctccaggctgggaaaaacgcacagatccccgaggcaggttttactatgtggatcacaatactcggaccaccacctggcagcgtccgaccgcggagtacgtgcgcaactatgagcagtggcagtcgcagcggaatcagctccagggggccatgcagcacttcagccaaagattcctctaccagtcttcgagtgcttcgactgaccatgatcccctgggccccctccctcctggctgggagaaragacaggacaatggacgggtgtattacgtgaaccataacactcgcacracccagtgggaggatccccggacccaggggatgatccaggaaccagctctgcccccaggatgggagatgaaatacaccagcgagggggtgcgatactttgtggaccacaatacccgcaccaccacctttaaggatcctcgcccggggtttgagtcggggacgaagcaaggttcccctggtgcttatgaccgcagttttcggtggaagtatcaccagttccgtttcctctgccattcaaatgccctacctagccacgtgaagatcagcgtttccaggcagacgcttttcgaagattccttccaacagatcatgaacatgaaaccctatgacctgcgccgccggctctacatcatcatgcgtggcgaggagggcctggactatgggggcatcgccagagagtggtttttcctcctgtctcaygaggtgctcaaccctatgtattgtttatttgaatatgccggaaagaacaattactgcctgcagatcaacccygcctcctccatcaacccggaccacctcacctactttcgctttataggcagattcatcgccatggcgctgtaccatggaaagttcatcgacacgggcttcaccctccctttctacaagcggatgctcaataagagaccaaccctgaaagacctggagtccattgaccctgagttctacaactccattgtctggatcaaagagaacaacctggaagaatgtggcctggagctgtacttcatccaggacatggagatactgggcaaggtgacgacccacgagctgaaggagggcggcgagagcatccgggtcacrgaggagaacaaggaagagtacatcatgctgctgactgactggcgtttcacccgaggcgtggaagagcagaccaaagccttcctggatggcttcaacgaggtggccccgctggagtggctgcgctactttgacgagaaagagctggagctgatgctgtgcggcatgcaggagatagacatgagcgactggcagaagagcaccatctaccggcactacaccaagaacagcaagcagatccastggttctggcaggtggtgaaggagatggacaacgagaagaggatccggctgctgcagtttgtcaccggtacctgccgcctgcccgtcgggggatttgccgaactcatcggtagcaacggaccacagaagttttgcattgacaaagttggcaaggaaacctggytgcccagaagccacacctgcttcaaccgtctggatcttccaccctacaagagctacgaacagctgagagagaagctgctgtatgccattgaggagaccgarggctttggacaggagggctgccgcagaggccggagacctcctggactagttcggcgaggagactggccactgggggtggctgttcgggactgagagcgccaagggtctttgccagcaaaggaggttctgcctgtaattgagcctctctgatgatggagatgaagtgaaggtctgagggagcgggccctggggcgaggccatctctgcctgcctccctagcaggcgccagcggtggaggctgagtcgcaggacacatgccggccagttaattcattctcagcmaatgaaggacatgaaaaccagcagaaaggccctgagctgctgcatagccccatctgatttctgcagttcccgccagcctccaacacggggactctgccgtaactggaatcttcataggtcatattgaaatcttcaagtcatttgctgtacttccctgtggcacgttaccatggaagccgctccagggtgggtcagggtgcaagctgctggtgaggtttggaagcatcaggctcacgggtgttcatgtgtgttcgtgcgtgtgtgtgcgtacgtgtatataactgaagtgtctgtacggaatgccctttgctagccatgggctggtcaccagattgtt

SEQ ID NO: 5862 - DNA, 4533 bp, Homo sapiens
gaaggcggaagtaggagaggagttcggcgccgcttctgtggccacggcagatgaaacagaaaggctaaagagggctggagtcaggggacttctcttccaccagcttcacggtgatgatatggcatctgccagctctagccgggcaggagtggccctgccttttgagaagtctcagctcactttgaaagtggtgtcygcaaagcccaaggtgcataatcgtcaacckcgaattaactcctacgtggaggtggcggtggatggactccccagtgagaccaagaagactgggaagcgcattgggagctctgagcttctctggaatgagatcatcattttgaatgtcacggcacagagtcatttagatttaaaggtctggagctgccataccttgagaaatgaactgctaggcaccgcatctgtcaacctctccaacgtcttgaagaacaatgggggcaaaatggagaacatgcagctgaccctgaacctgcagacggagaacaaaggcagcgttgtctcaggcggagagctgacaattttcctggacgggccaactgttgatctgggaaatgtgcctaatggcagtgccctgacagatggatcacagctgccttcgagagactccagtggaacagcagtagctccagagaaccggcaccagccccccagcacaaactgctttggtggaagatcccggacgcacagacattcgggtgcttcagccagaacaaccccagcaaccggcgagcaaagccccggtgctcggagccggcaccgccagcccgtcaagaactcaggccacagtggcttggccaatggcacagtgaatgatgaacccacaacagccactgatcccgaagaaccttccgttgttggtgtgacgtccccacctgctgcaccyttgagtgtgaccccgaatcccaacacgacttctctccctgccccagccacaccggctgaaggagaggaacccagcacttcgggtacacagcagctcccagcggctgcccaggcccccgacgctctgcctgctggatgggaacagcgagagctgcccaacggacgtgtctattatgttgaccacaataccaagaccaccacctgggagcggccccttcctccaggctgggaaaaacgcacagatccccgaggcaggttttactatgtggatcacaatactcggaccaccacctggcagcgtccgaccgcggagtacgtgcgcaactatgagcagtggcagtcgcagcggaatcagctccagggggccatgcagcacttcagccaaagattcctctaccagtcttcgagtgcttcgactgaccatgatcccctgggccccctccctcctggctgggagaaragacaggacaatggacgggtgtattacgtgaaccataacactcgcacracccagtgggaggatccccggacccaggggatgatccaggaaccagctctgcccccaggatgggagatgaaatacaccagcgagggggtgcgatactttgtggaccacaatacccgcaccaccacctttaaggatcctcgcccggggtttgagtcggggacgaagcaaggttcccctggtgcttatgaccgcagttttcggtggaagtatcaccagttccgtttcctctgccattcaaatgccctacctagccacgtgaagatcagcgtttccaggcagacgcttttcgaagattccttccaacagatcatgaacatgaaaccctatgacctgcgccgccggctctacatcatcatgcgtggcgaggagggcctggactatgggggcatcgccagagagtggtttttcctcctgtctcaygaggtgctcaaccctatgtattgtttatttgaatatgccggaaagaacaattactgcctgcagatcaacccygcctcctccatcaacccggaccacctcacctactttcgctttataggcagattcatcgccatggcgctgtaccatggaaagttcatcgacacgggcttcaccctccctttctacaagcggatgctcaataagagaccaaccctgaaagacctggagtccattgaccctgagttctacaactccattgtctggatcaaagagaacaacctggaagaatgtggcctggagctgtacttcatccaggacatggagatactgggcaaggtgacgacccacgagctgaaggagggcggcgagagcatccgggtcacrgaggagaacaaggaagagtacatcatgctgctgactgactggcgtttcacccgaggcgtggaagagcagaccaaagccttcctggatggcttcaacgaggtggccccgctggagtggctgcgctactttgacgagaaagagctggagctgatgctgtgcggcatgcaggagatagacatgagcgactggcagaagagcaccatctaccggcactacaccaagaacagcaagcagatccastggttctggcaggtggtgaaggagatggacaacgagaagaggatccggctgctgcagtttgtcaccggtacctgccgcctgcccgtcgggggatttgccgaactcatcggtagcaacggaccacagaagttttgcattgacaaagttggcaaggaaacctggytgcccagaagccacacctgcttcaaccgtctggatcttccaccctacaagagctacgaacagctgagagagaagctgctgtatgccattgaggagaccgarggctttggacaggagtaaccgaggccgcccctcccacgccccccagcgcacatgtagtcctgagtcctccctgcctgagaggccactggccccgcagcccttgggaggcccccgtggatgtggccctgtgtgggaccacactgtcatctcgctgctggcagaaaagcctgatcccaggaggccctgcagttcccccgacccgcggatggcagtctggaataaagccccctagttgcctttggccccacctttgcaaagttccagagggctgaccctctctgcaaaactctcccctgtcctctagaccccaccctgggtgtatgtgagtgtgcaagggaaggtgttgcatccccaggggctgccgcagaggccggagacctcctggactagttcggcgaggagactggccactgggggtggctgttcgggactgagagcgccaagggtctttgccagcaaaggaggttctgcctgtaattgagcctctctgatgatggagatgaagtgaaggtctgagggagcgggccctggggcgaggccatctctgcctgcctccctagcaggcgccagcggtggaggctgagtcgcaggacacatgccggccagttaattcattctcagcmaatgaaggtttgtctaagctgcctgggtatccacgggacaaaaacagcaaactccctcagactttgtccatgtataaacttgaagtggttgtgttgtrgggttgcaggttttttgttacgctgctgtcactttctgtccaggagctggcaccccaggtgttctgagaccttgagggacccagacctttgggtccaagagtttcccaaacarccacgcctctcaggaacccacctggcggttccgtgagctcaggcaggcctgacccggcggcacagcctggcagggacctcgtccccaagcctggcagaatgagaggggttgaggtcccgagcgccactcctagccttgccgccttcaatagagaagaaatccctttgctagatagggtcccccaggcagtccccagtggcgggacacaggggtccggctgtggagctcccctgccagcccctggagctccaggagggcctgttggtcccctgttcagaatggagtgcagcccgccagcggaaagtgttcattctgcataggtgtgaggctttatctgcacacaggacatgaaaaccagcagaaaggccctgagctgctgcatagccccatctgatttctgcagttcccgccagcctccaacacggggactctgccgtaactggaatcttcataggtcatattgaaatcttcaaggtgaccatgccccaccggggtgctggggcagtagtcatggcagactcccggcctgggcccccaggattctaggacccccaggcagccccttggactggtcccgggtgccttccaagcacagtctccatgctcccagattctcgaccttcccccggcccgggaggtgcagcctgcgtctgcctctgtcgtgtgtgctgatttgagtggcttagcttgccacagcgcarcctcttctgtccctttcagtcatttgctgtacttccctgtggcacgttaccatggaagccgctccagggtgggtcagggtgcaagctgctggtgaggtttggaagcatcaggctcacgggtgttcatgtgtgttcgtgcgtgtgtgtgcgtacgtgtatataactgaagtgtctgtacggaatgccctttgctagccatgggctggtcaccagattgttttgtaatgcccgccccttgcctcgatattgccagtttcttgtgcaataaactatcagcagctgtgg

SEQ ID NO: 5863 - DNA, 2262 bp, Homo sapiens
ctcttctctctaagtcacgggaactgcccttgctacttgtgacctgccctttactcagcagtttttgttctgggaagccctgggattctgctaatacctatcactgtaggtgctgaagggaaacagatgaagaacatgacctcaaggagcttcctgtcaatgagaagaccaagctgacgcctggcaaagatattaaagaggagcctgaaactgttccttggacatcttatgaatgtcagaaaataccttttggagggttagaagatcaggggacatggttgttcacatttgctgccacggaacaccgccagtcttcacttggaaacagaatcacgccttgtgaagagatcatccctaagcaggagagaagctactaaaggattgtgtcctcctccaccttccctgtgctcggtctccacctgtctcccattctgtgacgatggttcaatggaagagactctgccagctgcattacttgtgggctctgggctgctatatgctgctggccactgtggctctgaaactttctttcaggttgaagtgtgactctgaccacttgggtctggagtccagggaatctcaaagccagtactgtaggaatatcttgtataatttcctgaaacttccagcaaagaggtctatcaactgttcaggggtcacccgaggggaccaagaggcagtgcttcaggctattctgaataacctggaggtcaagaagaagcgagagcctttcacagacacccactacctctccctcaccagagactgtgagcacttcaaggctgaaaggaagttcatacagttcccactgagcaaagaagaggtggagttccctattgcatactctatggtgattcatgagaagattgaaaactttgaaaggctactgcgagctgtgtatgcccctcagaacatatactgtgtccatgtggatgagaagtccccagaaactttcaaagaggcggtcaaagcaattatttcttgcttcccaaatgtcttcrtagccagtaagctggttcgggtggtttatgcctcctggtccagggtgcaagctgacctcaactgcatggaagacttgctccagagctcagtgccgtggaaatacttcctgaatacatgtgggacggactttcctataaagagcaatgcagagatggtccaggctctcaagatgttgaatgggaggaatagcatggagtcagargtacctcctaagcacaaagaaacccgctggaaatatcactttgaggtagtgagagacacattacacctaaccaacaagaagaaggatcctcccccttataatttaactatgtttacagggaatgcgtacattgtggcttcccgagatttygtccaacatgttttgaagaaccctaaatcccaacaactgattgaatgggtaaaagacacttatagcccwgatgaacacctctgggccacccttcagcgtgcacggtggatgcctggctctgttcccaaccaccccaagtacgacatctcagacatgacttctattgccaggctggtcaagtggcagggtcatgagggagacatcgataagggtgctccttatgctccctgctctggaatccaccagcgggctatctgcrtttatggggctggggacttgaattggatgcttcaaaaccatcacctgttggccaacaagtttgacccaaaggtagatgataatgctcttcagtgcttagaagaatacctacgttataaggccatctatgggactgaactttgagacacactatgagagcgttgctacctgtggggcaagagcatgtacaaacatgctcagaacttgctgggacagtgtgggtgggagaccagggctttgcaattcgtggcatcctttaggataagagggctgctattagaktgtgggtaagtagatcttttgccttgcaaattgctgcctgggtgaatgctgcttgttctctcacccctaaccctagtmgttcctccactaactttctcactaagtgagaatgagaactgctgtgatagggagagtgaaggagggatatgtggtagagcacttgatttcagttgaatgcctgctggtagcttttccattctgtggagctgccgttcctaataattccaggtttggtagcgtggaggagaactttgatggaaagagaaccttcccttctgtactgttaacttaaaaataaatagctcctgattcaaagtattacctctactttttgcctagtatgccagaaataatataaatataaacag

SEQ ID NO: 5864 - DNA, 2176 bp, Homo sapiens
cttgagaatgtttctgcatgatttctctgagcttgctgtcttacctgagagcaggaagtcaaaaggagagtgatggagccacctgctgccctctactttgcagatattaaagaggagcctgaaactgttccttggacatcttatgaatgtcagaaaataccttttggagggttagaagatcaggggacatggttgttcacatttgctgccacggaacaccgccagtcttcacttggaaacagaatcacgccttgtgaagagatcatccctaagcaggagagaagctactaaaggattgtgtcctcctccaccttccctgtgctcggtctccacctgtctcccattctgtgacgatggttcaatggaagagactctgccagctgcattacttgtgggctctgggctgctatatgctgctggccactgtggctctgaaactttctttcaggttgaagtgtgactctgaccacttgggtctggagtccagggaatctcaaagccagtactgtaggaatatcttgtataatttcctgaaacttccagcaaagaggtctatcaactgttcaggggtcacccgaggggaccaagaggcagtgcttcaggctattctgaataacctggaggtcaagaagaagcgagagcctttcacagacacccactacctctccctcaccagagactgtgagcacttcaaggctgaaaggaagttcatacagttcccactgagcaaagaagaggtggagttccctattgcatactctatggtgattcatgagaagattgaaaactttgaaaggctactgcgagctgtgtatgcccctcagaacatatactgtgtccatgtggatgagaagtccccagaaactttcaaagaggcggtcaaagcaattatttcttgcttcccaaatgtcttcrtagccagtaagctggttcgggtggtttatgcctcctggtccagggtgcaagctgacctcaactgcatggaagacttgctccagagctcagtgccgtggaaatacttcctgaatacatgtgggacggactttcctataaagagcaatgcagagatggtccaggctctcaagatgttgaatgggaggaatagcatggagtcagargtacctcctaagcacaaagaaacccgctggaaatatcactttgaggtagtgagagacacattacacctaaccaacaagaagaaggatcctcccccttataatttaactatgtttacagggaatgcgtacattgtggcttcccgagatttygtccaacatgttttgaagaaccctaaatcccaacaactgattgaatgggtaaaagacacttatagcccwgatgaacacctctgggccacccttcagcgtgcacggtggatgcctggctctgttcccaaccaccccaagtacgacatctcagacatgacttctattgccaggctggtcaagtggcagggtcatgagggagacatcgataagggtgctccttatgctccctgctctggaatccaccagcgggctatctgcrtttatggggctggggacttgaattggatgcttcaaaaccatcacctgttggccaacaagtttgacccaaaggtagatgataatgctcttcagtgcttagaagaatacctacgttataaggccatctatgggactgaactttgagacacactatgagagcgttgctacctgtggggcaagagcatgtacaaacatgctcagaacttgctgggacagtgtgggtgggagaccagggctttgcaattcgtggcatcctttaggataagagggctgctattagaktgtgggtaagtagatcttttgccttgcaaattgctgcctgggtgaatgctgcttgttctctcacccctaaccctagtmgttcctccactaactttctcactaagtgagaatgagaactgctgtgatagggagagtgaaggagggatatgtggtagagcacttgatttcagttgaatgcctgctggtagcttttccattctgtggagctgccgttcctaataattccaggtttggtagcgtggaggagaactttgatggaaagagaaccttcccttctgtactgttaacttaaaaataaatagctcctgattcaaagtattacctctactttttgcctagtatgccagaaataatataaatataaacag

SEQ ID NO: 5865 - DNA, 3064 bp, Homo sapiens
gcctgtaatcctagcactttggaaggccaaggcaggcggaccacctgaggtcaggagagcttgagtccrgccactgtctgggtactgccagccatcgggcccaggtctctggggttgtcttaccgcagtgagtaccacgcggtactacagagacyggctgcccgtgtgcctggcaggtggagccgcccgcatcagcggcctcggggaatggaagcggagaacgcgggcagctattcccttcagcaagctcaagctttttatacgtttccatttcaacaactgatggctgaagctcctaatatggcagttgtgaatgaacagcaaatgccagaagaagttccagccccagctcctgctcaggaaccagtgcaagaggctccaaaaggaagaaaaagaaaacccagaacaacagaaccaaaacaaccagtggaacccaaaaaacctgttgagtcaaaaaaatctggcaagtctgcaaaatcaaaagaaaaacaagaaaaaaattacagacacatttaaagtaaaaagaaaagtagaccgttttaatggtgtttcagaagctgaacttctgaccaagactctccccgatattttgaccttcaatctggacattgtcattattggcataaacccgggactaatggctgcttacaaagggcatcattaccctggacctggaaaccatttttggaagtgtttgtttatgtcagggctcagtgaagtccagctgaaccatatggatgatcacactctaccagggaagtatggtattggatttaccaacatggtggaaaggaccacgcccggcagcaaagatctctccagtaaagaatttcgtgaaggaggacgtattctagtacagaaattacagaaatatcagccacgaatagcagtgtttaatggaaaatgtatttatgaaatttttagtaaagaagtttttggagtaaaggttaagaacttggaatttgggcttcagccccataagattccagacacagaaactctctgctatgttatgccatcatccagtgcaagatgtgctcagtttcctcgagcccaagacaaagttcattactacataaaactgaaggacttaagagatcagttgaaaggcattgaacgaaatatggacgttcaagaggtgcaatatacatttgacctacagcttgcccaagaggatgcaaagaagatggctgttaaggaagaaaaatatgatccaggttatgaggcagcatatggtggtgcttacggagaaaatccatgcagcagtgaaccttgtggcttctcttcaaatgggctaattgagagcgtggagttaagaggagaatcagctttcagtggcattcctaatgggcagtggatgacccagtcatttacagaccaaattccttcctttagtaatcactgtggaacacaagaacaggaagaagaaagccatgcttaagaatggtgcttctcagctctgcttaaatgctgcagttttaatgcagttgtcaacaagtagaacctcagtttgctaactgaagtgttttattagtattttactctagtggtgtaattgtaatgtagaacagttgtgtggtagtgtgaaccgtatgaacctaagtagtttggaagaaaaagtagggtttttgtatactagcttttgtatttgaattaattatcattccagctttttatatactatatttcatttatgaagaaattgattttcttttgggagtcacttttaatctgtaattataccattatcccttttatacctaagaagggcatgctaataattaccactgtcaaagaggcaaaggtgttgatttttgtatatgaagttaagcctcagtggagtctcatttgttagtttttagtggtaactaagggtaaactcagggttccctgagctatatgcacactcagacctctttgctttaccagtggtgtttgtgagttgctcagtagtaaaaactggcccttacctgacagagccctggctttgacctgctcagccctgtgtgttaatcctctagtagccagttaactactctggggtggcaggttccagagaatgcagtagaccttttgccactcatctgtgttttacttgagacatgtaaatatgatagggaaggaactgaatttctccattcatatttataaccattctagttttatcttccttggctttaagagtgtgccatggaaagtgataagaaatgaacttctaggctaagcaaaaagatgctggagatatttgatactctcatttaaactggtgctttatgtacatgagatgtactaaaataagtaatatagaatttttcttgctaggtaaatccagtaagccaataattttaaagattctttatctgcatcattgctgtttgttactataaattaaatgaacctcatggaaaggttgaggtgtatacctttgygattttctaatgagttttccatggtgctacaaataatccagactaccaggtctggtagatattaaagctgggtactaagaaatgttatttgcatcctctcagttactcctgaatattctgatttcatacgtacccagggagcatgctgttttgtcaatcaatataaaatatttatgaggtctcccccacccccaggaggttatatgattgctcttctctttataataagagaaacaaattcttattgtgaatcttaacatgctttttagctgtggctatgatggattttattttttcctaggtcaagctgtgtaaaagtcatttatgttatttaaatgatgtactgtactgctgtttacatggacgttttgtgcgggtgctttgaagtgccttgcatcagggattaggagcaattaaattattttttcacgggactgtgtaaagcatgtaactaggtattgctttggtatataactattgtagctttacaagagattgttttatttgaatggggaaaataccctttaaattatgacggacatccactagagatgggtttgaggattttccaagcgtgtaataatgatgtttttcctaacatgacagatgagtagtaaatgttgatatatcctgta

SEQ ID NO: 5866 - DNA, 3294 bp, Homo sapiens
gacctcgtgaaataaaagtgcagaaaacaaacccaggcgatcacagcagcagccgccgcggcagcagcaccaacagcaggaggagcaggaggagccggaggaggaggaggaggaggaggcaaagttagagttggggctggcgctccggagttgctgggctcagcgcagctcccattcattaaggaaccagctgcggaggaaggtggccgagcgcccgcgctgcccactcgctcgctcgcgcactcagacgcgcgccacaacagcgcgccccaagctgcgcagctctgcaaaagtttctgctcgggatctggctctcttccccttggactttagaacgatttagggttgacagaggaaagcagaggcgcgcaggaggagcagaaaacaccaccttctgcagttggaggcaggcagccccggctgcactctagccgccgcgcccggagccggggccgacccgccactatccgcagcagcctcggccaggaggcgacccgggcgcctgggtgtgtggctgctgttgcgggacgtcttcgcggggcgggaggctcgcgccgcagccagcgccatgcaaaactacaagtacgacaaagcgatcgtcccggagagcaagaacggcggcagcccggcgctcaacaacaacccgaggaggagcggcagcaagcgggtgctgctcatctgcctcgacctcttctgcctcttcatggcgggcctccccttcctcatcatcgagacaagcaccatcaagccttaccaccgagggttttactgcaatgatgagagcatcaagtacccactgaaaactggtgagacaataaatgacgctgtgctctgtgccgtggggatcgtcattgccatcctcgcratcatcacgggggaattctaccggatctattacctgaagaagtcgcggtcgacgattcagaacccctacgtggcagcactctataagcaagtgggctgcttcctctttggctgtgccatcagccagtctttcacagacattgccaaagtgtccatagggcgcctgcgtcctcacttcttgagtgtctgcaaccctgatttcagccagatcaactgctctgaaggctacattcagaactacagatgcagaggtgatgacagcaaagtccaggaagccaggaagtccttcttctctggccatgcctccttctccatgtacactatgctgtatttggtgctatayctgcaggcccgcttcacttggcgaggagcccgcctgctccggcccctcctgcagttcaccttgatcatgatggccttctacacgggactgtctcgcgtatcagaccacaagcaccatcccagtgatgttctggcaggatttgctcaaggagccctggtggcctgctgcatagttttcttcgtgtctgacctcttcaagactaagacgacgctctccctgcctgcccctgctatccggaaggaaatcctttcacctgtggacattattgacaggaacaatcaccacaacatgatgtaggtgcyacccacctcctgagctgtttttgtaaaatgactgctgacagcaagttcttgctgctctccaatctcatcagacagtagaatgtagggaaaaacttttgcccgactgatttttaaaaargaaaaaaaaaatgttttactatgtggccttccaaaataggtagtgtttgcctatgtggaaacaacagcaaactaacaccaagtgccagagtcctggatgtgcaattggtttaagtgttcatgttctagtgaacacagcttgttcaggaacaaacactaaaacgatttgagtagaggctgctggtcaccttttgtgacctgaggaatcccaggcctgtgagaaaagcaaaaattcacattgcagcacatgatgccagaaatagcactgaatcaagaaaatagccattgcggagctgccctcttgagtctttctgtccatcccattctattctgtactgtgacttyagttcaggaagttttgttttgtgttttaaataaaaggaaagagcaagtttgctcagtcaagtgatcagatcccgaatctagattcccagttctaaggccttatcacctcccctgcccataggccaacaaccatagttcctcacattagtgattagcagactctttgtggacgagtgaatttcacaaacagcacaatttcagaagaaatcgagggcacaggccctcacttttcttcttttgacgcatcatcctgtgatgttgaaatgtcarttgcaggatgctgatgttgtgcacgtcaatcaccgggcacttgcatactcttagaaacagttcgacttcggttactgccttctcccttgaaatccttgctgcgtgcccaccaggatttcctgtgagggcccgggaatgagcaaggcatggtctgccaccagctgacggaaagcagccttctgtacaacagatgggagggtgaagggggcagaatgaaaatcgaaccaaccttttagctgttgcaaatcagaaggagccagagaagcaggcagtctcatgcatgagaggttacccttcaggatgacagagctgagggtctttgtaggagttgctcttgctgtgtaaagcactattgtcttggggttgagccctagggcagttcttggtaggttctgctgggcagaacatatgggttaaatctcggtagagagttttcctcatcctctatccgtaagtgtccttccatgcaaggtcccactctaggtgatagacagggaccccttctactgaacctttgaggaaaggaggaaggaagaaatgcgtttagatcttggatgcagacctttcaaagggttaaatgtaaccatatggatcaaccacatgcacatccttactacagaatccgtcctttcatttcaacttatagcaagctatgatttttatatataaatattatataaataatgtataaaacattaaaagttaactatgtaagatattatttctgaaacaatttagctatatccactatgattataaactgtgtctcgacctgtgttatttacattagctgcttaaaaaagcattgagttaattttttwaaatatcaactaaaatatcatagttctgtggtagacattgttttataatgaaataactgcaactagagaaaactgtataaaaacattaaattgtcagtatttttgtaaggttccattttgtaaagagaataatattcaaagacttttgtagcatacaaagtgaaaacttgtatctgcgaaactatacttgtattaaatgtgctttttaaataaaagctcgtaacacaactaa

SEQ ID NO: 5867 - DNA, 3476 bp, Homo sapiens
aggggcgcggggcgggcgcggggtcccgggagagggcgctgggcgcttcgggcccagatcatctttcttgctgacaagtatcatctaggaatcactctacctcgctggcaattttgagaaaatagccagttatttttgtgctgaactttcatctggttaagggtcattccttcagtattcaagacctcgtgaaataaaagtgcagaaaacaaacccaggcgatcacagcagcagccgccgcggcagcagcaccaacagcaggaggagcaggaggagccggaggaggaggaggaggaggaggcaaagttagagttggggctggcgctccggagttgctgggctcagcgcagctcccattcattaaggaaccagctgcggaggaaggtggccgagcgcccgcgctgcccactcgctcgctcgcgcactcagacgcgcgccacaacagcgcgccccaagctgcgcagctctgcaaaagtttctgctcgggatctggctctcttccccttggactttagaacgatttagggttgacagaggaaagcagaggcgcgcaggaggagcagaaaacaccaccttctgcagttggaggcaggcagccccggctgcactctagccgccgcgcccggagccggggccgacccgccactatccgcagcagcctcggccaggaggcgacccgggcgcctgggtgtgtggctgctgttgcgggacgtcttcgcggggcgggaggctcgcgccgcagccagcgccatgcaaaactacaagtacgacaaagcgatcgtcccggagagcaagaacggcggcagcccggcgctcaacaacaacccgaggaggagcggcagcaagcgggtgctgctcatctgcctcgacctcttctgcctcttcatggcgggcctccccttcctcatcatcgagacaagcaccatcaagccttaccaccgagggttttactgcaatgatgagagcatcaagtacccactgaaaactggtgagacaataaatgacgctgtgctctgtgccgtggggatcgtcattgccatcctcgcratcatcacgggggaattctaccggatctattacctgaagaagtcgcggtcgacgattcagaacccctacgtggcagcactctataagcaagtgggctgcttcctctttggctgtgccatcagccagtctttcacagacattgccaaagtgtccatagggcgcctgcgtcctcacttcttgagtgtctgcaaccctgatttcagccagatcaactgctctgaaggctacattcagaactacagatgcagaggtgatgacagcaaagtccaggaagccaggaagtccttcttctctggccatgcctccttctccatgtacactatgctgtatttggtgctatayctgcaggcccgcttcacttggcgaggagcccgcctgctccggcccctcctgcagttcaccttgatcatgatggccttctacacgggactgtctcgcgtatcagaccacaagcaccatcccagtgatgttctggcaggatttgctcaaggagccctggtggcctgctgcatagttttcttcgtgtctgacctcttcaagactaagacgacgctctccctgcctgcccctgctatccggaaggaaatcctttcacctgtggacattattgacaggaacaatcaccacaacatgatgtaggtgcyacccacctcctgagctgtttttgtaaaatgactgctgacagcaagttcttgctgctctccaatctcatcagacagtagaatgtagggaaaaacttttgcccgactgatttttaaaaargaaaaaaaaaatgttttactatgtggccttccaaaataggtagtgtttgcctatgtggaaacaacagcaaactaacaccaagtgccagagtcctggatgtgcaattggtttaagtgttcatgttctagtgaacacagcttgttcaggaacaaacactaaaacgatttgagtagaggctgctggtcaccttttgtgacctgaggaatcccaggcctgtgagaaaagcaaaaattcacattgcagcacatgatgccagaaatagcactgaatcaagaaaatagccattgcggagctgccctcttgagtctttctgtccatcccattctattctgtactgtgacttyagttcaggaagttttgttttgtgttttaaataaaaggaaagagcaagtttgctcagtcaagtgatcagatcccgaatctagattcccagttctaaggccttatcacctcccctgcccataggccaacaaccatagttcctcacattagtgattagcagactctttgtggacgagtgaatttcacaaacagcacaatttcagaagaaatcgagggcacaggccctcacttttcttcttttgacgcatcatcctgtgatgttgaaatgtcarttgcaggatgctgatgttgtgcacgtcaatcaccgggcacttgcatactcttagaaacagttcgacttcggttactgccttctcccttgaaatccttgctgcgtgcccaccaggatttcctgtgagggcccgggaatgagcaaggcatggtctgccaccagctgacggaaagcagccttctgtacaacagatgggagggtgaagggggcagaatgaaaatcgaaccaaccttttagctgttgcaaatcagaaggagccagagaagcaggcagtctcatgcatgagaggttacccttcaggatgacagagctgagggtctttgtaggagttgctcttgctgtgtaaagcactattgtcttggggttgagccctagggcagttcttggtaggttctgctgggcagaacatatgggttaaatctcggtagagagttttcctcatcctctatccgtaagtgtccttccatgcaaggtcccactctaggtgatagacagggaccccttctactgaacctttgaggaaaggaggaaggaagaaatgcgtttagatcttggatgcagacctttcaaagggttaaatgtaaccatatggatcaaccacatgcacatccttactacagaatccgtcctttcatttcaacttatagcaagctatgatttttatatataaatattatataaataatgtataaaacattaaaagttaactatgtaagatattatttctgaaacaatttagctatatccactatgattataaactgtgtctcgacctgtgttatttacattagctgcttaaaaaagcattgagttaattttttwaaatatcaactaaaatatcatagttctgtggtagacattgttttataatgaaataactgcaactagagaaaactgtataaaaacattaaattgtcagtatttttgtaaggttccattttgtaaagagaataatattcaaagacttttgtagcatacaaagtgaaaacttgtatctgcgaaactatacttgtattaaatgtgctttttaaataaaagctcgtaacacaactaa

SEQ ID NO: 5868 - DNA, 2871 bp, Homo sapiens
aggggcgcggggcgggcgcggggtcccgggagagggcgctgggcgcttcgggcccagatcatctttcttgctgacaagtatcatctaggaatcactctacctcgctggcaattttgagaaaatagccagttatttttgtgctgaactttcatctggttaagggtcattccttcagtattcaagacctcgtgaaataaaagtgcagaaaacaaacccaggcgatcacagcagcagccgccgcggcagcagcaccaacagcaggaggagcaggaggagccggaggaggaggaggaggaggaggcaaagttagagttggggctggcgctccggagttgctgggctcagcgcagctcccattcattaaggaaccagctgcggaggaaggtggccgagcgcccgcgctgcccactcgctcgctcgcgcactcagacgcgcgccacaacagcgcgccccaagctgcgcagctctgcaaaagtttctgctcgggatctggctctcttccccttggactttagaacgatttagggttgacagaggaaagcagaggcgcgcaggaggagcagaaaacaccaccttctgcagttggaggcaggcagccccggctgcactctagccgccgcgcccggagccggggccgacccgccactatccgcagcagcctcggccaggaggcgacccgggcgcctgggtgtgtggctgctgttgcgggacgtcttcgcggggcgggaggctcgcgccgcagccagcgccatgcaaaactacaagtacgacaaagcgatcgtcccggagagcaagaacggcggcagcccggcgctcaacaacaacccgaggaggagcggcagcaagcgggtgctgctcatctgcctcgacctcttctgcctcttcatggcgggcctccccttcctcatcatcgagacaagcaccatcaagccttaccaccgagggttttactgcaatgatgagagcatcaagtacccactgaaaactggtgagacaataaatgacgctgtgctctgtgccgtggggatcgtcattgccatcctcgcratcatcacgggggaattctaccggatctattacctgaagaagtcgcggtcgacgattcagaacccctacgtggcagcactctataagcaagtgggctgcttcctctttggctgtgccatcagccagtctttcacagacattgccaaagtgtccatagggcgcctgcgtcctcacttcttgagtgtctgcaaccctgatttcagccagatcaactgctctgaaggctacattcagaactacagatgcagaggtgatgacagcaaagtccaggaagccaggaagtccttcttctctggccatgcctccttctccatgtacactatgctgtatttggtgctatayctgcaggcccgcttcacttggcgaggagcccgcctgctccggcccctcctgcagttcaccttgatcatgatggccttctacacgggactgtctcgcgtatcagaccacaagcaccatcccagtgatgttctggcaggatttgctcaaggagccctggtggcctgctgcatagttttcttcgtgtctgacctcttcaagactaagacgacgctctccctgcctgcccctgctatccggaaggaaatcctttcacctgtggacattattgacaggaacaatcaccacaacatgatgtaggtgcyacccacctcctgagctgtttttgtaaaatgactgctgacagcaagttcttgctgctctccaatctcatcagacagtagaatgtagggaaaaacttttgcccgactgatttttaaaaargaaaaaaaaaatgttttactatgtggccttccaaaataggtagtgtttgcctatgtggaaacaacagcaaactaacaccaagtgccagagtcctggatgtgcaattggtttaagtgttcatgttctagtgaacacagcttgttcaggaacaaacactaaaacgatttgagtagaggctgctggtcaccttttgtgacctgaggaatcccaggcctgtgagaaaagcaaaaattcacattgcagcacatgatgccagaaatagcactgaatcaagaaaatagccattgcggagctgccctcttgagtctttctgtccatcccattctattctgtactgtgacttyagttcaggaagttttgttttgtattcccagttctaaggccttatcacctcccctgcccataggccaacaaccatagttcctcacattagtgattagcagactctttgtggacgagtgaatttcacaaacagcacaatttcagaagaaatcgagggcacaggccctcacttttcttcttttgacgcatcatcctgtgatgttgaaatgtcarttgcaggatgctgatgttgtgcacgtcaatcaccgggcacttgcatactcttagaaacagttcgacttcggttactgccttctcccttgaaatccttgctgcgtgcccaccaggatttcctgtgagggcccgggaatgagcaaggcatggtctgccaccagctgacggaaagcagccttctgtacaacagatgggagggtgaagggggcagaatgaaaatcgaaccaaccttttagctgttgcaaatcagaaggagccagagaagcaggcagtctcatgcatgagaggttacccttcaggatgacagagctgagggtctttgtaggagttgctcttgctgtgtaaagcactattgtcttggggttgagccctagggcagttcttggtaggttctgctgtgtccttccatgcaaggtcccactctaggtgatagacagggaccccttctactgaacctttgaggaaaggaggaaggaagaaatgcgtttagatcttggatgcagacct

SEQ ID NO: 5869 - DNA, 2809 bp, Homo sapiens
aggggcgcggggcgggcgcggggtcccgggagagggcgctgggcgcttcgggcccagatcatctttcttgctgacaagtatcatctaggaatcactctacctcgctggcaattttgagaaaatagccagttatttttgtgctgaactttcatctggttaagggtcattccttcagtattcaagacctcgtgaaataaaagtgcagaaaacaaacccaggcgatcacagcagcagccgccgcggcagcagcaccaacagcaggaggagcaggaggagccggaggaggaggaggaggaggaggcaaagttagagttggggctggcgctccggagttgctgggctcagcgcagctcccattcattaaggaaccagctgcggaggaaggtggccgagcgcccgcgctgcccactcgctcgctcgcgcactcagacgcgcgccacaacagcgcgccccaagctgcgcagctctgcaaaagtttctgctcgggatctggctctcttccccttggactttagaacgatttagggttgacagaggaaagcagaggcgcgcaggaggagcagaaaacaccaccttctgcagttggagggcagcagcctcggccaggaggcgacccgggcgcctgggtgtgtggctgctgttgcgggacgtcttcgcggggcgggaggctcgcgccgcagccagcgccatgcaaaactacaagtacgacaaagcgatcgtcccggagagcaagaacggcggcagcccggcgctcaacaacaacccgaggaggagcggcagcaagcgggtgctgctcatctgcctcgacctcttctgcctcttcatggcgggcctccccttcctcatcatcgagacaagcaccatcaagccttaccaccgagggttttactgcaatgatgagagcatcaagtacccactgaaaactggtgagacaataaatgacgctgtgctctgtgccgtggggatcgtcattgccatcctcgcratcatcacgggggaattctaccggatctattacctgaagaagtcgcggtcgacgattcagaacccctacgtggcagcactctataagcaagtgggctgcttcctctttggctgtgccatcagccagtctttcacagacattgccaaagtgtccatagggcgcctgcgtcctcacttcttgagtgtctgcaaccctgatttcagccagatcaactgctctgaaggctacattcagaactacagatgcagaggtgatgacagcaaagtccaggaagccaggaagtccttcttctctggccatgcctccttctccatgtacactatgctgtatttggtgctatayctgcaggcccgcttcacttggcgaggagcccgcctgctccggcccctcctgcagttcaccttgatcatgatggccttctacacgggactgtctcgcgtatcagaccacaagcaccatcccagtgatgttctggcaggatttgctcaaggagccctggtggcctgctgcatagttttcttcgtgtctgacctcttcaagactaagacgacgctctccctgcctgcccctgctatccggaaggaaatcctttcacctgtggacattattgacaggaacaatcaccacaacatgatgtaggtgcyacccacctcctgagctgtttttgtaaaatgactgctgacagcaagttcttgctgctctccaatctcatcagacagtagaatgtagggaaaaacttttgcccgactgatttttaaaaargaaaaaaaaaatgttttactatgtggccttccaaaataggtagtgtttgcctatgtggaaacaacagcaaactaacaccaagtgccagagtcctggatgtgcaattggtttaagtgttcatgttctagtgaacacagcttgttcaggaacaaacactaaaacgatttgagtagaggctgctggtcaccttttgtgacctgaggaatcccaggcctgtgagaaaagcaaaaattcacattgcagcacatgatgccagaaatagcactgaatcaagaaaatagccattgcggagctgccctcttgagtctttctgtccatcccattctattctgtactgtgacttyagttcaggaagttttgttttgtattcccagttctaaggccttatcacctcccctgcccataggccaacaaccatagttcctcacattagtgattagcagactctttgtggacgagtgaatttcacaaacagcacaatttcagaagaaatcgagggcacaggccctcacttttcttcttttgacgcatcatcctgtgatgttgaaatgtcarttgcaggatgctgatgttgtgcacgtcaatcaccgggcacttgcatactcttagaaacagttcgacttcggttactgccttctcccttgaaatccttgctgcgtgcccaccaggatttcctgtgagggcccgggaatgagcaaggcatggtctgccaccagctgacggaaagcagccttctgtacaacagatgggagggtgaagggggcagaatgaaaatcgaaccaaccttttagctgttgcaaatcagaaggagccagagaagcaggcagtctcatgcatgagaggttacccttcaggatgacagagctgagggtctttgtaggagttgctcttgctgtgtaaagcactattgtcttggggttgagccctagggcagttcttggtaggttctgctgtgtccttccatgcaaggtcccactctaggtgatagacagggaccccttctactgaacctttgaggaaaggaggaaggaagaaatgcgtttagatcttggatgcagacct

SEQ ID NO: 5870 - DNA, 1313 bp, Homo sapiens
tgcactccagcctgggtgacagaacaagacaaaaaaaaaaaaagatacactgggtaatcactaacccattattccttgtggcgttacgaggtcggaccaatccttgatatcctcaaatttcaccttaatgaggctgacacctttcagcttatcgactggcaactcctttaggtattctagacggctaaagaagaacatttttggcacagctccagccttgagagcgtctgaaatgagcctgcgaccttccagcaggatcttcccttgtttttcccgaaatggcctggactttactattgtcattacactgctcctcctgtccccgggataagctttatcgtagcgaagcccagactcttcccaggtgctgggagcgcgggatgcggactcctcgagcggttgtttctctcgttgctcctgggcactggcctcagatggtgccttgcggggctgcttcccaggagcgcgcttctgttccaccacctctycggaaggaaacaccactttcactgggctccgccgcagcgcccggacccagcgcctcgcgtcaaggtcccaagcctggaccacctgcagcaacggtcgcacgacaaacctcgmgggtctcaccagcgccgccatgttccctgagacccgggctgcgtcacgaaagcgcgccgtcggcggctagtgacgtcacggcccgtggcgcccttcgtggactgggctgtacggtgcgcgtgacggctgcgtgcggcgggaatcatggctgctcgcagagctctgcacttcgtattcaaagtgggaaaccgcttccagacggcgcgtttctatcgggacgtcctggggatgaaggttctgcggcatgaggaatttgaagaaggctgcaaagctgcctgtaatgggccttatgatgggaaatggagtaaaacaatggtgggatttgggcctgaggatgatcattttgtcgcagaactgacttacaattatggcgtcggagactacaagcttggcaatgactttatgggaatcacgctcgcttctagccaggctgtcagcaacgccaggaagctggagtggccactgayggaagttgcagaaggtgtttttgaaaccgaggccccgggaggatataagttctatttgcagaatcgcagtctgcctcagtcagatcctgtattaaaagtaactctagcagtgtctgatcttcaaaagtccttgaactactggtgtaatctactgggaatgaaaatttatgaaaaagatgaagaaaagcaaagggctttgctgggctatgctgataaccaggtgagcaatcttggagaagaataacc

SEQ ID NO: 5871 - DNA, 1229 bp, Homo sapiens
atggctgctcgcagagctctgcacttcgtattcaaagtgggaaaccgcttccagacggcgcgtttctatcgggacgtcctggggatgaaggtggagtcttgctctgtcgccaggctggagtgcagtggcgcgatctcggctcactgctctgactacacccggataacagaagacagtttctcaaagccttatgatgggaaatggagtaaaacaatggtgggatttgggcctgaggatgatcattttgtcgcagaactgacttacaattatggcgtcggagactacaagcttggcaatgactttatgggaatcacgctcgcttctagccaggctgtcagcaacgccaggaagctggagtggccactgayggaagttgcagaaggtgtttttgaaaccgaggccccgggaggatataagttctatttgcagaatcgcagtctgcctcagtcagatcctgtattaaaagtaactctagcagtgtctgatcttcaaaagtccttgaactactggtgtaatctactgggaatgaaaatttatgaaaaagatgaagaaaagcaaagggctttgctgggctatgctgataaccagtgtaagctggagctacagggcgtcaagggtggggtggaccatgcagcagcttttggaagaattgccttctcttgcccccagaaagagttgccagacttagaagacttgatgaaaagggagaaccagaagattctgactcccctggtgagcctggacaccccagggaaagcaacagtacaggtggtcattctggccgaccctgacggacatgaaatttgctttgtcggggatgaagcatttcgagaactttctaagatggatccagagggaagcaaattgttggatgatgcaatggcagcagataaaagtgacgagtggtttgccaaacacaataaacccaaagcttcaggttaacggaagacatgatgcagagcaagcctctgtgattcctgcccagcacctgtgaggcctgacgtggtggagtgcagtggggcaccatcgtggctttctgcagccttgacctctggggctcaagagatcctcccacctcagcctcccgaatggctgggcccacagccacgtgccaccacacccagccaacgttttgatcttttgtagcgaccgtctcactgcgttgttcaggctgcaagctgttgtttcaaacagatgaagttggaaagttcttcagcttctccagagtt

SEQ ID NO: 5872 - DNA, 1928 bp, Homo sapiens
tgcactccagcctgggtgacagaacaagacaaaaaaaaaaaaagatacactgggtaatcactaacccattattccttgtggcgttacgaggtcggaccaatccttgatatcctcaaatttcaccttaatgaggctgacacctttcagcttatcgactggcaactcctttaggtattctagacggctaaagaagaacatttttggcacagctccagccttgagagcgtctgaaatgagcctgcgaccttccagcaggatcttcccttgtttttcccgaaatggcctggactttactattgtcattacactgctcctcctgtccccgggataagctttatcgtagcgaagcccagactcttcccaggtgctgggagcgcgggatgcggactcctcgagcggttgtttctctcgttgctcctgggcactggcctcagatggtgccttgcggggctgcttcccaggagcgcgcttctgttccaccacctctycggaaggaaacaccactttcactgggctccgccgcagcgcccggacccagcgcctcgcgtcaaggtcccaagcctggaccacctgcagcaacggtcgcacgacaaacctcgmgggtctcaccagcgccgccatgttccctgagacccgggctgcgtcacgaaagcgcgccgtcggcggctagtgacgtcacggcccgtggcgcccttcgtggactgggctgtacggtgcgcgtgacggctgcgtgcggcgggaatcatggctgctcgcagagctctgcacttcgtattcaaagtgggaaaccgcttccagacggcgcgtttctatcgggacgtcctggggatgaaggttctgcggcatgaggaatttgaagaaggctgcaaagctgcctgtaatgggccttatgatgggaaatggagtaaaacaatggtgggatttgggcctgaggatgatcattttgtcgcagaactgacttacaattatggcgtcggagactacaagcttggcaatgactttatgggaatcacgctcgcttctagccaggctgtcagcaacgccaggaagctggagtggccactgayggaagttgcagaaggtgtttttgaaaccgaggccccgggaggatataagttctatttgcagaatcgcagtctgcctcagtcagatcctgtattaaaagtaactctagcagtgtctgatcttcaaaagtccttgaactactggtgtaatctactgggaatgaaaatttatgaaaaagatgaagaaaagcaaagggctttgctgggctatgctgataaccagtgtaagctggagctacagggcgtcaagggtggggtggaccatgcagcagcttttggaagaattgccttctcttgcccccagaaagagttgccagacttagaagacttgatgaaaagggagaaccagaagattctgactcccctggtgagcctggacaccccagggaaagcaacagtacaggtggtcattctggccgaccctgacggacatgaaatttgctttgtcggggatgaagcatttcgagaactttctaagatggatccagagggaagcaaattgttggatgatgcaatggcagcagataaaagtgacgagtggtttgccaaacacaataaacccaaagcttcaggttaacggaagacatgatgcagagcaagcctctgtgattcctgcccagcacctgtgaggcctgacgtggtggagtgcagtggggcaccatcgtggctttctgcagccttgacctctggggctcaagagatcctcccacctcagcctcccgaatggctgggcccacagccacgtgccaccacacccagccaacgttttgatcttttgtagcgaccgtctcactgcgttgttcaggctgcaagctgttgtttcaaacagatgaagttggaaagttcttcagcttctccagagtt

SEQ ID NO: 5873 - DNA, 1817 bp, Homo sapiens
atgaggctgacacctttcagcttatcgactggcaactcctttaggtattctagacggctaaagaagaacatttttggcacagctccagccttgagagcgtctgaaatgagcctgcgaccttccagcaggatcttcccttgtttttcccgaaatggcctggactttactattgtcattacactgctaaccacatcacctcagcctcctgtccccgggataagctttatcgtagcgaagcccagactcttcccaggtgctgggagcgcgggatgcggactcctcgagcggttgtttctctcgttgctcctgggcactggcctcagatggtgccttgcggggctgcttcccaggagcgcgcttctgttccaccacctctycggaaggaaacaccactttcactgggctccgccgcagcgcccggacccagcgcctcgcgtcaaggtcccaagcctggaccacctgcagcaacggtcgcacgacaaacctcgmgggtctcaccagcgccgccatgttccctgagacccgggctgcgtcacgaaagcgcgccgtcggcggctagtgacgtcacggcccgtggcgcccttcgtggactgggctgtacggtgcgcgtgacggctgcgtgcggcgggaatcatggctgctcgcagagctctgcacttcgtattcaaagtgggaaaccgcttccagacggcgcgtttctatcgggacgtcctggggatgaaggttctgcggcatgaggaatttgaagaaggctgcaaagctgcctgtaatgggccttatgatgggaaatggagtaaaacaatggtgggatttgggcctgaggatgatcattttgtcgcagaactgacttacaattatggcgtcggagactacaagcttggcaatgactttatgggaatcacgctcgcttctagccaggctgtcagcaacgccaggaagctggagtggccactgayggaagttgcagaaggtgtttttgaaaccgaggccccgggaggatataagttctatttgcagaatcgcagtctgcctcagtcagatcctgtattaaaagtaactctagcagtgtctgatcttcaaaagtccttgaactactggtgtaatctactgggaatgaaaatttatgaaaaagatgaagaaaagcaaagggctttgctgggctatgctgataaccagtgtaagctggagctacagggcgtcaagggtggggtggaccatgcagcagcttttggaagaattgccttctcttgcccccagaaagagttgccagacttagaagacttgatgaaaagggagaaccagaagattctgactcccctggtgagcctggacaccccagggaaagcaacagtacaggtggtcattctggccgaccctgacggacatgaaatttgctttgtcggggatgaagcatttcgagaactttctaagatggatccagagggaagcaaattgttggatgatgcaatggcagcagataaaagtgacgagtggtttgccaaacacaataaacccaaagcttcaggttaacggaagacatgatgcagagcaagcctctgtgattcctgcccagcacctgtgaggcctgacgtggtggagtgcagtggggcaccatcgtggctttctgcagccttgacctctggggctcaagagatcctcccacctcagcctcccgaatggctgggcccacagccacgtgccaccacacccagccaacgttttgatcttttgtagcgaccgtctcactgcgttgttcaggctgcaagctgttgtttcaaacagatgaagttggaaagttcttcagcttctccagagtt

SEQ ID NO: 5874 - DNA, 1538 bp, Homo sapiens
atgcggactcctcgagcggttgtttctctcgttgctcctgggcactggcctcagatggtgccttgcggggctgcttcccaggagcgcgcttctgttccaccacctctycggaaggaaacaccactttcactgggctccgccgcagcgcccggacccagcgcctcgcgtcaaggtcccaagcctggaccacctgcagcaacggtcgcacgacaaacctcgmgggtctcaccagcgccgccatgttccctgagacccgggctgcgtcacgaaagcgcgccgtcggcggctagtgacgtcacggcccgtggcgcccttcgtggactgggctgtacggtgcgcgtgacggctgcgtgcggcgggaatcatggctgctcgcagagctctgcacttcgtattcaaagtgggaaaccgcttccagacggcgcgtttctatcgggacgtcctggggatgaaggctctgactacacccggataacagaagacagtttctcaaagccttatgatgggaaatggagtaaaacaatggtgggatttgggcctgaggatgatcattttgtcgcagaactgacttacaattatggcgtcggagactacaagcttggcaatgactttatgggaatcacgctcgcttctagccaggctgtcagcaacgccaggaagctggagtggccactgayggaagttgcagaaggtgtttttgaaaccgaggccccgggaggatataagttctatttgcagaatcgcagtctgcctcagtcagatcctgtattaaaagtaactctagcagtgtctgatcttcaaaagtccttgaactactggtgtaatctactgggaatgaaaatttatgaaaaagatgaagaaaagcaaagggctttgctgggctatgctgataaccagtgtaagctggagctacagggcgtcaagggtggggtggaccatgcagcagcttttggaagaattgccttctcttgcccccagaaagagttgccagacttagaagacttgatgaaaagggagaaccagaagattctgactcccctggtgagcctggacaccccagggaaagcaacagtacaggtggtcattctggccgaccctgacggacatgaaatttgctttgtcggggatgaagcatttcgagaactttctaagatggatccagagggaagcaaattgttggatgatgcaatggcagcagataaaagtgacgagtggtttgccaaacacaataaacccaaagcttcaggttaacggaagacatgatgcagagcaagcctctgtgattcctgcccagcacctgtgaggcctgacgtggtggagtgcagtggggcaccatcgtggctttctgcagccttgacctctggggctcaagagatcctcccacctcagcctcccgaatggctgggcccacagccacgtgccaccacacccagccaacgttttgatcttttgtagcgaccgtctcactgcgttgttcaggctgcaagctgttgtttcaaacagatgaagttggaaagttcttcagcttctccagagtt

SEQ ID NO: 5875 - DNA, 2646 bp, Homo sapiens
tgcactccagcctgggtgacagaacaagacaaaaaaaaaaaaagatacactgggtaatcactaacccattattccttgtggcgttacgaggtcggaccaatccttgatatcctcaaatttcaccttaatgaggctgacacctttcagcttatcgactggcaactcctttaggtattctagacggctaaagaagaacatttttggcacagctccagccttgagagcgtctgaaatgagcctgcgaccttccagcaggatcttcccttgtttttcccgaaatggcctggactttactattgtcattacactgctcctcctgtccccgggataagctttatcgtagcgaagcccagactcttcccaggtgctgggagcgcgggatgcggactcctcgagcggttgtttctctcgttgctcctgggcactggcctcagatggtgccttgcggggctgcttcccaggagcgcgcttctgttccaccacctctycggaaggaaacaccactttcactgggctccgccgcagcgcccggacccagcgcctcgcgtcaaggtcccaagcctggaccacctgcagcaacggtcgcacgacaaacctcgmgggtctcaccagcgccgccatgttccctgagacccgggctgcgtcacgaaagcgcgccgtcggcggctagtgacgtcacggcccgtggcgcccttcgtggactgggctgtacggtgcgcgtgacggctgcgtgcggcgggaatcatggctgctcgcagagctctgcacttcgtattcaaagtgggaaaccgcttccagacggcgcgtttctatcgggacgtcctggggatgaaggttctgcggcatgaggaatttgaagaaggctgcaaagctgcctgtaatgggccttatgatgggaaatggagtaaaacaatggtgggatttgggcctgaggatgatcattttgtcgcagaactgacttacaattatggcgtcggagactacaagcttggcaatgactttatgggaatcacgctcgcttctagccaggctgtcagcaacgccaggaagctggagtggccactgayggaagttgcagaaggtgtttttgaaaccgaggccccgggaggatataagttctatttgcagaatcgcagtctgcctcagtcagatcctgtattaaaagtaactctagcagtgtctgatcttcaaaagtccttgaactactggtgtaatctactgggaatgaaaatttatgaaaaagatgaagaaaagcaaagggctttgctgggctatgctgataaccagtgtaagctggagctacagggcgtcaagggtggggtggaccatgcagcagcttttggaagaattgccttctcttgcccccagaaagagttgccagacttagaagacttgatgaaaagggagaaccagaagattctgactcccctggtgagcctggacaccccagggaaagcaacagtacaggtggtcattctggccgaccctgacggacatgaaatttgctttgtcggggatgaagcatttcgagaactttctaagatggatccagagggaagcaaattgttggatgatgcaatggcagcagataaaagtgacgagtggtttgccaaacacaataaacccaaagcttcaggttaacggaagacatgatgcagagcaagcctctgtgattcctgcccagcacctgtgaggcctgacgtgtcagttcccaataaatgctcttctgatttgtttcccgtacaggcaaggaggcttgggtagtgcagatttgtgtatttcaatctttgaaagctctgatgtaatttagaaatgaaatccaatcatgagtccaggtagagaacgcctgctgtaatctacactgttgctgggactgcgcattctgtatataactgtgttggatgagtgacagatgattgtccagactaggacagcggcatgaacatgactttggttgggattgcggatagttagggttacctctgaatcgtgtagcttttatgagagcagctgtgcaagtgaatccacattaatgccttgtcgtggtgccattcccagcgcctgacgatacgctcttctattgtcttattctggcaggttttgacgttttaaattttttaaagaaattttattccttggaccaaaaggtttggttaaccacccccctcttacttgctttcacattttgagtgtccagaggaaacagaaaggaatgagtgtgtgacgttgctgcacgcctgactctgtgcgagcttctttctgtgtatatattttgttttatttttttccgtgtatatttttaatcccgacagaacatcatgtgagatttctttaaaatggattaaacgatttcttcagcctgaaaaaaaaggttttgaaaatgttttcttgtagttttgtttggttctaaacaacaaataggttttaatcactcgaaatggaattatattgtgtattcattgaataaattttttttgaaagtaagcttctgaaatcaagctgtgataccagtctctaagtctcatcatgtaaagtggtggccaggttcagatttttaaaaataaacttaggagattggaagggattgactcagaggatcctggttcccaaagaacacatagagaattacttgtaaatcgtaacctc

SEQ ID NO: 5876 - DNA, 1733 bp, Homo sapiens
gtgacgcagcccgggtctcagggaacatggcggcgctggtgagaccckcgaggtttgtcgtgcgaccgttgctgcaggtggtccaggcttgggaccttgacgcgaggcgctgggtccgggcgctgcggcggagcccagtgaaagtggtgtttccttccgragaggtggtggaacagaagcgcgctcctgggaagcagccccgcaaggcaccatctgaggccagtgcccaggagcaacgagagaaacaaccgctcgaggagtccgcatcccgcgctcccagcacctgggaagagtctgggcttcgctacgataaagcttatcccggggacaggaggctgagcagtgtaatgacaatagtaaagtccaggccatttcgggaaaaacaagggaagatcctgctggaaggtcgcaggctcatttcagacgctctcaaggctggagctgtgccaaaaatgttcttctttagccgtctagaatacctaaaggagttgccagtcgataagctgaaaggtgtcagcctcattaaggtgaaatttgaggatatcaaggattggtccgacctcgtaacgccacaaggaataatggggatttttgccaagcctgaccatgttaagatgacatatccaaagactcagcttcagcattcactgcctttattattgatttgtgacaatctccgtgaccctgggaacctggggacaattctgagatctgcagctggggcaggctgcagcaaagtgttactcaccaaaggctgtgtggatgcctgggagcccaaagtgctccgggcgggtatgggcgcacatttccggatgcccattatcaayaatctggaatgggaaaccgtgcccaattacctgccccctgacactcgggtctatgtggctgacaactgtggcctttatgcccaggctgagatgtctaataaagctagtgaccatggctgggtgtgtgatcaacgagtgatgaagtttcacaagtatgaggaagaggaagatgtasaaaccggagccagtcaagattggctgcctcatgttgaggttcagagttacgactcggactggacagaggcgccggcagctgtggtgattggcggggagacctacggcgtgagcctggagtccctgcagctggccgagagcactggtggcaagaggctgctgatccccgttgtgcctggtgtggacagcctcaactcggccatggcggcaagcatcctgcttttcgaagggaaaagacagctgcgggggagggcggaggacttgagcagggacaggagttaccactgaggacgcagaagtgacttctgcttgaggacgtctgcagctcctcctacaccagcacactggtgggaggctggcggagtcagtgactatggcccccacgttcaggaggaaggtgtgatgccgtcatacagttacaggaaaaataagaacttcctcagaaagaacaggtccgaattcttcctgtcgcgtcactgattttgaggttcttttttctcttggtgacaataggtgacccacgtggctctgtgtgtttttaaaaattgtccaccaagaagcactttgtgcccagaaagttcctgaagcatcatcctggcagggaggcgcctgctccaccagctggtgggtgtttgtaatcgccaagcaccagctataggtcacagccacatcactcacagctgatcactggttggtggaaaataaactatgagcagcagattacgttagtaa

SEQ ID NO: 5877 - DNA, 4299 bp, Homo sapiens
cacggaacagccctcctggggtccccacgagccgcgtcctgctgtgccccggcgcctacgcagcagcggccgcggccgcggtgggcacgcacggttaccccgggcagctccggccgccagctgcagccccgtcgcctcggccgcgccagccggctgcgggcacctgggggcgggctgggggcgccggccgcggcaggaggcgctgtagcgagggctgcggcgccggtcctgcggcggccgcgggaggcagcggggcaggcgctgtgggccgggctcctcctccggctcctgcgcgaccgcctcccgccgggctctgccggcgcccgccgtccccgcagcgccgctctgcgcccgccgccccgagcgcccgcgcggggctggcgggagcctcggcgggcgcgcgggcgcgcggggccatggtcgtggccccctgacgggccgcggccgcctccatgaagcggaaaagcgagcggcggtcgagctgggccgccgcgcccccctgctcgcggcgctgctcgtcgacctcgccgggtgtgaagaagatccgcagctccacgcagcaagacccgcgccgccgggacccccaggacgacgtgtacctggacatcaccgatcgcctttgttttgccattctctacagcagaccaaagagtgcatcaaatgtacattatttcagcatagataatgaacttgaatatgagaacttctacgcagattttggaccactcaatctggcaatggtttacagatattgttgcaagatcaataagaaattaaagtccattacaatgttaaggaagaaaattgttcattttactggctctgatcagagaaaacaagcaaatgctgccttccttgttggatgctacatggttatatatttggggagaaccccagaagaagcatatagaatattaatctttggagagacatcctatattcctttcagagatgctgcctatggaagttgcaatttctacattacacttcttgactgttttcatgcagtaaagaaggcaatgcagtatggcttccttaatttcaactcatttaaccttgatgaatatgaacactatgaaaaagcagaaaatggagatttaaattggataataccagaccgatttattgccttctgtggacctcattcaagagccagacttgaaagtggttaccaccaacattctcctgagacttatattcaatattttaagaatcacaatgttactaccattattcgtctgaataaaaggatgtatgatgccaaacgctttacggatgctggcttcgatcaccatgatcttttctttgcggatggcagcacccctactgatgccattgtcaaagaattcctagatayctgtgaaaatgctgagggtgccattgcagtacattgcaaagctggccttggtcgcacgggcactctgatagcctgctacatcatgaagcattacaggatgacagcagccgagaccattgcgtgggtcaggatctgcagacctggctcggtgattgggcctcagcagcagtttttggtgatgaagcaaacmaacctctggctggaaggggactattttcgtcagaagttaaaggggcaggagaatggacaacacagagcagccttctccaaacttctctctggcgttgatgacatttccataaatggggtcgagaatcaagatcagcaagaacccgaaccgtacagtgatgatgacgaaatcaatggagtgacacaaggtgatagacttcgggccttgaaaagcagaagacaatccaaaacaaacgctattcctctcacatgtcccctagctgtgctgacctctgcactgtgtagtgttgtcatctggtggattgtttgtgactacattcttcccatcctgctattctgactaaaacagtcttgcgttaagtaaaaacctgtgaccagagctgaaggaagactctaggactgaaaactgcaacagaaattagcacaatttgaaaacagtgtaaatacccaagccctctggtacccagggagctggctggtctgtggtgcatgtgtgtccctgtgatggcaatcattgtagttgctggccttcagaagaattgaggatctgatggaggttttttatgtatttattttctgttcaccttgtgaccctgtgtcaaaatttataaagatacaaaaggcattactgaaatggtactttctgtaatttgatactatttggcttaatcatcttcacttgactatttgtaatactgttgtaatgttaactctgttaagtacccaagctgcttgtcttccaccaaagagtgctttattaacaagaatctgtgaaaatcacatttaaacactgttgcatgttgtaagaccaggtggtaccttagtaacctaaaacttgcaagagaatattaatggtagctttagaagactcaggaggagaaactgacttcagagttggaagatgttgcaagtcgttcctttttctgtccttcagggactgaagaactgggaggctgcccattgtttggttgccagtcatacaaattaaaatcatatttccttccatgaatggaagaaacacactattggtttttccccttggaaacagcaatcccaaataatgtcggcttacaaaaaaaaawwgttaccacttttttagagtccttccctgtaacattggattttttttttcccttatgagatccacctaaggccattgacgtggcctgcgatctcagtgacaatgatctgcttctggatctcactgttgcctttggttagggaacacaactagtaactctgcagagtgccttctcccgcagccctactggaacacagcagagtctgtgccatgaagcagttacagaaacagaattgatgtgctgctaaaaaaaaaaaaaaaatggggcccgaaataaaagaatatatagtactcacctcagttccttccataagaagtgggtggtttaatgattgttaagccatttttgcctgtgccgggagcatggagggctgagatgtcgacaggcagtgggaaacaaatgccctcctaagccacaaggcgtgcgccagattagtaggcaactccattttaagaagctgcctttttcacaaaactggaagaaataaaagcggttggaataaacaagttaaaagtctttaatgcaaaaagtaattgaaaggcagtgcctccattttggtgtactttcttggaagaaagtataaaattgaccggcatcatgagagacggaagatgccgtgttctcagccaaacaagcaactctttccccgccaggcactgtcgggtggggtcaggccagcttttaaacactggggactggatcacagaaaaacagtggttttctgtccctggaaatgaataggcacaaagacccacttggctgtgggcagactactcttcaataagatttgggtgggaggaggaacattccttttgctattttgagctgagacaatataaatattcaaactgtgccatgcataaagcattgaattctcagggcacctcttcttccccttaccccttttaaggccatcccctccattaataataatccaggtagttgtgaaaatcgtgcttctatctgatcccttcttagtttggcttttcatcccatcagaacaagtaaacgtaggcgccacagctcttgtgagtactgtctccctcacggtgaatgagcctcctggtgtttcgtccaagaaaagaaagggtgtcactggaaccacagccctttttcattttataaactgcctcttcatgttgcctgctcaagtttccacctagaattgctatcactgtggctctttctaaaaatctttctatttaactggttcactgaaattagtcatagaaaacttgtgatttggtgaagaggcattccttgtaataaccaaatgacttgggatggtgtgcatagcaagggcagtgttacacttatgaggactgtctctagcatccaggaagtctctgggtctgagggatggaaagttcttcctgctatgaatgagagtggactcttcccctcacccccaactgaaaccacaaacaaccagaatcttctggaattctgacttagagtcgttgttatagaagaccttgttgctatggaacatgaaactgtgtgtcagatggagagatccccttaacctaagagccttaaatagccctgaaagtacacygggacggtttgcgatggaattaaaattggaagtgaatatttttargtgctcttgaagctttctggggactcaaaattatcaaaagtcagggacagtccggaggaagagcgtct

SEQ ID NO: 5878 - DNA, 5586 bp, Homo sapiens
cacggaacagccctcctggggtccccacgagccgcgtcctgctgtgccccggcgcctacgcagcagcggccgcggccgcggtgggcacgcacggttaccccgggcagctccggccgccagctgcagccccgtcgcctcggccgcgccagccggctgcgggcacctgggggcgggctgggggcgccggccgcggcaggaggcgctgtagcgagggctgcggcgccggtcctgcggcggccgcgggaggcagcggggcaggcgctgtgggccgggctcctcctccggctcctgcgcgaccgcctcccgccgggctctgccggcgcccgccgtccccgcagcgccgctctgcgcccgccgccccgagcgcccgcgcggggctggcgggagcctcggcgggcgcgcgggcgcgcggggccatggtcgtggccccctgacgggccgcggccgcctccatgaagcggaaaagcgagcggcggtcgagctgggccgccgcgcccccctgctcgcggcgctgctcgtcgacctcgccgggtgtgaagaagatccgcagctccacgcagcaagacccgcgccgccgggacccccaggacgacgtgtacctggacatcaccgatcgcctttgttttgccattctctacagcagaccaaagagtgcatcaaatgtacattatttcagcatagataatgaacttgaatatgagaacttctacgcagattttggaccactcaatctggcaatggtttacagatattgttgcaagatcaataagaaattaaagtccattacaatgttaaggaagaaaattgttcattttactggctctgatcagagaaaacaagcaaatgctgccttccttgttggatgctacatggttatatatttggggagaaccccagaagaagcatatagaatattaatctttggagagacatcctatattcctttcagagatgctgcctatggaagttgcaatttctacattacacttcttgactgttttcatgcagtaaagaaggcaatgcagtatggcttccttaatttcaactcatttaaccttgatgaatatgaacactatgaaaaagcagaaaatggagatttaaattggataataccagaccgatttattgccttctgtggacctcattcaagagccagacttgaaagtggttaccaccaacattctcctgagacttatattcaatattttaagaatcacaatgttactaccattattcgtctgaataaaaggatgtatgatgccaaacgctttacggatgctggcttcgatcaccatgatcttttctttgcggatggcagcacccctactgatgccattgtcaaagaattcctagatayctgtgaaaatgctgagggtgccattgcagtacattgcaaagctggccttggtcgcacgggcactctgatagcctgctacatcatgaagcattacaggatgacagcagccgagaccattgcgtgggtcaggatctgcagacctggctcggtgattgggcctcagcagcagtttttggtgatgaagcaaacmaacctctggctggaaggggactattttcgtcagaagttaaaggggcaggagaatggacaacacagagcagccttctccaaacttctctctggcgttgatgacatttccataaatggggtcgagaatcaagatcagcaagaacccgaaccgtacagtgatgatgacgaaatcaatggagtgacacaaggtgatagacttcgggccttgaaaagcagaagacaatccaaaacaaacgctattcctctcacagtaattcttcaatccagtgttcagagctgtaaaacatctgaacctaacatttctggcagtgcaggcattactaaaagaaccaccagatctgcttcaaggaaaagcagtgttaaaagtctctccatttcaaggactaaaacagtcttgcgttaagtaaaaacctgtgaccagagctgaaggaagactctaggactgaaaactgcaacagaaattagcacaatttgaaaacaaaacaaaattgcaaaagccttagttgctttttccacctaagaagttgatcaatggagaaaatgtccactggagtttgaataatgaactttgagtttgggtgcaagcaaatgactcagagaagggtccagctctcaagctgaatgacaaacatgctgttgtaaatttagtctcaggtgtaaatacccaagccctctggtacccagggagctggctggtctgtggtgcatgtgtgtccctgtgatggcaatcattgtagttgctggccttcagaagaattgaggatctgatggaggttttttatgtatttattttctgttcaccttgtgaccctgtgtcaaaatttataaagatacaaaaggcattactgaaatggtactttctgtaatttgatactatttggcttaatcatcttcacttgactatttgtaatactgttgtaatgttaactctgttaagtacccaagctgcttgtcttccaccaaagagtgctttattaacaagaatctgtgaaaatcacatttaaacactgttgcatgttgtaagaccaggtggtaccttagtaacctaaaacttgcaagagaatattaatggtagctttagaagactcaggaggagaaactgacttcagagttggaagatgttgcaagtcgttcctttttctgtccttcagggactgaagaactgggaggctgcccattgtttggttgccagtcatacaaattaaaatcatatttccttccatgaatggaagaaacacactattggtttttccccttggaaacagcaatcccaaataatgtcggcttacaaaaaaaaawwgttaccacttttttagagtccttccctgtaacattggattttttttttcccttatgagatccacctaaggccattgacgtggcctgcgatctcagtgacaatgatctgcttctggatctcactgttgcctttggttagggaacacaactagtaactctgcagagtgccttctcccgcagccctactggaacacagcagagtctgtgccatgaagcagttacagaaacagaattgatgtgctgctaaaaaaaaaaaaaaaatggggcccgaaataaaagaatatatagtactcacctcagttccttccataagaagtgggtggtttaatgattgttaagccatttttgcctgtgccgggagcatggagggctgagatgtcgacaggcagtgggaaacaaatgccctcctaagccacaaggcgtgcgccagattagtaggcaactccattttaagaagctgcctttttcacaaaactggaagaaataaaagcggttggaataaacaagttaaaagtctttaatgcaaaaagtaattgaaaggcagtgcctccattttggtgtactttcttggaagaaagtataaaattgaccggcatcatgagagacggaagatgccgtgttctcagccaaacaagcaactctttccccgccaggcactgtcgggtggggtcaggccagcttttaaacactggggactggatcacagaaaaacagtggttttctgtccctggaaatgaataggcacaaagacccacttggctgtgggcagactactcttcaataagatttgggtgggaggaggaacattccttttgctattttgagctgagacaatataaatattcaaactgtgccatgcataaagcattgaattctcagggcacctcttcttccccttaccccttttaaggccatcccctccattaataataatccaggtagttgtgaaaatcgtgcttctatctgatcccttcttagtttggcttttcatcccatcagaacaagtaaacgtaggcgccacagctcttgtgagtactgtctccctcacggtgaatgagcctcctggtgtttcgtccaagaaaagaaagggtgtcactggaaccacagccctttttcattttataaactgcctcttcatgttgcctgctcaagtttccacctagaattgctatcactgtggctctttctaaaaatctttctatttaactggttcactgaaattagtcatagaaaacttgtgatttggtgaagaggcattccttgtaataaccaaatgacttgggatggtgtgcatagcaagggcagtgttacacttatgaggactgtctctagcatccaggaagtctctgggtctgagggatggaaagttcttcctgctatgaatgagagtggactcttcccctcacccccaactgaaaccacaaacaaccagaatcttctggaattctgacttagagtcgttgttatagaagaccttgttgctatggaacatgaaactgtgtgtcagatggagagatccccttaacctaagagccttaaatagccctgaaagtacacygggacggtttgcgatggaattaaaattggaagtgaatatttttargtgctcttgaagctttctggggactcaaaattatcaaaagtcagggacagtccggaggaagagcgtctgcaaaactgggttcctagaagtatagacggacttagctttttgtagaatttggtgaggagcagcgcctcgtgagagcagaatggcctggcgtggccagtgcttcccggcagcacgcagctctgcggcctccagaattcccctgttctgagcttgatgcccctagcctgtcccctacctacttcctcccctcctctctagccctctcacaggggtgattgctacctctctgttttcttgggcctaggcaagttttagaggagttcccaagcattgttatgaggccagtgtgctcgctgggctgggcgggatggcctgggcttgtgtgtggcctgagggctctcctggggccttctcttttcccagtcacctttggagccacagaagcagtgcactcattggatgtctgttcttaacacagcttctctttctacattaaaaaaaatcattattgcattttggaaagcagtgctcatcaaaagcaacttttaaaacctattttattgttcctttaaatgttctctcccgctgaaactgccctggagaggctatctgctgctcttccatttacccacatcaggttattctccatgtcactcagtggagatgactccagatgtgtttaaagactggacaattcacctatactgtgtaggaaattacctccttaattacctggtagaattgtcagcagacatgttcatccgatgatagtactgcagttttctattaataatttgcagacttttatctaacctgcactcatgtacagattattaaaagttttaaaatgtaactgatcagtattgatcaatcattgtcttgatttttttttacagcgtatatttctaatcatattttttaaagccaagagaactggttgaatgaatgtttattttcctgaaggtatttttaagataaagcttcctaatggcgtgtaaactttgcatatgtatgtagtttgatacatattgtcacatttgaaaatcttgtgggttgtaactggttttatacaaaatatcgaatagtggaaattgtataattacaatcatgtaattaaaagtattaaccc

SEQ ID NO: 5879 - DNA, 4368 bp, Homo sapiens
cacggaacagccctcctggggtccccacgagccgcgtcctgctgtgccccggcgcctacgcagcagcggccgcggccgcggtgggcacgcacggttaccccgggcagctccggccgccagctgcagccccgtcgcctcggccgcgccagccggctgcgggcacctgggggcgggctgggggcgccggccgcggcaggaggcgctgtagcgagggctgcggcgccggtcctgcggcggccgcgggaggcagcggggcaggcgctgtgggccgggctcctcctccggctcctgcgcgaccgcctcccgccgggctctgccggcgcccgccgtccccgcagcgccgctctgcgcccgccgccccgagcgcccgcgcggggctggcgggagcctcggcgggcgcgcgggcgcgcggggccatggtcgtggccccctgacgggccgcggccgcctccatgaagcggaaaagcgagcggcggtcgagctgggccgccgcgcccccctgctcgcggcgctgctcgtcgacctcgccgggtgtgaagaagatccgcagctccacgcagcaagacccgcgccgccgggacccccaggacgacgtgtacctggacatcaccgatcgcctttgttttgccattctctacagcagaccaaagagtgcatcaaatgtacattatttcagcatagataatgaacttgaatatgagaacttctacgcagattttggaccactcaatctggcaatggtttacagatattgttgcaagatcaataagaaattaaagtccattacaatgttaaggaagaaaattgttcattttactggctctgatcagagaaaacaagcaaatgctgccttccttgttggatgctacatggttatatatttggggagaaccccagaagaagcatatagaatattaatctttggagagacatcctatattcctttcagagatgctgcctatggaagttgcaatttctacattacacttcttgcaatgcagtatggcttccttaatttcaactcatttaaccttgatgaatatgaacactatgaaaaagcagaaaatggagatttaaattggataataccagaccgatttattgccttctgtggacctcattcaagagccagacttgaaagtggttaccaccaacattctcctgagacttatattcaatattttaagaatcacaatgttactaccattattcgtctgaataaaaggatgtatgatgccaaacgctttacggatgctggcttcgatcaccatgatcttttctttgcggatggcagcacccctactgatgccattgtcaaagaattcctagatayctgtgaaaatgctgagggtgccattgcagtacattgcaaagctggccttggtcgcacgggcactctgatagcctgctacatcatgaagcattacaggatgacagcagccgagaccattgcgtgggtcaggatctgcagacctggctcggtgattgggcctcagcagcagtttttggtgatgaagcaaacmaacctctggctggaaggggactattttcgtcagaagttaaaggggcaggagaatggacaacacagagcagccttctccaaacttctctctggcgttgatgacatttccataaatggggtcgagaatcaagatcagcaagaacccgaaccgtacagtgatgatgacgaaatcaatggagtgacacaaggtgatagacttcgggccttgaaaagcagaagacaatccaaaacaaacgctgtagtctctccatttcaaggactaaaacagtcttgcgttaagtaaaaacctgtgaccagagctgaaggaagactctaggactgaaaactgcaacagaaattagcacaatttgaaaacaaaacaaaattgcaaaagccttagttgctttttccacctaagaagttgatcaatggagaaaatgtccactggagtttgaataatgaactttgagtttgggtgcaagcaaatgactcagagaagggtccagctctcaagctgaatgacaaacatgctgttgtaaatttagtctcaggtgtaaatacccaagccctctggtacccagggagctggctggtctgtggtgcatgtgtgtccctgtgatggcaatcattgtagttgctggccttcagaagaattgaggatctgatggaggttttttatgtatttattttctgttcaccttgtgaccctgtgtcaaaatttataaagatacaaaaggcattactgaaatggtactttctgtaatttgatactatttggcttaatcatcttcacttgactatttgtaatactgttgtaatgttaactctgttaagtacccaagctgcttgtcttccaccaaagagtgctttattaacaagaatctgtgaaaatcacatttaaacactgttgcatgttgtaagaccaggtggtaccttagtaacctaaaacttgcaagagaatattaatggtagctttagaagactcaggaggagaaactgacttcagagttggaagatgttgcaagtcgttcctttttctgtccttcagggactgaagaactgggaggctgcccattgtttggttgccagtcatacaaattaaaatcatatttccttccatgaatggaagaaacacactattggtttttccccttggaaacagcaatcccaaataatgtcggcttacaaaaaaaaawwgttaccacttttttagagtccttccctgtaacattggattttttttttcccttatgagatccacctaaggccattgacgtggcctgcgatctcagtgacaatgatctgcttctggatctcactgttgcctttggttagggaacacaactagtaactctgcagagtgccttctcccgcagccctactggaacacagcagagtctgtgccatgaagcagttacagaaacagaattgatgtgctgctaaaaaaaaaaaaaaaatggggcccgaaataaaagaatatatagtactcacctcagttccttccataagaagtgggtggtttaatgattgttaagccatttttgcctgtgccgggagcatggagggctgagatgtcgacaggcagtgggaaacaaatgccctcctaagccacaaggcgtgcgccagattagtaggcaactccattttaagaagctgcctttttcacaaaactggaagaaataaaagcggttggaataaacaagttaaaagtctttaatgcaaaaagtaattgaaaggcagtgcctccattttggtgtactttcttggaagaaagtataaaattgaccggcatcatgagagacggaagatgccgtgttctcagccaaacaagcaactctttccccgccaggcactgtcgggtggggtcaggccagcttttaaacactggggactggatcacagaaaaacagtggttttctgtccctggaaatgaataggcacaaagacccacttggctgtgggcagactactcttcaataagatttgggtgggaggaggaacattccttttgctattttgagctgagacaatataaatattcaaactgtgccatgcataaagcattgaattctcagggcacctcttcttccccttaccccttttaaggccatcccctccattaataataatccaggtagttgtgaaaatcgtgcttctatctgatcccttcttagtttggcttttcatcccatcagaacaagtaaacgtaggcgccacagctcttgtgagtactgtctccctcacggtgaatgagcctcctggtgtttcgtccaagaaaagaaagggtgtcactggaaccacagccctttttcattttataaactgcctcttcatgttgcctgctcaagtttccacctagaattgctatcactgtggctctttctaaaaatctttctatttaactggttcactgaaattagtcatagaaaacttgtgatttggtgaagaggcattccttgtaataaccaaatgacttgggatggtgtgcatagcaagggcagtgttacacttatgaggactgtctctagcatccaggaagtctctgggtctgagggatggaaagttcttcctgctatgaatgagagtggactcttcccctcacccccaactgaaaccacaaacaaccagaatcttctggaattctgacttagagtcgttgttatagaagaccttgttgctatggaacatgaaactgtgtgtcagatggagagatccccttaacctaagagccttaaatagccctgaaagtacacygggacggtttgcgatggaattaaaattggaagtgaatatttttargtgctcttgaagctttctggggactcaaaattatcaaaagtcagggacagtccggaggaagagcgtct

SEQ ID NO: 5880 - DNA, 3298 bp, Homo sapiens
cacggaacagccctcctggggtccccacgagccgcgtcctgctgtgccccggcgcctacgcagcagcggccgcggccgcggtgggcacgcacggttaccccgggcagctccggccgccagctgcagccccgtcgcctcggccgcgccagccggctgcgggcacctgggggcgggctgggggcgccggccgcggcaggaggcgctgtagcgagggctgcggcgccggtcctgcggcggccgcgggaggcagcggggcaggcgctgtgggccgggctcctcctccggctcctgcgcgaccgcctcccgccgggctctgccggcgcccgccgtccccgcagcgccgctctgcgcccgccgccccgagcgcccgcgcggggctggcgggagcctcggcgggcgcgcgggcgcgcggggccatggtcgtggccccctgacgggccgcggccgcctccatgaagcggaaaagcgagcggcggtcgagctgggccgccgcgcccccctgctcgcggcgctgctcgtcgacctcgccgggtgtgaagaagatccgcagctccacgcagcaagacccgcgccgccgggacccccaggacgacgtgtacctggacatcaccgatcgcctttgttttgccattctctacagcagaccaaagagtgcatcaaatgtacattatttcagcatagataatgaacttgaatatgagaacttctacgcagattttggaccactcaatctggcaatggtttacagatattgttgcaagatcaataagaaattaaagtccattacaatgttaaggaagaaaattgttcattttactggctctgatcagagaaaacaagcaaatgctgccttccttgttggatgctacatggttatatatttggggagaaccccagaagaagcatatagaatattaatctttggagagacatcctatattcctttcagagatgctgcctatggaagttgcaatttctacattacacttcttgactgttttcatgcagtaaagaaggcaatgcagtatggcttccttaatttcaactcatttaaccttgatgaatatgaacactatgaaaaagcagaaaatggagatttaaattggataataccagaccgatttattgccttctgtggacctcattcaagagccagacttgaaagtggttaccaccaacattctcctgagacttatattcaatattttaagaatcacaatgttactaccattattcgtctgaataaaaggatgtatgatgccaaacgctttacggatgctggcttcgatcaccatgatcttttctttgcggatggcagcacccctactgatgccattgtcaaagaattcctagatayctgtgaaaatgctgagggtgccattgcagtacattgcaaagctggccttggtcgcacgggcactctgatagcctgctacatcatgaagcattacaggatgacagcagccgagaccattgcgtgggtcaggatctgcagacctggctcggtgattgggcctcagcagcagtttttggtgatgaagcaaacmaacctctggctggaaggggactattttcgtcagaagttaaaggggcaggagaatggacaacacagagcagccttctccaaacttctctctggcgttgatgacatttccataaatggggtcgagaatcaagatcagcaagaacccgaaccgtacagtgatgatgacgaaatcaatggagtgacacaaggtgatagacttcgggccttgaaaagcagaagacaatccaaaacaaacgctattcctctcactctctccatttcaaggactaaaacagtcttgcgttaagtaaaaacctgtgaccagagctgaaggaagactctaggactgaaaactgcaacagaaattagcacaatttgaaaacaaaacaaaattgcaaaagccttagttgctttttccacctaagaagttgatcaatggagaaaatgtccactggagtttgaataatgaactttgagtttgggtgcaagcaaatgactcagagaagggtccagctctcaagctgaatgacaaacatgctgttgtaaatttagtctcaggtgtaaatacccaagccctctggtacccagggagctggctggtctgtggtgcatgtgtgtccctgtgatggcaatcattgtagttgctggccttcagaagaattgaggatctgatggaggttttttatgtatttattttctgttcaccttgtgaccctgtgtcaaaatttataaagatacaaaaggcattactgaaatggtactttctgtaatttgatactatttggcttaatcatcttcacttgactatttgtaatactgttgtaatgttaactctgttaagtacccaagctgcttgtcttccaccaaagagtgctttattaacaagaatctgtgaaaatcacatttaaacactgttgcatgttgtaagaccaggtggtaccttagtaacctaaaacttgcaagagaatattaatggtagctttagaagactcaggaggagaaactgacttcagagttggaagatgttgcaagtcgttcctttttctgtccttcagggactgaagaactgggaggctgcccattgtttggttgccagtcatacaaattaaaatcatatttccttccatgaatggaagaaacacactattggtttttccccttggaaacagcaatcccaaataatgtcggcttacaaaaaaaaawwgttaccacttttttagagtccttccctgtaacattggattttttttttcccttatgagatccacctaaggccattgacgtggcctgcgatctcagtgacaatgatctgcttctggatctcactgttgcctttggttagggaacacaactaagtgccttctcccgcagccctactggaacacagcagagtctgtgccatgaagcagttacagaaacagaattgatgtgctgctaaaaaaaaaaaaaaaatggggcccgaaataaaagaatatatagtactcacctcagttccttccataagaagtgggtggtttaatgattgttaagccatttttgcctgtgccgggagcatggagggctgagatgtcgacaggcagtgggaaacaaatgccctcctaagccacaaggcgtgcgccagattagtaggcaactccattttaagaagctgcctttttcacaaaactggaagaaataaaagcggttggaataaacaagttaaaagtctttaatgcaaaaagtaattgaaaggcagtgcctccattttggtgtactttcttggaagaaagtata

SEQ ID NO: 5881 - DNA, 5592 bp, Homo sapiens
cacggaacagccctcctggggtccccacgagccgcgtcctgctgtgccccggcgcctacgcagcagcggccgcggccgcggtgggcacgcacggttaccccgggcagctccggccgccagctgcagccccgtcgcctcggccgcgccagccggctgcgggcacctgggggcgggctgggggcgccggccgcggcaggaggcgctgtagcgagggctgcggcgccggtcctgcggcggccgcgggaggcagcggggcaggcgctgtgggccgggctcctcctccggctcctgcgcgaccgcctcccgccgggctctgccggcgcccgccgtccccgcagcgccgctctgcgcccgccgccccgagcgcccgcgcggggctggcgggagcctcggcgggcgcgcgggcgcgcggggccatggtcgtggccccctgacgggccgcggccgcctccatgaagcggaaaagcgagcggcggtcgagctgggccgccgcgcccccctgctcgcggcgctgctcgtcgacctcgccgggtgtgaagaagatccgcagctccacgcagcaagacccgcgccgccgggacccccaggacgacgtgtacctggacatcaccgatcgcctttgttttgccattctctacagcagaccaaagagtgcatcaaatgtacattatttcagcatagataatgaacttgaatatgagaacttctacgcagattttggaccactcaatctggcaatggtttacagatattgttgcaagatcaataagaaattaaagtccattacaatgttaaggaagaaaattgttcattttactggctctgatcagagaaaacaagcaaatgctgccttccttgttggatgctacatggttatatatttggggagaaccccagaagaagcatatagaatattaatctttggagagacatcctatattcctttcagagatgctgcctatggaagttgcaatttctacattacacttcttgactgttttcatgcagtaaagaaggcaatgcagtatggcttccttaatttcaactcatttaaccttgatgaatatgaacactatgaaaaagcagaaaatggagatttaaattggataataccagaccgatttattgccttctgtggacctcattcaagagccagacttgaaagtggttaccaccaacattctcctgagacttatattcaatattttaagaatcacaatgttactaccattattcgtctgaataaaaggatgtatgatgccaaacgctttacggatgctggcttcgatcaccatgatcttttctttgcggatggcagcacccctactgatgccattgtcaaagaattcctagatayctgtgaaaatgctgagggtgccattgcagtacattgcaaagctggccttggtcgcacgggcactctgatagcctgctacatcatgaagcattacaggatgacagcagccgagaccattgcgtgggtcaggatctgcagacctggctcggtgattgggcctcagcagcagtttttggtgatgaagcaaacmaacctctggctggaaggggactattttcgtcagaagttaaaggggcaggagaatggacaacacagagcagccttctccaaacttctctctggcgttgatgacatttccataaatggggtcgagaatcaagatcagcaagaacccgaaccggtaatcaagcctgatgatgacgaaatcaatggagtgacacaaggtgatagacttcgggccttgaaaagcagaagacaatccaaaacaaacgctattcctctcacagtaattcttcaatccagtgttcagagctgtaaaacatctgaacctaacatttctggcagtgcaggcattactaaaagaaccaccagatctgcttcaaggaaaagcagtgttaaaagtctctccatttcaaggactaaaacagtcttgcgttaagtaaaaacctgtgaccagagctgaaggaagactctaggactgaaaactgcaacagaaattagcacaatttgaaaacaaaacaaaattgcaaaagccttagttgctttttccacctaagaagttgatcaatggagaaaatgtccactggagtttgaataatgaactttgagtttgggtgcaagcaaatgactcagagaagggtccagctctcaagctgaatgacaaacatgctgttgtaaatttagtctcaggtgtaaatacccaagccctctggtacccagggagctggctggtctgtggtgcatgtgtgtccctgtgatggcaatcattgtagttgctggccttcagaagaattgaggatctgatggaggttttttatgtatttattttctgttcaccttgtgaccctgtgtcaaaatttataaagatacaaaaggcattactgaaatggtactttctgtaatttgatactatttggcttaatcatcttcacttgactatttgtaatactgttgtaatgttaactctgttaagtacccaagctgcttgtcttccaccaaagagtgctttattaacaagaatctgtgaaaatcacatttaaacactgttgcatgttgtaagaccaggtggtaccttagtaacctaaaacttgcaagagaatattaatggtagctttagaagactcaggaggagaaactgacttcagagttggaagatgttgcaagtcgttcctttttctgtccttcagggactgaagaactgggaggctgcccattgtttggttgccagtcatacaaattaaaatcatatttccttccatgaatggaagaaacacactattggtttttccccttggaaacagcaatcccaaataatgtcggcttacaaaaaaaaawwgttaccacttttttagagtccttccctgtaacattggattttttttttcccttatgagatccacctaaggccattgacgtggcctgcgatctcagtgacaatgatctgcttctggatctcactgttgcctttggttagggaacacaactagtaactctgcagagtgccttctcccgcagccctactggaacacagcagagtctgtgccatgaagcagttacagaaacagaattgatgtgctgctaaaaaaaaaaaaaaaatggggcccgaaataaaagaatatatagtactcacctcagttccttccataagaagtgggtggtttaatgattgttaagccatttttgcctgtgccgggagcatggagggctgagatgtcgacaggcagtgggaaacaaatgccctcctaagccacaaggcgtgcgccagattagtaggcaactccattttaagaagctgcctttttcacaaaactggaagaaataaaagcggttggaataaacaagttaaaagtctttaatgcaaaaagtaattgaaaggcagtgcctccattttggtgtactttcttggaagaaagtataaaattgaccggcatcatgagagacggaagatgccgtgttctcagccaaacaagcaactctttccccgccaggcactgtcgggtggggtcaggccagcttttaaacactggggactggatcacagaaaaacagtggttttctgtccctggaaatgaataggcacaaagacccacttggctgtgggcagactactcttcaataagatttgggtgggaggaggaacattccttttgctattttgagctgagacaatataaatattcaaactgtgccatgcataaagcattgaattctcagggcacctcttcttccccttaccccttttaaggccatcccctccattaataataatccaggtagttgtgaaaatcgtgcttctatctgatcccttcttagtttggcttttcatcccatcagaacaagtaaacgtaggcgccacagctcttgtgagtactgtctccctcacggtgaatgagcctcctggtgtttcgtccaagaaaagaaagggtgtcactggaaccacagccctttttcattttataaactgcctcttcatgttgcctgctcaagtttccacctagaattgctatcactgtggctctttctaaaaatctttctatttaactggttcactgaaattagtcatagaaaacttgtgatttggtgaagaggcattccttgtaataaccaaatgacttgggatggtgtgcatagcaagggcagtgttacacttatgaggactgtctctagcatccaggaagtctctgggtctgagggatggaaagttcttcctgctatgaatgagagtggactcttcccctcacccccaactgaaaccacaaacaaccagaatcttctggaattctgacttagagtcgttgttatagaagaccttgttgctatggaacatgaaactgtgtgtcagatggagagatccccttaacctaagagccttaaatagccctgaaagtacacygggacggtttgcgatggaattaaaattggaagtgaatatttttargtgctcttgaagctttctggggactcaaaattatcaaaagtcagggacagtccggaggaagagcgtctgcaaaactgggttcctagaagtatagacggacttagctttttgtagaatttggtgaggagcagcgcctcgtgagagcagaatggcctggcgtggccagtgcttcccggcagcacgcagctctgcggcctccagaattcccctgttctgagcttgatgcccctagcctgtcccctacctacttcctcccctcctctctagccctctcacaggggtgattgctacctctctgttttcttgggcctaggcaagttttagaggagttcccaagcattgttatgaggccagtgtgctcgctgggctgggcgggatggcctgggcttgtgtgtggcctgagggctctcctggggccttctcttttcccagtcacctttggagccacagaagcagtgcactcattggatgtctgttcttaacacagcttctctttctacattaaaaaaaatcattattgcattttggaaagcagtgctcatcaaaagcaacttttaaaacctattttattgttcctttaaatgttctctcccgctgaaactgccctggagaggctatctgctgctcttccatttacccacatcaggttattctccatgtcactcagtggagatgactccagatgtgtttaaagactggacaattcacctatactgtgtaggaaattacctccttaattacctggtagaattgtcagcagacatgttcatccgatgatagtactgcagttttctattaataatttgcagacttttatctaacctgcactcatgtacagattattaaaagttttaaaatgtaactgatcagtattgatcaatcattgtcttgatttttttttacagcgtatatttctaatcatattttttaaagccaagagaactggttgaatgaatgtttattttcctgaaggtatttttaagataaagcttcctaatggcgtgtaaactttgcatatgtatgtagtttgatacatattgtcacatttgaaaatcttgtgggttgtaactggttttatacaaaatatcgaatagtggaaattgtataattacaatcatgtaattaaaagtattaaccc

SEQ ID NO: 5882 - DNA, 5016 bp, Homo sapiens
cacggaacagccctcctggggtccccacgagccgcgtcctgctgtgccccggcgcctacgcagcagcggccgcggccgcggtgggcacgcacggttaccccgggcagctccggccgccagctgcagccccgtcgcctcggccgcgccagccggctgcgggcacctgggggcgggctgggggcgccggccgcggcaggaggcgctgtagcgagggctgcggcgccggtcctgcggcggccgcgggaggcagcggggcaggcgctgtgggccgggctcctcctccggctcctgcgcgaccgcctcccgccgggctctgccggcgcccgccgtccccgcagcgccgctctgcgcccgccgccccgagcgcccgcgcggggctggcgggagcctcggcgggcgcgcgggcgcgcggggccatggtcgtggccccctgacgggccgcggccgcctccatgaagcggaaaagcgagcggcggtcgagctgggccgccgcgcccccctgctcgcggcgctgctcgtcgacctcgccgggtgtgaagaagatccgcagctccacgcagcaagacccgcgccgccgggacccccaggacgacgtgtacctggacatcaccgatcgcctttgttttgccattctctacagcagaccaaagagtgcatcaaatgtacattatttcagcatagataatgaacttgaatatgagaacttctacgcagattttggaccactcaatctggcaatggtttacagatattgttgcaagatcaataagaaattaaagtccattacaatgttaaggaagaaaattgttcattttactggctctgatcagagaaaacaagcaaatgctgccttccttgttggatgctacatggttatatatttggggagaaccccagaagaagcatatagaatattaatctttggagagacatcctatattcctttcagagatgctgcctatggaagttgcaatttctacattacacttcttgactgttttcatgcagtaaagaaggcaatgcagtatggcttccttaatttcaactcatttaaccttgatgaatatgaacactatgaaaaagcagaaaatggagatttaaattggataataccagaccgatttattgccttctgtggacctcattcaagagccagacttgaaagtggttaccaccaacattctcctgagacttatattcaatattttaagaatcacaatgttactaccattattcgtctgaataaaaggatgtatgatgccaaacgctttacggatgctggcttcgatcaccatgatcttttctttgcggatggcagcacccctactgatgccattgtcaaagaattcctagatayctgtgaaaatgctgagggtgccattgcagtacattgcaaagctggccttggtcgcacgggcactctgatagcctgctacatcatgaagcattacaggatgacagcagccgagaccattgcgtgggtcaggatctgcagacctggctcggtgattgggcctcagcagcagtttttggtgatgaagcaaacmaacctctggctggaaggggactattttcgtcagaagttaaaggggcaggagaatggacaacacagagcagccttctccaaacttctctctggcgttgatgacatttccataaatggggtcgagaatcaagatcagcaagaacccgaaccgtacagtgatgatgacgaaatcaatggagtgacacaaggtgatagacttcgggccttgaaaagcagaagacaatccaaaacaaacgctattcctctcaccgatggttggctgtcccaggctgtcacctttctagaccggcttctgatctggctcgggatccacaaggactagacctgcggggaaggtctctcctggacacgcccgttgcccactgcaagttctctccaggtgcaattgaagcctctcagcagcggaggccgccatgtggagagagcaggcaggcccactgctgctgagaacagggcaggcacgggcagctcctgttctgcctttcccagcttcggagacgcaggctcagctgctccgaagcacctgccagcaccgcacagtacagtttcagaggacagcagtctccttcccgtgaagctcccatgtgctggaatggcatggacttgctgatcaacagaaggaaatggtctgaagtctgaccagcacaaggaaggaggctggctggctcagaggggcccaccttgcgtggaatgaaaacgccaaaggctcatgagcaacattaggctagaggggtcttgttcaaagcatccaactctgacttcggaggcattcccagccggcagcagtgtgtccagcctgcctcttcccaggctggtctgacatgcagcttaggctttcatcccaagttaggtactgacccctccctcttgggcagcacctccctttttaaaaaaatttttttttcttccaaagacagagtcttgctcttgttgtccaggctggagtgcagtggcgcgatctaggctcactgcaacctccttctcccaggttcaagcgactctcctgcctcagcctcctgagtagctgggattataggcgtctgccaccacgcccggctaatttctgtatttttagtagagacagggtttcaccatgttggccaggctggtctcgaactcctgacctcaagtgatctgcctgccttggcctcccaaagtgctgggattacaggtgtcagccaccgcacccagccaagcacccctatctctagaggatctggccccccagcccagttactgcagggcagctttccccacctggtgacaggctgtgcgcagcagccccaggacctcaccctgagctgagtcttcaggagccgccctggtggcacaactcagacacccctgaggcctagcagtcaactcctgattcagacatgatccagtccagcctgggcttggctataaccagctcaaacttgcttgacctccacttttcaggagacttggggacgacagccctcatcggcgtctttcatggggttaatctgcttgagtctaagtcgccagccagaaacgtggtgcccagggtgccctgcctcargacatgtccacacccacgtcacaagcacctgaggagtccggccggggcactgtggtccaaaaggtcctgccgcctccgcatctgactgtcccaacggcatgctggtgacacccccctgcccttcgcttctgtcctccctggcttctctggggcacttggggctatgtacaacctggcacgatccagaaagggtgcaaacaaaatgcctacatccaggcacacgaccaagtcagcgagagctagccctggtaagcaaacatagcccattacaggttcagaacgtgcaccgggttccccaaaactgtcttcaaccacatgactcaacagctctatgggataggaactgtcagtgtttttgcaactgcaacattaaaccaagtgctgtgggcttttcaagtattattcacaacactaaaggaaagtttcttcaaagggctctctggctaatcttcaaagccgcrgttaggcaaaatgacagtgtgacagcttcaaagccactgactcatgacacagccctgatgttgtaccggctaggttcagatttcagaaatcagggcacttgcatccattgccttttccaggaaagggaagaaaacactcagttgataaaccttagtactcagataataaataagagaccaaaagtaggctatcacccaaagcaaacatccttaactgaccctaacgtgtatggattcaactttgattattcaacaaaatcatgaccgactgctgtggcctggagtaaccaaaggactgttttctctacacaaagtcaggagcgaataccaacctttatttgcacttgggttccagttcaaagccaccttagacagtgtggcaaagtgggaaaaagcacagatcctgggaccaaggttcagattccatctcaagcgagcatatgaactgtgtgacaacaggcagacagtacctctgtgtctatgagaaagcggggagagcaacaccccagcttctagcagctctacagctgcctggacctgcaggccctcctaggcccacttcctccccagcacagtgtgtgttcccgggcgtgtgtggctctgggtccagctctgttcagggtgggactccaggtgaattactgaacctctgaggtgtacccccaaccccaaactttcaccaaaagcaataaagaggaactctagaactggagccaggactaagtgagaaaaactgcttataagtgcttaataaatactagttatttacaacttttgctcaagccgagggcagaggcctttgtacgcagctgccgaactctgactctagttctgcggaagaaaaggatgcggtatttgcttttgccatgatccctttccatttrattggcaggttaaataacatggtttttgaagtcacatacttaatattcttcctaaaaaccacccaaacactagatgtgtgtgtgcacacacacagaaaccacgaggtagtttaaatcaccattaaaaatcaacgctttctctgattctgtgtcacasagtggtggccagtggctacacaatagcgatttttaaatgattggttaagtgaaaaccagaactcaaaatattccaggagagaagataacatttacaagtaaacagtaagtgcaattgtattttaatttcttggtctccgaaaactcagctgtgactgctttccattaacagttccagctctatgtgtttcctctaacgctaaaggcacagcccccgggaatctactgcttcctaagagtctccatggagtctattttacaacctcctttccctccatgcttccgcggaggagtctatactatctctatatacacattttaaacattattcttcatttgaaattccttcaataaaaacacagtcaccattcttcatcttcttgggaaatggcctgctctcgagcctctggagaagcccctctaaca

SEQ ID NO: 5883 - DNA, 5226 bp, Homo sapiens
cacggaacagccctcctggggtccccacgagccgcgtcctgctgtgccccggcgcctacgcagcagcggccgcggccgcggtgggcacgcacggttaccccgggcagctccggccgccagctgcagccccgtcgcctcggccgcgccagccggctgcgggcacctgggggcgggctgggggcgccggccgcggcaggaggcgctgtagcgagggctgcggcgccggtcctgcggcggccgcgggaggcagcggggcaggcgctgtgggccgggctcctcctccggctcctgcgcgaccgcctcccgccgggctctgccggcgcccgccgtccccgcagcgccgctctgcgcccgccgccccgagcgcccgcgcggggctggcgggagcctcggcgggcgcgcgggcgcgcggggccatggtcgtggccccctgacgggccgcggccgcctccatgaagcggaaaagcgagcggcggtcgagctgggccgccgcgcccccctgctcgcggcgctgctcgtcgacctcgccgggtgtgaagaagatccgcagctccacgcagcaagacccgcgccgccgggacccccaggacgacgtgtacctggacatcaccgatcgcctttgttttgccattctctacagcagaccaaagagtgcatcaaatgtacattatttcagcatagataatgaacttgaatatgagaacttctacgcagattttggaccactcaatctggcaatggtttacagatattgttgcaagatcaataagaaattaaagtccattacaatgttaaggaagaaaattgttcattttactggctctgatcagagaaaacaagcaaatgctgccttccttgttggatgctacatggttatatatttggggagaaccccagaagaagcatatagaatattaatctttggagagacatcctatattcctttcagagatgctgcctatggaagttgcaatttctacattacacttcttgactgttttcatgcagtaaagaaggcaatgcagtatggcttccttaatttcaactcatttaaccttgatgaatatgaacactatgaaaaagcagaaaatggagatttaaattggataataccagaccgatttattgccttctgtggacctcattcaagagccagacttgaaagtggttaccaccaacattctcctgagacttatattcaatattttaagaatcacaatgttactaccattattcgtctgaataaaaggatgtatgatgccaaacgctttacggatgctggcttcgatcaccatgatcttttctttgcggatggcagcacccctactgatgccattgtcaaagaattcctagatayctgtgaaaatgctgagggtgccattgcagtacattgcaaagctggccttggtcgcacgggcactctgatagcctgctacatcatgaagcattacaggatgacagcagccgagaccattgcgtgggtcaggatctgcagacctggctcggtgattgggcctcagcagcagtttttggtgatgaagcaaacmaacctctggctggaaggggactattttcgtcagaagttaaaggggcaggagaatggacaacacagagcagccttctccaaacttctctctggcgttgatgacatttccataaatggggtcgagaatcaagatcagcaagaacccgaaccgtacagtgatgatgacgaaatcaatggagtgacacaaggtgatagacttcgggccttgaaaagcagaagacaatccaaaacaaacgctattcctctcaccgatggttggctgtcccaggctgtcacctttctagaccggcttctgatctggctcgggatccacaaggactagacctgcggggaaggtctctcctggacacgcccgttgcccactgcaagttctctccaggtgcaattgaagcctctcagcagcggaggccgccatgtggagagagcaggcaggcccactgctgctgagaacagggcaggcacgggcagctcctgttctgcctttcccagcttcggagacgcaggctcagctgctccgaagcacctgccagcaccgcacagtacagtttcagaggacagcagtctccttcccgtgaagctcccatgtgctggaatggcatggacttgctgatcaacagaaggaaatggtctgaagtctgaccagcacaaggaaggaggctggctggctcagaggggcccaccttgcgtggaatgaaaacgccaaaggctcatgagcaacattaggctagaggggtcttgttcaaagcatccaactctgacttcggaggcattcccagccggcagcagtgtgtccagcctgcctcttcccaggctggtctgacatgcagcttaggctttcatcccaagttaggtactgacccctccctcttgggcagcacctccctttttaaaaaaatttttttttcttccaaagacagagtcttgctcttgttgtccaggctggagtgcagtggcgcgatctaggctcactgcaacctccttctcccaggttcaagcgactctcctgcctcagcctcctgagtagctgggattataggcgtctgccaccacgcccggctaatttctgtatttttagtagagacagggtttcaccatgttggccaggctggtctcgaactcctgacctcaagtgatctgcctgccttggcctcccaaagtgctgggattacaggtgtcagccaccgcacccagccaagcacccctatctctagaggatctggccccccagcccagttactgcagggcagctttccccacctggtgacaggctgtgcgcagcagccccaggacctcaccctgagctgagtcttcaggagccgccctggtggcacaactcagacacccctgaggcctagcagtcaactcctgattcagacatgatccagtccagcctgggcttggctataaccagctcaaacttgcttgacctccacttttcaggagacttggggacgacagccctcatcggcgtctttcatggggttaatctgcttgagtctaagtcgccagccagaaacgtggtgcccagggtgccctgcctcargacatgtccacacccacgtcacaagcacctgaggagtccggccggggcactgtggtccaaaaggtcctgccgcctccgcatctgactgtcccaacggcatgctggtgacacccccctgcccttcgcttctgtcctccctggcttctctggggcacttggggctatgtacaacctggcacgatccagaaagggtgcaaacaaaatgcctacatccaggcacacgaccaagtcagcgagagctagccctggtaagcaaacatagcccattacaggttcagaacgtgcaccgggttccccaaaactgtcttcaaccacatgactcaacagctctatgggataggaactgtcagtgtttttgcaactgcaacattaaaccaagtgctgtgggcttttcaagtattattcacaacactaaaggaaagtttcttcaaagggctctctggctaatcttcaaagccgcrgttaggcaaaatgacagtgtgacagcttcaaagccactgactcatgacacagccctgatgttgtaccggctaggttcagatttcagaaatcagggcacttgcatccattgccttttccaggaaagggaagaaaacactcagttgataaaccttagtactcagataataaataagagaccaaaagtaggctatcacccaaagcaaacatccttaactgaccctaacgtgtatggattcaactttgattattcaacaaaatcatgaccgactgctgtggcctggagtaaccaaaggactgttttctctacacaaagtcaggagcgaataccaacctttatttgcacttgggttccagttcaaagccaccttagacagtgtggcaaagtgggaaaaagcacagatcctgggaccaaggttcagattccatctcaagcgagcatatgaactgtgtgacaacaggcagacagtacctctgtgtctatgagaaagcggggagagcaacaccccagcttctagcagctctacagctgcctggacctgcaggccctcctaggcccacttcctccccagcacagtgtgtgttcccgggcgtgtgtggctctgggtccagctctgttcagggtgggactccaggtgaattactgaacctctgaggtgtacccccaaccccaaactttcaccaaaagcaataaagaggaactctagaactggagccaggactaagtgagaaaaactgcttataagtgcttaataaatactagttatttacaacttttgctcaagccgagggcagaggcctttgtacgcagctgccgaactctgactctagttctgcggaagaaaaggatgcggtatttgcttttgccatgatccctttccatttrattggcaggttaaataacatggtttttgaagtcacatacttaatattcttcctaaaaaccacccaaacactagatgtgtgtgtgcacacacacagaaaccacgaggtagtttaaatcaccattaaaaatcaacgctttctctgattctgtgtcacasagtggtggccagtggctacacaatagcgatttttaaatgattggttaagtgaaaaccagaactcaaaatattccaggagagaagataacatttacaagtaaacagtaagtgcaattgtattttaatttcttggtctccgaaaactcagctgtgactgctttccattaacagttccagctctatgtgtttcctctaacgctaaaggcacagcccccgggaatctactgcttcctaagagtctccatggagtctattttacaacctcctttccctccatgcttccgcggaggagtctatactatctctatatacacattttaaacattattcttcatttgaaattccttcaataaaaacacagtcaccattcttcatcttcttgggaaatggcctgctctcgagcctctggagaagcccctctaacacaggaggagcattgccaagaccagccacagagaaggggtctgtgccatggggcctcggggctgatttccaatgaataagtgtccataccacattaggaagcacctactacatgccaggcactgcgtggcactgcgtaaaccggtaatgagcaaaagcagccgctgaccgatagccacaccagtgagaatacagccgcacacggagatcag

SEQ ID NO: 5884 - DNA, 4495 bp, Homo sapiens
cacggaacagccctcctggggtccccacgagccgcgtcctgctgtgccccggcgcctacgcagcagcggccgcggccgcggtgggcacgcacggttaccccgggcagctccggccgccagctgcagccccgtcgcctcggccgcgccagccggctgcgggcacctgggggcgggctgggggcgccggccgcggcaggaggcgctgtagcgagggctgcggcgccggtcctgcggcggccgcgggaggcagcggggcaggcgctgtgggccgggctcctcctccggctcctgcgcgaccgcctcccgccgggctctgccggcgcccgccgtccccgcagcgccgctctgcgcccgccgccccgagcgcccgcgcggggctggcgggagcctcggcgggcgcgcgggcgcgcggggccatggtcgtggccccctgacgggccgcggccgcctccatgaagcggaaaagcgagcggcggtcgagctgggccgccgcgcccccctgctcgcggcgctgctcgtcgacctcgccgggtgtgaagaagatccgcagctccacgcagcaagacccgcgccgccgggacccccaggacgacgtgtacctggacatcaccgatcgcctttgttttgccattctctacagcagaccaaagagtgcatcaaatgtacattatttcagcatagataatgaacttgaatatgagaacttctacgcagattttggaccactcaatctggcaatggtttacagatattgttgcaagatcaataagaaattaaagtccattacaatgttaaggaagaaaattgttcattttactggctctgatcagagaaaacaagcaaatgctgccttccttgttggatgctacatggttatatatttggggagaaccccagaagaagcatatagaatattaatctttggagagacatcctatattcctttcagagatgctgcctatggaagttgcaatttctacattacacttcttgactgttttcatgcagtaaagaaggcaatgcagtatggcttccttaatttcaactcatttaaccttgatgaatatgaacactatgaaaaagcagaaaatggagatttaaattggataataccagaccgatttattgccttctgtggacctcattcaagagccagacttgaaagtggttaccaccaacattctcctgagacttatattcaatattttaagaatcacaatgttactaccattattcgtctgaataaaaggatgtatgatgccaaacgctttacggatgctggcttcgatcaccatgatcttttctttgcggatggcagcacccctactgatgccattgtcaaagaattcctagatayctgtgaaaatgctgagggtgccattgcagtacattgcaaagctggccttggtcgcacgggcactctgatagcctgctacatcatgaagcattacaggatgacagcagccgagaccattgcgtgggtcaggatctgcagacctggctcggtgattgggcctcagcagcagtttttggtgatgaagcaaacmaacctctggctggaaggggactattttcgtcagaagttaaaggggcaggagaatggacaacacagagcagccttctccaaacttctctctggcgttgatgacatttccataaatggggtcgagaatcaagatcagcaagaacccgaaccgtacagtgatgatgacgaaatcaatggagtgacacaaggtgatagacttcgggccttgaaaagcagaagacaatccaaaacaaacgctattcctctcacatgtcccctagctgtgctgacctctgcactgtgtagtgttgtcatctggtggattgtttgtgactacattcttcccatcctgctattctgtctcgatggtttcagaacacagactaaaacagtcttgcgttaagtaaaaacctgtgaccagagctgaaggaagactctaggactgaaaactgcaacagaaattagcacaatttgaaaacaaaacaaaattgcaaaagccttagttgctttttccacctaagaagttgatcaatggagaaaatgtccactggagtttgaataatgaactttgagtttgggtgcaagcaaatgactcagagaagggtccagctctcaagctgaatgacaaacatgctgttgtaaatttagtctcaggtgtaaatacccaagccctctggtacccagggagctggctggtctgtggtgcatgtgtgtccctgtgatggcaatcattgtagttgctggccttcagaagaattgaggatctgatggaggttttttatgtatttattttctgttcaccttgtgaccctgtgtcaaaatttataaagatacaaaaggcattactgaaatggtactttctgtaatttgatactatttggcttaatcatcttcacttgactatttgtaatactgttgtaatgttaactctgttaagtacccaagctgcttgtcttccaccaaagagtgctttattaacaagaatctgtgaaaatcacatttaaacactgttgcatgttgtaagaccaggtggtaccttagtaacctaaaacttgcaagagaatattaatggtagctttagaagactcaggaggagaaactgacttcagagttggaagatgttgcaagtcgttcctttttctgtccttcagggactgaagaactgggaggctgcccattgtttggttgccagtcatacaaattaaaatcatatttccttccatgaatggaagaaacacactattggtttttccccttggaaacagcaatcccaaataatgtcggcttacaaaaaaaaawwgttaccacttttttagagtccttccctgtaacattggattttttttttcccttatgagatccacctaaggccattgacgtggcctgcgatctcagtgacaatgatctgcttctggatctcactgttgcctttggttagggaacacaactagtaactctgcagagtgccttctcccgcagccctactggaacacagcagagtctgtgccatgaagcagttacagaaacagaattgatgtgctgctaaaaaaaaaaaaaaaatggggcccgaaataaaagaatatatagtactcacctcagttccttccataagaagtgggtggtttaatgattgttaagccatttttgcctgtgccgggagcatggagggctgagatgtcgacaggcagtgggaaacaaatgccctcctaagccacaaggcgtgcgccagattagtaggcaactccattttaagaagctgcctttttcacaaaactggaagaaataaaagcggttggaataaacaagttaaaagtctttaatgcaaaaagtaattgaaaggcagtgcctccattttggtgtactttcttggaagaaagtataaaattgaccggcatcatgagagacggaagatgccgtgttctcagccaaacaagcaactctttccccgccaggcactgtcgggtggggtcaggccagcttttaaacactggggactggatcacagaaaaacagtggttttctgtccctggaaatgaataggcacaaagacccacttggctgtgggcagactactcttcaataagatttgggtgggaggaggaacattccttttgctattttgagctgagacaatataaatattcaaactgtgccatgcataaagcattgaattctcagggcacctcttcttccccttaccccttttaaggccatcccctccattaataataatccaggtagttgtgaaaatcgtgcttctatctgatcccttcttagtttggcttttcatcccatcagaacaagtaaacgtaggcgccacagctcttgtgagtactgtctccctcacggtgaatgagcctcctggtgtttcgtccaagaaaagaaagggtgtcactggaaccacagccctttttcattttataaactgcctcttcatgttgcctgctcaagtttccacctagaattgctatcactgtggctctttctaaaaatctttctatttaactggttcactgaaattagtcatagaaaacttgtgatttggtgaagaggcattccttgtaataaccaaatgacttgggatggtgtgcatagcaagggcagtgttacacttatgaggactgtctctagcatccaggaagtctctgggtctgagggatggaaagttcttcctgctatgaatgagagtggactcttcccctcacccccaactgaaaccacaaacaaccagaatcttctggaattctgacttagagtcgttgttatagaagaccttgttgctatggaacatgaaactgtgtgtcagatggagagatccccttaacctaagagccttaaatagccctgaaagtacacygggacggtttgcgatggaattaaaattggaagtgaatatttttargtgctcttgaagctttctggggactcaaaattatcaaaagtcagggacagtccggaggaagagcgtct

SEQ ID NO: 5885 - DNA, 2252 bp, Homo sapiens
ggcgcagcggggcggacggcggcggcgccgcgggggcgggcgccggtaggggccggacagggccagaagcggactcctagaagaggggagcagcaaggatggaatgacagccgtgggccggaggggatgctcgaaagagctgagcggagatcctacagggaataccgaccctatgagacagagaggcaggcagacttcacagctgagaagtttccagatgaaaaaccaggtgataggtttgatcgagacagaccrttgagaggacgtggaggcccgagagggggtatgcgyggcagaggcagaggtggccctgggaacagagtttttgacgcttttgaccagagaggaaagcgagaatttgaaagatatggtgggaatgacaaaatagcagtcagaactgaagacaacatgggtggatgtggagttcgaacctggggatcgggtaaagataccagtgatgtggagccaactgcaccgatggaggaacccacagtggtggaggagtcccagggcaccccggaagaggagtctccagccaaagttcctgagttggaggtagaagaagaaacccaagttcaagagatgactttagatgagtggaaaaatcttcaagaacagaccagaccaaagcctgagtttaacatccggaaaccagaatccactgttccttccaaagccgtggtgattcacaagtcaaaatacagagatgatatggtaaaagatgactatgaggacgattcccatgttttccggaaacccgccaatgacatcacatcccagctggagattaattttggtaacctycctcgtcctgggcgtggagcyagaggaggcacccggggaggccggggaaggatcaggagggcagagaactatggacccagagcagaagtggtgatgcaagatgttgcccccaacccagatgacccggaagatttccctgcgctgtcttgaaagagccctgtttcccagcaccgcggagctgcactgcacacctgtggggagacttttcyagctgggccaagggagtcagactctaagaacaatagatgttgcttttcccgtgtcatgtaaatttgttgcacttttttgggctgrgctgttagaggggcttctccagaggctcgagagcaggccatttcccaagaagatgaagaatggtgactgtgtttttattgaaggaatttcaaatgaagaataatgtttaaaatgtgtatatagagatagtatagactcctccgcggaagcatggagggaaaggaggttgtaaaatagactccatggagactcttaggaagcagtagattcccgggggctgtgcctttagcgttagaggaaacacatagagctggaactgttaatggaaagcagtcacagctgagttttcggagaccaagaaattaaaatacaattgcacttactgtttacttgtaaatgttatcttctctcctggaatattttgagttctggttttcacttaaccaatcatttaaaaatcgctattgtgtagccactggccaccactstgtgacacagaatcagagaaagcgttgatttttaatggtgatttaaactacctcgtggtttctgtgtgtgtgcacacacacatctagtgtttgggtggtttttaggaagaatattaagtatgtgacttcaaaaaccatgttatttaacctgccaatyaaatggaaagggatcatggcaaaagcaaataccgcatccttttcttccgcagaactagagtcagagttcggcagctgcgtacaaaggcctctgccctcggcttgagcaaaagttgtaaataactagtatttattaagcacttataagcagtttttctcacttagtcctggctccagttctagagttcctctttattgcttttggtgaaagtttggggttgggggtacacctcagaggttcagtaattcacctggagtcccaccctgaacagagctggacccagagccacacacgcccgggaacacacactgtgctggggaggaagtgggcctaggagggcctgcaggtccaggcagctgtagagctgctagaagctggggtgttgctctccccgctttctcatagacacagaggtactgtctgcctgttgtcacacagttcatatgctcgcttgagatggaatctgaaccttggtcccaggatctgtgctttttcccactttgccacactgtctaaggtggctttgaactggaacccaagtgcaaataaaggttggtattcgctcctga

SEQ ID NO: 5886 - DNA, 2713 bp, Homo sapiens
gcgcagcggggcggacggcggcggcgccgcgggggcgggcgccggtaggggccggacagggtagggcccggagggcggtggcggcggagcgggcggcatgggtcctggccgccggcttcgctgagacgcgctcgcgtgggctgccctcccgggcccgcagtggtcgcggcggcatgaagggcgctctggggagtcccgtggctgccgctggcgccgcgatgcaggagagtttcggctgcgtggtggccaaccgcttccatcagctgctggacgacgagtcggacccgttcgacatcctgcgcgaggccgagcgccggcgccagcagcagctgcagcgcaagaggcgcgacgaggcggcggcggcggccggggccggtccccgcggcggcaggagcccagccggggcctcgggccacagagccggcgcgggcggccggagggagtcgcagaaggagcgcaagagcctcccggcgcccgtcgctcagcggcccgatagccccgggggcggcctgcaggcgccsggccagaagcggactcctagaagaggggagcagcaaggatggaatgacagccgtgggccggaggggatgctcgaaagagctgagcggagatcctacagggaataccgaccctatgagacagagaggcaggcagacttcacagctgagaagtttccagatgaaaaaccaggtgataggtttgatcgagacagaccrttgagaggacgtggaggcccgagagggggtatgcgyggcagaggcagaggtggccctgggaacagagtttttgacgcttttgaccagagaggaaagcgagaatttgaaagatatggtgggaatgacaaaatagcagtcagaactgaagacaacatgggtggatgtggagttcgaacctggggatcgggtaaagataccagtgatgtggagccaactgcaccgatggaggaacccacagtggtggaggagtcccagggcaccccggaagaggagtctccagccaaagttcctgagttggaggtagaagaagaaacccaagttcaagagatgactttagatgagtggaaaaatcttcaagaacagaccagaccaaagcctgagtttaacatccggaaaccagaatccactgttccttccaaagccgtggtgattcacaagtcaaaatacagagatgatatggtaaaagatgactatgaggacgattcccatgttttccggaaacccgccaatgacatcacatcccagctggagattaattttggtaacctycctcgtcctgggcgtggagcyagaggaggcacccggggaggccggggaaggatcaggagggcagagaactatggacccagagcagaagtggtgatgcaagatgttgcccccaacccagatgacccggaagatttccctgcgctgtcttgaaagagccctgtttcccagcaccgcggagctgcactgcacacctgtggggagacttttcyagctgggccaagggagtcagactctaagaacaatagatgttgcttttcccgtgtcatgtaaatttgttgcacttttttgggctgrgctgttagaggggcttctccagaggctcgagagcaggccatttcccaagaagatgaagaatggtgactgtgtttttattgaaggaatttcaaatgaagaataatgtttaaaatgtgtatatagagatagtatagactcctccgcggaagcatggagggaaaggaggttgtaaaatagactccatggagactcttaggaagcagtagattcccgggggctgtgcctttagcgttagaggaaacacatagagctggaactgttaatggaaagcagtcacagctgagttttcggagaccaagaaattaaaatacaattgcacttactgtttacttgtaaatgttatcttctctcctggaatattttgagttctggttttcacttaaccaatcatttaaaaatcgctattgtgtagccactggccaccactstgtgacacagaatcagagaaagcgttgatttttaatggtgatttaaactacctcgtggtttctgtgtgtgtgcacacacacatctagtgtttgggtggtttttaggaagaatattaagtatgtgacttcaaaaaccatgttatttaacctgccaatyaaatggaaagggatcatggcaaaagcaaataccgcatccttttcttccgcagaactagagtcagagttcggcagctgcgtacaaaggcctctgccctcggcttgagcaaaagttgtaaataactagtatttattaagcacttataagcagtttttctcacttagtcctggctccagttctagagttcctctttattgcttttggtgaaagtttggggttgggggtacacctcagaggttcagtaattcacctggagtcccaccctgaacagagctggacccagagccacacacgcccgggaacacacactgtgctggggaggaagtgggcctaggagggcctgcaggtccaggcagctgtagagctgctagaagctggggtgttgctctccccgctttctcatagacacagaggtactgtctgcctgttgtcacacagttcatatgctcgcttgagatggaatctgaaccttggtcccaggatctgtgctttttcccactttgccacactgtctaaggtggctttgaactggaacccaagtgcaaataaaggttggtattcgctcctga

SEQ ID NO: 5887 - DNA, 2398 bp, Homo sapiens
gcgcagcggggcggacggcggcggcgccgcgggggcgggcgccggtaggggccggacagggtagggcccggagggcggtggcggcggagcgggcggcatgggtcctggccgccggcttcgctgagacgcgctcgcgtgggctgccctcccgggcccgcagtggtcgcggcggcatgaagggcgctctggggagtcccgtggctgccgctggcgccgcgatgcaggagagtttcggctgcgtggtggccaaccgcttccatcagctgctggacgacgagtcggacccgttcgacatcctgcgcgaggccgagcgccggcgccagcagcagctgcagcgcaagaggcgcgacgaggcggcggcggcggccggggccggtccccgcggcggcaggagcccagccggggcctcgggccacagagccggcgcgggcggccggagggagtcgcagaaggagcgcaagagcctcccggcgcccgtcgctcagcggcccgatagccccgggggcggcctgcaggcgccsggccagaagcggactcctagaagaggggagcagcaaggatggaatgacagccgtgggccggaggggatgctcgaaagagctgagcggagatcctacagggaataccgaccctatgagacagagaggcaggcagacttcacagctgagaagtttccagatgaaaaagttcctgagttggaggtagaagaagaaacccaagttcaagagatgactttagatgagtggaaaaatcttcaagaacagaccagaccaaagcctgagtttaacatccggaaaccagaatccactgttccttccaaagccgtggtgattcacaagtcaaaatacagagatgatatggtaaaagatgactatgaggacgattcccatgttttccggaaacccgccaatgacatcacatcccagctggagattaattttggtaacctycctcgtcctgggcgtggagcyagaggaggcacccggggaggccggggaaggatcaggagggcagagaactatggacccagagcagaagtggtgatgcaagatgttgcccccaacccagatgacccggaagatttccctgcgctgtcttgaaagagccctgtttcccagcaccgcggagctgcactgcacacctgtggggagacttttcyagctgggccaagggagtcagactctaagaacaatagatgttgcttttcccgtgtcatgtaaatttgttgcacttttttgggctgrgctgttagaggggcttctccagaggctcgagagcaggccatttcccaagaagatgaagaatggtgactgtgtttttattgaaggaatttcaaatgaagaataatgtttaaaatgtgtatatagagatagtatagactcctccgcggaagcatggagggaaaggaggttgtaaaatagactccatggagactcttaggaagcagtagattcccgggggctgtgcctttagcgttagaggaaacacatagagctggaactgttaatggaaagcagtcacagctgagttttcggagaccaagaaattaaaatacaattgcacttactgtttacttgtaaatgttatcttctctcctggaatattttgagttctggttttcacttaaccaatcatttaaaaatcgctattgtgtagccactggccaccactstgtgacacagaatcagagaaagcgttgatttttaatggtgatttaaactacctcgtggtttctgtgtgtgtgcacacacacatctagtgtttgggtggtttttaggaagaatattaagtatgtgacttcaaaaaccatgttatttaacctgccaatyaaatggaaagggatcatggcaaaagcaaataccgcatccttttcttccgcagaactagagtcagagttcggcagctgcgtacaaaggcctctgccctcggcttgagcaaaagttgtaaataactagtatttattaagcacttataagcagtttttctcacttagtcctggctccagttctagagttcctctttattgcttttggtgaaagtttggggttgggggtacacctcagaggttcagtaattcacctggagtcccaccctgaacagagctggacccagagccacacacgcccgggaacacacactgtgctggggaggaagtgggcctaggagggcctgcaggtccaggcagctgtagagctgctagaagctggggtgttgctctccccgctttctcatagacacagaggtactgtctgcctgttgtcacacagttcatatgctcgcttgagatggaatctgaaccttggtcccaggatctgtgctttttcccactttgccacactgtctaaggtggctttgaactggaacccaagtgcaaataaaggttggtattcgctcctga

SEQ ID NO: 5888 - DNA, 2713 bp, Homo sapiens
ggggaaggagcagcaccaaatccaagatggcggccagcaggaggctgatgaaggagcttgaagaaatccgcaaatgtgggatgaaaaacttccgtaacatccaggttgatgaagctaatttattgacttggcaagggcttattgttcctgacaaccctccatatgataagggagccttcagaatcgaaatcaactttccagcagagtacccattcaaaccaccgaagatcacatttaaaacaaagatctatcacccaaacatcgacgaaaaggggcaggtctgtctgccagtaattagtgcsgaaaactggaagccagcaaccaaaaccgaccaagtaatccagtccctcatagcactggtgaatgacccccagcctgagcacccgcttcgggctgacctagctgaagaatactctaaggaccgtaaaaaattctgtaagaatgctgaagagtttacaaagaaatatggggaaaagcgacctgtggactaaaatctgccacgattggttccagcaagtgtgagcagagaccccgtgcagtgcattcagacaccccgcaaagcaggactctgtggaaattgacacgtgccaccgcctggcgttcgcttgtggcagttactaactttctacagttttcttaatcaaaagtggtctaggtaacctgtaaagaaaggattaaaaatttaagatgttctagttctgctctctttgttttaaaaatcactgcttcaatctacttcaaaagaatggtgtttcttttcttgtccaattttatccaaaatcttcaagttacatttaacccataaggtttaaaaaaaaggaaaaaaaacggttgtggttccctttcttccctacccttgccactcccactttctggcaccgagtttatttttcacttacttacttccccagaccccgggctcgcctccacaaaggagaaragactgccctggcggtcctggtggcttttcttagcatgtgtggcactgttgcccagtgtgggagttggtttaaattctcctgactccagtttataacatccttttaaaaaatttaaaaacaaacagccacacccctcctccagtccttctcctcagttcttgtgtgaaactccagctgatgttaccacagtaacatcagttaattgggcaagccctgatgtcagtgtgtgtaactgacctctggcctggcctgcacagagaagccctataatcacaggtctgtggtggccccgaaatggggggcctgctagtcaggaggatgctgtgcacactgtgtgtgatgaatctcgccagaaaggctcctgaggtcccaggttggcacttctccctgcagccattgtagaagatctgctggtccttgcaggcaaagctacagccagaatgtccgtttgaaactcctagctcatctgtcaccgagcttcatccgaatgtgccacggagcttgctctccacttcctccgtgcagykgccctgccacagccctccctcggcacactttgaccctttgtaggattggaattagcaggactcggctatttaaagcaccagtctggggtcgcctgggcccctgctgaccccytcctccagagcagccagcccagcccgggaacaagacggacttcctctcccttcggactcacagcctttgcagagtcaagctccacttgaagctcactcagtaatatcctttcaatgtgttttatattgttttgactgcctttttttgtagaaataaaaattgaccttagaatttatcgtcagataaacttgtaaagatttgaatattaatgtcttttcaaggcaaatgggattgtccccgcactagtagagaatccatgtcgctctgacaccccaaggaagccgacgatccaaatgccgtgtgtcaccaaccccgcttctgccactggcggcttcccttcttggctcttgggggggactagatcctgtggagaagatgacttaaactttgctttttgttttaattttaattctataacttgagatctttccggggcctacaggcgtgtaagacagcttggtctggtctgtgcagaagtggggagtgatgggyaggttcggcagcctaacattgttcaggcgcatggcccctgcggtgtgtacacgaactcggcttcttttgtcctaggtacgccaagggcaggtttctggagactcccttgtgcccgggatggcaagggcaccgggctggygtttccacatctgtcttcattagcagaaaagtgatgatggattttatttcactcacactccagtttgtaataaaatgccaaattctgtcagctatccaaacaagccaccatttgttcttgttgcttctctggatccagaaatgttgccattcttggaaactgtcccattgcttcgtatttctgccaacgtagctctgcctgcctgtcaacccctcactgcactctgctcatcacgggaggatacctgtgtgccggcagcccctcagggactctcagccctggcactggcaccccagggttggccccgtcagcagaggaggggcgagctgtggagcagccacccactgctgccccaagctcactcaggaattcacacccgcctggtttcttgaagtgtgctgggtccttccctctgctccctactccccaccacggcagagaataggctttytaagatgctgcgatcccgttctgctgcccgtaataaaaatgctctcagaca

SEQ ID NO: 5889 - DNA, 2856 bp, Homo sapiens
ggggaaggagcagcaccaaatccaagatggcggccagcaggaggctgatgaaggagcttgaagaaatccgcaaatgtgggatgaaaaacttccgtaacatccaggttgatgaagctaatttattgacttggcaagggcttattgttcctgacaaccctccatatgataagggagccttcagaatcgaaatcaactttccagcagagtacccattcaaaccaccgaagatcacatttaaaacaaagatctatcacccaaacatcgacgaaaaggggcaggtctgtctgccagtaattagtgcsgaaaactggaagccagcaaccaaaaccgaccaagtaatccagtccctcatagcactggtgaatgacccccagcctgagcacccgcttcgggctgacctagctgaagaatactctaaggaccgtaaaaaattctgtaagaatgctgaagagtttacaaagaaatatggggaaaagcgacctgtggactaaaatctgccacgattggttccagcaagtgtgagcagagaccccgtgcagtgcattcagacaccccgcaaagcaggactctgtggaaattgacacgtgccaccgcctggcgttcgcttgtggcagttactaactttctacagttttcttaatcaaaagtggtctaggtaacctgtaaagaaaggattaaaaatttaagatgttctagttctgctctctttgttttaaaaatcactgcttcaatctacttcaaaagaatggtgtttcttttcttgtccaattttatccaaaatcttcaagttacatttaacccataaggtttaaaaaaaaggaaaaaaaacggttgtggttccctttcttccctacccttgccactcccactttctggcaccgagtttatttttcacttacttacttccccagaccccgggctcgcctccacaaaggagaaragactgccctggcggtcctggtggcttttcttagcatgtgtggcactgttgcccagtgtgggagttggtttaaattctcctgactccagtttataacatccttttaaaaaatttaaaaacaaacagccacacccctcctccagtccttctcctcagttcttgtgtgaaactccagctgatgttaccacagtaacatcagttaattgggcaagccctgatgtcagtgtgtgtaactgacctctggcctggcctgcacagagaagccctataatcacaggtctgtggtggccccgaaatggggggcctgctagtcaggaggatgctgtgcacactgtgtgtgatgaatctcgccagaaaggctcctgaggtcccaggttggcacttctccctgcagccattgtagaagatctgctggtccttgcaggcaaagctacagccagaatgtccgtttgaaactcctagctcatctgtcaccgagcttcatccgaatgtgccacggagcttgctctccacttcctccgtgcagykgccctgccacagccctccctcggcacactttgaccctttgtaggattggaattagcaggactcggctatttaaagcaccagtctggggtcgcctgggcccctgctgaccccytcctccagagcagccagcccagcccgggaacaagacggacttcctctcccttcggactcacagcctttgcagagtcaagctccacttgaagctcactcagtaatatcctttcaatgtgttttatattgttttgactgcctttttttgtagaaataaaaattgaccttagaatttatcgtcagataaacttgtaaagatttgaatattaatgtcttttcaaggcaaatgggattgtccccgcactagtagagaatccatgtcgctctgacaccccaaggaagccgacgatccaaatgccgtgtgtcaccaaccccgcttctgccactggcggcttcccttcttggctcttgggggggactagatcctgtggagaagatgacttaaactttgctttttgttttaattttaattctataacttgagatctttccggggcctacaggcgtgtaagacagcttggtctggtctgtgcagaagtggggagtgatgggyaggttcggcagcctaacattgttcaggcgcatggcccctgcggtgtgtacacgaactcggcttcttttgtcctaggtacgccaagggcaggtttctggagactcccttgtgcccgggatggcaagggcaccgggctggygtttccacatctgtcttcattagcagaaaagtgatgatggattttatttcactcacactccagtttgtaataaaatgccaaattctgtcagctatccaaacaagccaccatttgttcttgttgcttctctggatccagaaatgttgccattcttggaaactgtcccattgcttcgtatttctgccaacgtagctctgcctgcctgtcaacccctcactgcactctgctcatcacgggaggatacctgtgtgccggcagcccctcagggactctcagccctggcactggcaccccagggttggccccgtcagcagaggcttggctttcgagccagtgggtgtctctcctttgggcctgggcggcttgctcctgccagccatgccttcagggtaggctctgagcaagctggcgaacagccctggctgctccaaaaccaaaaagctgggtcctctggaggaggggcgagctgtggagcagccacccactgctgccccaagctcactcaggaattcacacccgcctggtttcttgaagtgtgctgggtccttccctctgctccctactccccaccacggcagagaataggctttytaagatgctgcgatcccgttctgctgcccgtaataaaaatgctctcagacactg

SEQ ID NO: 5890 - DNA, 2803 bp, Homo sapiens
gagcttgaagaaatccgcaaatgtgggatgaaaaacttccgtaacatccaggttgatgaagctaatttattgacttggcaagggcttattgttcctgacaaccctccatatgataagggagccttcagaatcgaaatcaactttccagcagagtacccattcaaaccaccgaagatcacatttaaaacaaagatctatcacccaaacatcgacgaaaaggggcaggtctgtctgccagtaattagtgcsgaaaactggaagccagcaaccaaaaccgaccaagtaatccagtccctcatagcactggtgaatgacccccagcctgagcacccgcttcgggctgacctagctgaagaatactctaaggaccgtaaaaaattctgtaagaatgctgaagagtttacaaagaaatatggggaaaagcgacctgtggactaaaatctgccacgattggttccagcaagtgtgagcagagaccccgtgcagtgcattcagacaccccgcaaagcaggactctgtggaaattgacacgtgccaccgcctggcgttcgcttgtggcagttactaactttctacagttttcttaatcaaaagtggtctaggtaacctgtaaagaaaggattaaaaatttaagatgttctagttctgctctctttgttttaaaaatcactgcttcaatctacttcaaaagaatggtgtttcttttcttgtccaattttatccaaaatcttcaagttacatttaacccataaggtttaaaaaaaaggaaaaaaaacggttgtggttccctttcttccctacccttgccactcccactttctggcaccgagtttatttttcacttacttacttccccagaccccgggctcgcctccacaaaggagaaragactgccctggcggtcctggtggcttttcttagcatgtgtggcactgttgcccagtgtgggagttggtttaaattctcctgactccagtttataacatccttttaaaaaatttaaaaacaaacagccacacccctcctccagtccttctcctcagttcttgtgtgaaactccagctgatgttaccacagtaacatcagttaattgggcaagccctgatgtcagtgtgtgtaactgacctctggcctggcctgcacagagaagccctataatcacaggtctgtggtggccccgaaatggggggcctgctagtcaggaggatgctgtgcacactgtgtgtgatgaatctcgccagaaaggctcctgaggtcccaggttggcacttctccctgcagccattgtagaagatctgctggtccttgcaggcaaagctacagccagaatgtccgtttgaaactcctagctcatctgtcaccgagcttcatccgaatgtgccacggagcttgctctccacttcctccgtgcagykgccctgccacagccctccctcggcacactttgaccctttgtaggattggaattagcaggactcggctatttaaagcaccagtctggggtcgcctgggcccctgctgaccccytcctccagagcagccagcccagcccgggaacaagacggacttcctctcccttcggactcacagcctttgcagagtcaagctccacttgaagctcactcagtaatatcctttcaatgtgttttatattgttttgactgcctttttttgtagaaataaaaattgaccttagaatttatcgtcagataaacttgtaaagatttgaatattaatgtcttttcaaggcaaatgggattgtccccgcactagtagagaatccatgtcgctctgacaccccaaggaagccgacgatccaaatgccgtgtgtcaccaaccccgcttctgccactggcggcttcccttcttggctcttgggggggactagatcctgtggagaagatgacttaaactttgctttttgttttaattttaattctataacttgagatctttccggggcctacaggcgtgtaagacagcttggtctggtctgtgcagaagtggggagtgatgggyaggttcggcagcctaacattgttcaggcgcatggcccctgcggtgtgtacacgaactcggcttcttttgtcctaggtacgccaagggcaggtttctggagactcccttgtgcccgggatggcaagggcaccgggctggygtttccacatctgtcttcattagcagaaaagtgatgatggattttatttcactcacactccagtttgtaataaaatgccaaattctgtcagctatccaaacaagccaccatttgttcttgttgcttctctggatccagaaatgttgccattcttggaaactgtcccattgcttcgtatttctgccaacgtagctctgcctgcctgtcaacccctcactgcactctgctcatcacgggaggatacctgtgtgccggcagcccctcagggactctcagccctggcactggcaccccagggttggccccgtcagcagaggcttggctttcgagccagtgggtgtctctcctttgggcctgggcggcttgctcctgccagccatgccttcagggtaggctctgagcaagctggcgaacagccctggctgctccaaaaccaaaaagctgggtcctctggaggaggggcgagctgtggagcagccacccactgctgccccaagctcactcaggaattcacacccgcctggtttcttgaagtgtgctgggtccttccctctgctccctactccccaccacggcagagaataggctttytaagatgctgcgatcccgttctgctgcccgtaataaaaatgctctcagacactg

SEQ ID NO: 5891 - DNA, 3035 bp, Homo sapiens
ccgcggaacccggaagtggtcacggaactcggctgcggctccatggtctgagttgtcagccgttgttttttcgtgctcgctagtcgccgccgccgctccgccatggggaagcgacagcaccaaaaggacaaaatgtacattacctgtgctgaatacactcacttttatggtggcaagaagccagatctcccacaaacaaattttcgtcgtttaccttttgaccactgcagtctctctctgcagccctttgtctacccagtctgcactcccgatggcatcgtctttgacttactgaacattgttccatggcttaagaagtacgggaccaaccccagcaatggagagaagctggacgggaggtccctgatcaagctgaacttttccaagaacagtgaggggaagtaccactgcccagtgctgtttaccgtgttcaccaacaacacccacatcgtggctgtgaggacgaccggcaaygtctacgcctatgaggcagtggaacagctaaatatcaaggccaagaacttccgggacctgctgaccgacgagcccttctcccggcaggacatcatcaccctccaggaccccaccaatttggacaagttcaatgtctctaacttctatcatgtgaagaataacatgaaaataatagacccagatgaagagaaggccaaacaggacccgtcttattatctgaaaaatacaaatgccgagacccgagagaccctgcaggagctctacaaggagttcaaaggggacgagattctggcagccaccatgaaggccccggagaagaagaaagtggacaagctgaaygctgcccactattccacagggaaggtcagcgcttccttcacctccaccgcgatggtcccggagaccacacatgaagcagctgccatcgacgaggatgtgctgcgctaccagtttgtgaagaagaagggctacgtgcggctgcacaccaacaagggcgacctcaacctggagctgcactgcgacctgacaccaaaaacctgcgaaaacttcatcaggctttgcaagaagcattattacgatggcaccatcttccacagatccatccggaactttgtgatccaagggggcgaccccacaggcacaggcacgggtggggagtcatactgggggaagcccttcaaagacgagttccggcccaacctctcgcacacgggccgcggcatcctcagcatggccaactccgggcccaacagcaacaggtctcaattcttcatcacrtttcgctcctgtgcctacctggacaagaagcataccatctttggacgggttgttgggggctttgacgtactgacagccatggagaatgtggagagtgaccccaaaactgaccgccctaaggaggagatccgcattgatgccactacagtgttcgtggacccctatgaggaggccgatgcccagattgcgcaggagcggaagacacagctcaaggtagccccggagaccaaagtgaagagcagccagccccaggcagggagccagggcccccagaccttccgccagggcgtgggcaagtacatcaacccagcagccacgaagcgagcagcagaggaagagccctcaaccagtgccactgtccccatgtccaagaagaagcccagtcggggttttgggracttcagctcctggtagcagyaggctgcctgatgaccactagaggtatgtctgcccctcgtcaccctgctgcacaccaatctgtggcccttcatcatgctaagaacaagaactgcgccatggctggctccttctcttctccagcccatccctctgcagcctgtcatccctgtctgtgaccattggtcgggcccctgggctctagagtgacttttgacgccctccatccctcccgccaggcactgtcctccgcaaggcctggtgcagccctggcagtaactggcttgtaagaggctcagacaccaagctgggcctgcagaggaggggcacagtaggacacagtgactgcccaggtgtccacacacctgtaggcctctgagccagcgtccagggtacaggtgcgggtggtggggatgaaggcctgaccagggagkgagaagcaggtttggagaggaccctgtgcccaccctgacagacaccctggctggccctgactgactgtattctctggccacattcaagtcccccattggtgggggcagagaagtaggaccaggccrtccttggctccagagctcgaagaccccaagacagccctctgctctcagcggcgccacagagagcctgggctcagccttctgcatcaggacatggcctcgtccactgagggcacgatttaaacatttgacatcagaagctttatttgtaaacctcacacagataaggaccaagggctggcggtgtggccagaggacaggggaagctgaaggccccgtgcttgagctcggcagtcctgctccttgcagtgaagccaccatgggtgaccgtccagcctcacccggtggcctgcacagtgagggaagggcttcagggccatctgctcccagggcaggggacaggccaccaaggacctttggcaaatgaaggtttacatttctgtagtttgtttgttttagagcttaatttgtagttttttagctattaaaaccatttgaatttttaacgacctgatgagggcatcaggtaaattaaaggattttgggaagattcttattttcaattctaatatctgacagatgccatcaagaataagcattaaggtataaaaaatactgtgtgtataaaacaatgccaaaccacattcctacagcaaatgcactgtgccatttataaccctgacatcacctcccaaggctctcaaggaagatttattttaaataacttaaatagaagtcctagatgatattgtttaggaatttaagagggtggtggatatggtcctgtgaatagcacttcccctgaagccagctcatggtctgttcatttggtttaaaaatgagcttgtattttgcagaagcccaacaaaaaaaaagtgataaaagtgttgt

SEQ ID NO: 5892 - DNA, 4423 bp, Homo sapiens
ccgcggaacccggaagtggtcacggaactcggctgcggctccatggtctgagttgtcagccgttgttttttcgtgctcgctagtcgccgccgccgctccgccatggggaagcgacagcaccaaaaggacaaaatgtacattacctgtgctgaatacactcacttttatggtggcaagaagccagatctcccacaaacaaattttcgtcgtttaccttttgaccactgcagtctctctctgcagccctttgtctacccagtctgcactcccgatggcatcgtctttgacttactgaacattgttccatggcttaagaagtacgggaccaaccccagcaatggagagaagctggacgggaggtccctgatcaagctgaacttttccaagaacagtgaggggaagtaccactgcccagtgctgtttaccgtgttcaccaacaacacccacatcgtggctgtgaggacgaccggcaaygtctacgcctatgaggcagtggaacagctaaatatcaaggccaagaacttccgggacctgctgaccgacgagcccttctcccggcaggacatcatcaccctccaggaccccaccaatttggacaagttcaatgtctctaacttctatcatgtgaagaataacatgaaaataatagacccagatgaagagaaggccaaacaggacccgtcttattatctgaaaaatacaaatgccgagacccgagagaccctgcaggagctctacaaggagttcaaaggggacgagattctggcagccaccatgaaggccccggagaagaagaaagtggacaagctgaaygctgcccactattccacagggaaggtcagcgcttccttcacctccaccgcgatggtcccggagaccacacatgaagcagctgccatcgacgaggatgtgctgcgctaccagtttgtgaagaagaagggctacgtgcggctgcacaccaacaagggcgacctcaacctggagctgcactgcgacctgacaccaaaaacctgcgaaaacttcatcaggctttgcaagaagcattattacgatggcaccatcttccacagatccatccggaactttgtgatccaagggggcgaccccacaggcacaggcacgggtggggagtcatactgggggaagcccttcaaagacgagttccggcccaacctctcgcacacgggccgcggcatcctcagcatggccaactccgggcccaacagcaacaggtctcaattcttcatcacrtttcgctcctgtgcctacctggacaagaagcataccatctttggacgggttgttgggggctttgacgtactgacagccatggagaatgtggagagtgaccccaaaactgaccgccctaaggaggagatccgcattgatgccactacagtgttcgtggacccctatgaggaggccgatgcccagattgcgcaggagcggaagacacagctcaaggtagccccggagaccaaagtgaagagcagccagccccaggcagggagccagggcccccagaccttccgccagggcgtgggcaagtacatcaacccagcagccacgaagcgagcagcagaggaagagccctcaaccagtgccactgtccccatgtccaagaagaagcccagtcggggttttgggracttcagctcctggtagcagyaggttggccgctgtggaccttggtggggttgcagggctgggggcccatgtccacatctccatttccagcctttctagcctgccctctgctgccagccaataaattgcttgcctgctgcctgcatcccctttcctggcccctgggagcccacagccttcccatcccttaacctgttgccaagggccttggccctgtttccaggacctggcccagccagagcccactgctgggaccttcaagcacaaggcctgccctacacccaggctggtgcctcaggcctcycctctagtaggcaggccaggttagtgaggaaggactgtgtctccagattgtggtttcctctttaagacagggtcttgctctgttgcccaggctccagtgcagtggtgtgatcatggctcactgcagcctcgacctcctgggctcaagcaatcctcctgcctcagcctcrcaagtagctgggactacagccgtgcaccactacatccagctgtatatgtctggttttcttacccctacttctgtcatcttctcagggacagcctatttatacaaccagtgtggtcccctgaccaacgccattacctgggacaagttttcagaccccagacttactgagcctaagcctctgcagggtgggcttctcggtctgttttgacaaaacttcaggggcttctgaaggctggtgttggacggcagcattgagtttcctgccgtgccctgcctgagctctcagggccctgctcacctgctctggctgtgaaccacctgggcttcatctcaagcctgcctggcgtctctgtgcccctgtgagaatcttgaggggacccacactgggttgaggccagtgtctcctgctgtgagaacaagtggatgtccctctccccgccctcctgctgaagtggccttgctgctctcaggcccggccactgggctccaagactctgctcctcctgtcagtcactgactctgatggccttgggccrgctgcatcagcagcccttaaagaaagacccctccctcaacccccatttttctgttaaatgtgcccctggctggctttttcttcgtcttcagcccaggccagtggtcagtgttctcatgtcatggactctccttgcctgacacttgcctcttgggctccctgttgccctcaggccaccccccacttctagttcttcacactaagccctaacttaggccttgttcttggttttctcatttttgttgccccaaatcttgaacctgtcagcaacttgcaggctgtacctctgcccttccttttctcatcaatcactgatgctgaagctgcaggcctgagccctttgtctccctggatgctgggtggcgcctcatctgcatctctgcctcaccccatccactgccacaggctgcctgatgaccactagaggtatgtctgcccctcgtcaccctgctgcacaccaatctgtggcccttcatcatgctaagaacaagaactgcgccatggctggctccttctcttctccagcccatccctctgcagcctgtcatccctgtctgtgaccattggtcgggcccctgggctctagagtgacttttgacgccctccatccctcccgccaggcactgtcctccgcaaggcctggtgcagccctggcagtaactggcttgtaagaggctcagacaccaagctgggcctgcagaggaggggcacagtaggacacagtgactgcccaggtgtccacacacctgtaggcctctgagccagcgtccagggtacaggtgcgggtggtggggatgaaggcctgaccagggagkgagaagcaggtttggagaggaccctgtgcccaccctgacagacaccctggctggccctgactgactgtattctctggccacattcaagtcccccattggtgggggcagagaagtaggaccaggccrtccttggctccagagctcgaagaccccaagacagccctctgctctcagcggcgccacagagagcctgggctcagccttctgcatcaggacatggcctcgtccactgagggcacgatttaaacatttgacatcagaagctttatttgtaaacctcacacagataaggaccaagggctggcggtgtggccagaggacaggggaagctgaaggccccgtgcttgagctcggcagtcctgctccttgcagtgaagccaccatgggtgaccgtccagcctcacccggtggcctgcacagtgagggaagggcttcagggccatctgctcccagggcaggggacaggccaccaaggacctttggcaaatgaaggtttacatttctgtagtttgtttgttttagagcttaatttgtagttttttagctattaaaaccatttgaatttttaacgacctgatgagggcatcaggtaaattaaaggattttgggaagattcttattttcaattctaatatctgacagatgccatcaagaataagcattaaggtataaaaaatactgtgtgtataaaacaatgccaaaccacattcctacagcaaatgcactgtgccatttataaccctgacatcacctcccaaggctctcaaggaagatttattttaaataacttaaatagaagtcctagatgatattgtttaggaatttaagagggtggtggatatggtcctgtgaatagcacttcccctgaagccagctcatggtctgttcatttggtttaaaaatgagcttgtattttgcagaagcccaacaaaaaaaaagtgataaaagtgttgt

SEQ ID NO: 5893 - DNA, 3322 bp, Homo sapiens
ccgcggaacccggaagtggtcacggaactcggctgcggctccatggtctgagttgtcagccgttgttttttcgtgctcgctagtcgccgccgccgctccgccatggggaagcgacagcaccaaaaggacaaaatgtacattacctgtgctgaatacactcacttttatggtggcaagaagccagatctcccacaaacaaattttcgtcgtttaccttttgaccactgcagtctctctctgcagccctttgtctacccagtctgcactcccgatggcatcgtctttgacttactgaacattgttccatggcttaagaagtacgggaccaaccccagcaatggagagaagctggacgggaggtccctgatcaagctgaacttttccaagaacagtgaggggaagtaccactgcccagtgctgtttaccgtgttcaccaacaacacccacatcgtggctgtgaggacgaccggcaaygtctacgcctatgaggcagtggaacagctaaatatcaaggccaagaacttccgggacctgctgaccgacgagcccttctcccggcaggacatcatcaccctccaggaccccaccaatttggacaagttcaatgtctctaacttctatcatgtgaagaataacatgaaaataatagacccagatgaagagaaggccaaacaggacccgtcttattatctgaaaaatacaaatgccgagacccgagagaccctgcaggagctctacaaggagttcaaaggggacgagattctggcagccaccatgaaggccccggagaagaagaaagtggacaagctgaaygctgcccactattccacagggaaggtcagcgcttccttcacctccaccgcgatggtcccggagaccacacatgaagcagctgccatcgacgaggatgtgctgcgctaccagtttgtgaagaagaagggctacgtgcggctgcacaccaacaagggcgacctcaacctggagctgcactgcgacctgacaccaaaaacctgcgaaaacttcatcaggctttgcaagaagcattattacgatggcaccatcttccacagatccatccggaactttgtgatccaagggggcgaccccacaggcacaggcacgggtggggagtcatactgggggaagcccttcaaagacgagttccggcccaacctctcgcacacgggccgcggcatcctcagcatggccaactccgggcccaacagcaacaggtctcaattcttcatcacrtttcgctcctgtgcctacctggacaagaagcataccatctttggacgggttgttgggggctttgacgtactgacagccatggagaatgtggagagtgaccccaaaactgaccgccctaaggaggagatccgcattgatgccactacagtgttcgtggacccctatgaggaggccgatgcccagattgcgcaggagcggaagacacagctcaaggtagccccggagaccaaagtgaagagcagccagccccaggcagggagccagggcccccagaccttccgccagggcgtgggcaagtacatcaacccagcagccaccgagcagcagaggaagagccctcaaccagtgccactgtccccatgtccaagaagaagcccagtcggggttttgggracttcagctcctggtagcagyaggttggccgctgtggaccttggtggggttgcagggctgggggcccatgtccacatctccatttccagcctttctagcctgccctctgctgccagccaataaattgcttgcctgctgcctgcatcccctttcctggcccctgggagcccacagccttcccatcccttaacctgttgccaagggccttggccctgtttccaggacctggcccagccagagcccactgctgggaccttcaagcacaaggcctgccctacacccaggctggtgcctcaggcctcycctctagtaggcaggccaggttagtgaggaaggactgtgtctccagattgtggtttcctctttaagacagggtcttgctctgttgcccaggctccagtgcagtggtgtgatcatggctcactgcagcctcgacctcctgggctcaagcaatcctcctgcctcagcctcrcaagtagctgggactacagccgtgcaccactacatccagctgtatatgtctggttttcttacccctacttctgtcatcttctcagggacagcctatttatacaaccagtgtggtcccctgaccaacgccattacctgggacaagttttcagaccccagacttactgagcctaagcctctgcagggtgggcttctcggtctgttttgacaaaacttcaggggcttctgaaggctggtgttggacggcagcattgagtttcctgccgtgccctgcctgagctctcagggccctgctcacctgctctggctgtgaaccacctgggcttcatctcaagcctgcctggcgtctctgtgcccctgtgagaatcttgaggggacccacactgggttgaggccagtgtctcctgctgtgagaacaagtggatgtccctctccccgccctcctgctgaagtggccttgctgctctcaggcccggccactgggctccaagactctgctcctcctgtcagtcactgactctgatggccttgggccrgctgcatcagcagcccttaaagaaagacccctccctcaacccccatttttctgttaaatgtgcccctggctggctttttcttcgtcttcagcccaggccagtggtcagtgttctcatgtcatggactctccttgcctgacacttgcctcttgggctccctgttgccctcaggccaccccccacttctagttcttcacactaagccctaacttaggccttgttcttggttttctcatttttgttgccccaaatcttgaacctgtcagcaacttgcaggctgtacctctgcccttccttttctcatcaatcactgatgctgaagctgcaggcctgagccctttgtctccctggatgctgggtggcgcctcatctgcatctctgcctcaccccatccactgccacaggctgcctgatgaccactagaggtatgtctgcccctcgtcaccctgctgcacaccaatctgtggcccttcatcatgctaagaacaagaactgcgccatggctggctccttctcttctccagcccatccctctgcagcctgtcatccctccctggcagtaactggcttgtaagaggctcagacaccaagctgggcctgcagaggaggggcacagtaggacacagtgactgcccaggtgtccacacacctgtaggcctctgagccagcgt

SEQ ID NO: 5894 - DNA, 3828 bp, Homo sapiens
ccgcggaacccggaagtggtcacggaactcggctgcggctccatggtctgagttgtcagccgttgttttttcgtgctcgctagtcgccgccgccgctccgccatggggaagcgacagcaccaaaaggacaaaatgtacattacctgtgctgaatacactcacttttatggtggcaagaagccaggtaaggcatgcagtctttctgttccccgttgggggagtggtattaaggaactgtgtcttcaggatacagtgagctgtaaaaatagacaacaagaacacggaaactatggtagacgaatgggctgaggacacagttcatgaaagagaaatatactcaagatagaagaacctgcttcatcttagtgctgtcaaaactatcaagactacaataacaagagcactgtcataattttaatggaagtaaaaagtatgcacttttcccaatctcccacaaacaaattttcgtcgtttaccttttgaccactgcagtctctctctgcagccctttgtctacccagtctgcactcccgatggcatcgtctttgacttactgaacattgttccatggcttaagaagtacgggaccaaccccagcaatggagagaagctggacgggaggtccctgatcaagctgaacttttccaagaacagtgaggggaagtaccactgcccagtgctgtttaccgtgttcaccaacaacacccacatcgtggctgtgaggacgaccggcaaygtctacgcctatgaggcagtggaacagctaaatatcaaggccaagaacttccgggacctgctgaccgacgagcccttctcccggcaggacatcatcaccctccaggaccccaccaatttggacaagttcaatgtctctaacttctatcatgtgaagaataacatgaaaataatagacccagatgaagagaaggccaaacaggacccgtcttattatctgaaaaatacaaatgccgagacccgagagaccctgcaggagctctacaaggagttcaaaggggacgagattctggcagccaccatgaaggccccggagaagaagaaagtggacaagctgaaygctgcccactattccacagggaaggtcagcgcttccttcacctccaccgcgatggtcccggagaccacacatgaagcagctgccatcgacgaggatgtgctgcgctaccagtttgtgaagaagaagggctacgtgcggctgcacaccaacaagggcgacctcaacctggagctgcactgcgacctgacaccaaaaacctgcgaaaacttcatcaggctttgcaagaagcattattacgatggcaccatcttccacagatccatccggaactttgtgatccaagggggcgaccccacaggcacaggcacgggtggggagtcatactgggggaagcccttcaaagacgagttccggcccaacctctcgcacacgggccgcggcatcctcagcatggccaactccgggcccaacagcaacaggtctcaattcttcatcacrtttcgctcctgtgcctacctggacaagaagcataccatctttggacgggttgttgggggctttgacgtactgacagccatggagaatgtggagagtgaccccaaaactgaccgccctaaggaggagatccgcattgatgccactacagtgttcgtggacccctatgaggaggccgatgcccagattgcgcaggagcggaagacacagctcaaggtagccccggagaccaaagtgaagagcagccagccccaggcagggagccagggcccccagaccttccgccagggcgtgggcaagtacatcaacccagcagccacgaagcgagcagcagaggaagagccctcaaccagtgccactgtccccatgtccaagaagaagcccagtcggggttttgggracttcagctcctggtagcagyaggctccagtgcagtggtgtgatcatggctcactgcagcctcgacctcctgggctcaagcaatcctcctgcctcagcctcrcaagtagctgggactacagccgtgcaccactacatccagctgtatatgtctggttttcttacccctacttctgtcatcttctcagggacagcctatttatacaaccagtgtggtcccctgaccaacgccattacctgggacaagttttcagaccccagacttactgagcctaagcctctgcagggtgggcttctcggtctgttttgacaaaacttcaggggcttctgaaggctggtgttggacggcagcattgagtttcctgccgtgccctgcctgagctctcagggccctgctcacctgctctggctgtgaaccacctgggcttcatctcaagcctgcctggcgtctctgtgcccctgtgagaatcttgaggggacccacactgggttgaggccagtgtctcctgctgtgagaacaagtggatgtccctctccccgccctcctgctgaagtggccttgctgctctcaggcccggccactgggctccaagactctgctcctcctgtcagtcactgactctgatggccttgggccrgctgcatcagcagcccttaaagaaagacccctccctcaacccccatttttctgttaaatgtgcccctggctggctttttcttcgtcttcagcccaggccagtggtcagtgttctcatgtcatggactctccttgcctgacacttgcctcttgggctccctgttgccctcaggccaccccccacttctagttcttcacactaagccctaacttaggccttgttcttggttttctcatttttgttgccccaaatcttgaacctgtcagcaacttgcaggctgtacctctgcccttccttttctcatcaatcactgatgctgaagctgcaggcctgagccctttgtctccctggatgctgggtggcgcctcatctgcatctctgcctcaccccatccactgccacaggctgcctgatgaccactagaggtatgtctgcccctcgtcaccctgctgcacaccaatctgtggcccttcatcatgctaagaacaagaactgcgccatggctggctccttctcttctccagcccatccctctgcagcctgtcatccctgtctgtgaccattggtcgggcccctgggctctagagtgacttttgacgccctccatccctcccgccaggcactgtcctccgcaaggcctggtgcagccctggcagtaactggcttgtaagaggctcagacaccaagctgggcctgcagaggaggggcacagtaggacacagtgactgcccaggtgtccacacacctgtaggcctctgagccagcgtccagggtacaggtgcgggtggtggggatgaaggcctgaccagggagkgagaagcaggtttggagaggaccctgtgcccaccctgacagacaccctggctggccctgactgactgtattctctggccacattcaagtcccccattggtgggggcagagaagtaggaccaggccrtccttggctccagagctcgaagaccccaagacagccctctgctctcagcggcgccacagagagcctgggctcagccttctgcatcaggacatggcctcgtccactgagggcacgatttaaacatttgacatcagaagctttatttgtaaacctcacacagataaggaccaagggctggcggtgtggccagaggcaggggacaggccaccaaggacctttggcaaatgaaggtttacatttctgtagtttgtttgttttagagcttaatttgtagttttttagctattaaaaccatttgaatttttaacgacctgatgagggcatcaggtaaattaaaggat

SEQ ID NO: 5895 - DNA, 4932 bp, Homo sapiens
  misc_feature (1)...(4932): n = A,T,C or G
ggcagctcggccgactgggcccggagcggcgcggaggccgggcgctgacggtgtgtgtggaggccagtatgaagctgaaaaagcaggtgacagtgtgtggggctgccatcttctgtgtggcagtcttctcgctctacctyatgctggaccgagtgcaacacgatcccacccgacaccagaatggtgggaacttcccccggagccaaatttctgtgctgcagaaccgcattgagcagctggagcagcttttggaggagaaccatgagattatcagccatatcaaggactccgtgctggagctgacagccaacgcagagggcccgcccgccatgctgccctactacacggtcaatggctcctgggtggtgccaccggagccccggcccagcttcttctccatctccccgcaggactgccagtttgctttggggggccggggtcagaagccagagctgcagatgctcactgtgtcggaggagctgccgtttgacaacgtggatggtggtgtgtggaggcaaggcttcgacatctcctacgacccgcacgactgggatgctgaagacctgcaggtgtttgtggtgccccactctcacaatgacccaggctggatcaagacctttgacaagtactacacagagcagacccaacacatcctcaatagcatggtgtctaagctgcaggaggacccccggcggcgcttcctctgggcagaggtctccttcttcgccaagtggtgggacaacatcaatgtccaaaagagagcggcagtccgaaggccagctggtgggaaacgggcagctggagattgcgacaggaggctgggtgatgccagaygaggccaattcccactactttgcattgattgaccagctcatcgaaggwcaccagtggctggagagaaatcttggtgcaaccccccgctctggctgggcagtggacccctttggatacagctccaccatgccttacctgctgcgccgtgccaacctcaccagcatgctgattcagagagtgcactatgccatcaagaagcactttgctgccacccacagcctagagttcatgtggaggcagacatgggactcggactccagcacagacatcttctgtcacatgatgcccttctacagctatgacgtcccccatacctgtggcccagatcccaagatctgctgccaatttgatttcaaacgcctgcctggtgggcgcatcaactgcccttggaaggtgccaccccgggccatcacagaggccaacgtggcagagagggcagccctgcttctggaccaataccggaagaagtcccngctgttccgaagcaacgtcctcctggtgcctcttggagatgacttccgatatgacaagccccaggagtgggatgcccagttcttcaactaccaacggctctttgacttcttcaacagcaggcctaacctccatgtgcaggcccagtttggcactctttctgactattttgatgccctgtacaagaggacaggggtggagccaggggcccggcctccagggtttcctgtgctgagcggggatttcttctcctatgcggaccgggaggatcattactggacaggctattacacttcccggcccttctacaagagcttagaccgagtcctggaagcccacctgcggggggcagaggttctgtacagcctggctgcagctcacgctcgccgctctggtctggctggccggtacccactgtctgatttcaccctcctgacggaagctcggcgcacattggggctcttccagcatcacgatgccatcactggcacggccaaggaggctgtggtggtggactatggggtcaggcttctgcgctcccttgtcaacctgaagcaggtcatcattcatgcagcccactatytggtgctgggggacaaggagacctaccactttgaccctgaggcgcccttcctccaagtggatgacactcgcttaagtcacgaygccctcccagagcgcacggtgatccagctggattcctcgcccaggtttgtggtcctattcaacccactggaacaggagcgattcagcatggtgtycctgctggtcaactctccccgcgtgcgtgtcctttcggaggagggtcagcccctggccgtgcagatcagcgcacactggagctctgccaccgaggcggtccctgacgtctaccaggtgtctgtgcctgtccgcctgccagccctgggcctgggcgtgctgcagctacagctgggcctggatgggcaccgcacgctgccctcctctgtgcgcatctacctgcacggccggcagctgtccgtcagcaggcacgaagcgtttcctctccgtgtcattgactctggcaccagcgacttcgccctcagcaaccgctacatgcaggtctggttctcaggccttactgggctcctcaaggggtcagggctgtgttttttggcagagcatccgaagggtggatgaggagcacgagcagcaggtggacatgcaggtccttgtctatggcacccgtacgtccaaagacaagagtggagcctacctcttcctgcccgatggcgaggccaagccctacgtccccaaggagccccccgtgctgcgtgtcactgaaggccctttcttctcagaggtggttkcgtactatgagcacattcaccaggcggtccggctttacaatctgccaggggtggaggggctgtctctggacatatcatccctggtggacatccgggactacgtcaacaaggagctggccctgcacatccatacagacatcgacagccagggtgcagccccgacggtatctgaagaagctccccctccaggccaacttytaccccatgccagtcatggcctatatccaggacgcacagaagcgcctcacgctgcacactgcccaggccctgggtgtctctagcctcaaagatggccagctggaggtgatcttggaccggcggctgatgcaggatgacaaccggggcctaggccaagggctcaaggacaacaagagaacctgcaaccgtttccgcctcctgctagagcggcgaaccrtgggcagtgaggtccaagatagccactctaccagctacccatccctcctcagccacctgacctccatgtacctgaacgccccggcgctcgctctgcctgtagccaggatgcagctcccaggccctggtctgcgctcatttcatcctctggcttcctcactgccctgtgacttccacctgctcaacctacgtacgctccaggctgaggaggacaccctaccctcggcggagaccgcactcatcttacaccgcaagggttttgactgcggcctggaggccaagaacttgggcttcaactgcaccacaagccaaggcaaggtagccctgggcagccttttccatggcctggatgtggtattccttcagccaacctccttgacgttactgtaccctctggcctccccgtccaacagcactgacgtctatttggagcccatggagattgctacctttcgcctccgcttgggttagggcttcttgtggcctgaagagaaagttcattcacagagactgcctcttaacatgaagatcattggacaagccacacgggtatcccatcccgatctgcctcccagaactgtgacacactgggctctgccctcattttctgtttattgctgctgctgtgttttcggcgcaacccacaaacccagtgatgggtaaatagggcagacgccagtgagatcagggagagaaggcccttggtcagagtgggcagtgccaggctctgctttgggttgtgagtggacacccaactgggcacaggctcaggcacccatcctttttccaaacagggatatagaagwggtggaagcagacagaagaggtaagggaggctaagtgggtaacagcccagcatcagggtcactgtggcaacagcaggctctaggggaatcctgtggttatgtagagactccatgtcctggtgtgatgagcaggatcagagtgactctgggaggacaggggtggggacccagagttagcagtggggatggagcagtagaaggaatcactrtttctcctaggagtctgaaggcctcgctgctttctgtgatggctttgcagtaagtgccgcctggcctgcatgcattggctaacaggctgcagaatggcaggaaggactcgctagagattgtcatggccagagatcataggtcacttcaggtagcaagacccctggcaaactgggcacttggcctatgtactgatttgtgggatggtggcaggggtgtggggtccttcaccctgcctgaattctctttggcttctgtgctctgtatgctgctgtccccaagrgctctttcttattatggcagggagtggggattggtcctactttctttctctggaaaggaaagcctccaagactccatgtgcttgggcagcttgagaaggcgttcagcaccacgcctagcaggcagaccttgaagcctcacctttagtctatctgcagaggtattcagttcytggcacaggggactaggggcatgtagagtatatgaggaggcagtatggctgtgcaggagccttcatttcagcttcaattaatagggaagaatttatgatagctctatagatgctgaaaaggtatttcgtaagatttaaaatccatcccttattaamactcttagtaaattaagtctggaaagaaacaccctaatctagataaaggtctgtttcagaaaccaacagtgatggcattctaaagagtcagacgccacaggcattcccattaaagtcagaaactagccaagggcaagctattattcagcagtgtcccggcactactaacccctgcaacaagccagatgaggaacataaggaagaattataattgtcattatttgtagacaataaaactgcctacctgtaaaacctaagaatc

SEQ ID NO: 5896 - DNA, 4993 bp, Homo sapiens
  misc_feature (1)...(4993): n = A,T,C or G
ggggctacgggtgrgcgkgcgcccgccttcgcctgcgtcgctgcctgcacgcgggccgccgtccccgggcgtgtgagagccggcagctcggccgactgggcccggagcggcgcggaggccgggcgctgacggtaacgggccgggtgtgtgtggaggccagtatgaagctgaaaaagcaggtgacagtgtgtggggctgccatcttctgtgtggcagtcttctcgctctacctyatgctggaccgagtgcaacacgatcccacccgacaccagaatggtgggaacttcccccggagccaaatttctgtgctgcagaaccgcattgagcagctggagcagcttttggaggagaaccatgagattatcagccatatcaaggactccgtgctggagctgacagccaacgcagagggcccgcccgccatgctgccctactacacggtcaatggctcctgggtggtgccaccggagccccggcccagcttcttctccatctccccgcaggactgccagtttgctttggggggccggggtcagaagccagagctgcagatgctcactgtgtcggaggagctgccgtttgacaacgtggatggtggtgtgtggaggcaaggcttcgacatctcctacgacccgcacgactgggatgctgaagacctgcaggtgtttgtggtgccccactctcacaatgacccaggctggatcaagacctttgacaagtactacacagagcagacccaacacatcctcaatagcatggtgtctaagctgcaggaggacccccggcggcgcttcctctgggcagaggtctccttcttcgccaagtggtgggacaacatcaatgtccaaaagagagcggcagtccgaaggccgctggtgggaaacgggcagctggagattgcgacaggaggctgggtgatgccagaygaggccaattcccactactttgcattgattgaccagctcatcgaaggwcaccagtggctggagagaaatcttggtgcaaccccccgctctggctgggcagtggacccctttggatacagctccaccatgccttacctgctgcgccgtgccaacctcaccagcatgctgattcagagagtgcactatgccatcaagaagcactttgctgccacccacagcctagagttcatgtggaggcagacatgggactcggactccagcacagacatcttctgtcacatgatgcccttctacagctatgacgtcccccatacctgtggcccagatcccaagatctgctgccaatttgatttcaaacgcctgcctggtgggcgcatcaactgcccttggaaggtgccaccccgggccatcacagaggccaacgtggcagagagggcagccctgcttctggaccaataccggaagaagtcccngctgttccgaagcaacgtcctcctggtgcctcttggagatgacttccgatatgacaagccccaggagtgggatgcccagttcttcaactaccaacggctctttgacttcttcaacagcaggcctaacctccatgtgcaggcccagtttggcactctttctgactattttgatgccctgtacaagaggacaggggtggagccaggggcccggcctccagggtttcctgtgctgagcggggatttcttctcctatgcggaccgggaggatcattactggacaggctattacacttcccggcccttctacaagagcttagaccgagtcctggaagcccacctgcggggggcagaggttctgtacagcctggctgcagctcacgctcgccgctctggtctggctggccggtacccactgtctgatttcaccctcctgacggaagctcggcgcacattggggctcttccagcatcacgatgccatcactggcacggccaaggaggctgtggtggtggactatggggtcaggcttctgcgctcccttgtcaacctgaagcaggtcatcattcatgcagcccactatytggtgctgggggacaaggagacctaccactttgaccctgaggcgcccttcctccaagtggatgacactcgcttaagtcacgaygccctcccagagcgcacggtgatccagctggattcctcgcccaggtttgtggtcctattcaacccactggaacaggagcgattcagcatggtgtycctgctggtcaactctccccgcgtgcgtgtcctttcggaggagggtcagcccctggccgtgcagatcagcgcacactggagctctgccaccgaggcggtccctgacgtctaccaggtgtctgtgcctgtccgcctgccagccctgggcctgggcgtgctgcagctacagctgggcctggatgggcaccgcacgctgccctcctctgtgcgcatctacctgcacggccggcagctgtccgtcagcaggcacgaagcgtttcctctccgtgtcattgactctggcaccagcgacttcgccctcagcaaccgctacatgcaggtctggttctcaggccttactgggctcctcaagagcatccgaagggtggatgaggagcacgagcagcaggtggacatgcaggtccttgtctatggcacccgtacgtccaaagacaagagtggagcctacctcttcctgcccgatggcgagccctacgtccccaaggagccccccgtgctgcgtgtcactgaaggccctttcttctcagaggtggttkcgtactatgagcacattcaccaggcggtccggctttacaatctgccaggggtggaggggctgtctctggacatatcatccctggtggacatccgggactacgtcaacaaggagctggccctgcacatccatacagacatcgacagccagggtgcagccccgacggtatctgaagaagctccccctccaggccaacttytaccccatgccagtcatggcctatatccaggacgcacagaagcgcctcacgctgcacactgcccaggccctgggtgtctctagcctcaaagatggccagctggaggtgatcttggaccggcggctgatgcaggatgacaaccggggcctaggccaagggctcaaggacaacaagagaacctgcaaccgtttccgcctcctgctagagcggcgaaccrtgggcagtgaggtccaagatagccactctaccagctacccatccctcctcagccacctgacctccatgtacctgaacgccccggcgctcgctctgcctgtagccaggatgcagctcccaggccctggtctgcgctcatttcatcctctggcttcctcactgccctgtgacttccacctgctcaacctacgtacgctccaggctgaggaggacaccctaccctcggcggagaccgcactcatcttacaccgcaagggttttgactgcggcctggaggccaagaacttgggcttcaactgcaccacaagccaaggcaaggtagccctgggcagccttttccatggcctggatgtggtattccttcagccaacctccttgacgttactgtaccctctggcctccccgtccaacagcactgacgtctatttggagcccatggagattgctacctttcgcctccgcttgggttagggcttcttgtggcctgaagagaaagttcattcacagagactgcctcttaacatgaagatcattggacaagccacacgggtatcccatcccgatctgcctcccagaactgtgacacactgggctctgccctcattttctgtttattgctgctgctgtgttttcggcgcaacccacaaacccagtgatgggtaaatagggcagacgccagtgagatcagggagagaaggcccttggtcagagtgggcagtgccaggctctgctttgggttgtgagtggacacccaactgggcacaggctcaggcacccatcctttttccaaacagggatatagaagwggtggaagcagacagaagaggtaagggaggctaagtgggtaacagcccagcatcagggtcactgtggcaacagcaggctctaggggaatcctgtggttatgtagagactccatgtcctggtgtgatgagcaggatcagagtgactctgggaggacaggggtggggacccagagttagcagtggggatggagcagtagaaggaatcactrtttctcctaggagtctgaaggcctcgctgctttctgtgatggctttgcagtaagtgccgcctggcctgcatgcattggctaacaggctgcagaatggcaggaaggactcgctagagattgtcatggccagagatcataggtcacttcaggtagcaagacccctggcaaactgggcacttggcctatgtactgatttgtgggatggtggcaggggtgtggggtccttcaccctgcctgaattctctttggcttctgtgctctgtatgctgctgtccccaagrgctctttcttattatggcagggagtggggattggtcctactttctttctctggaaaggaaagcctccaagactccatgtgcttgggcagcttgagaaggcgttcagcaccacgcctagcaggcagaccttgaagcctcacctttagtctatctgcagaggtattcagttcytggcacaggggactaggggcatgtagagtatatgaggaggcagtatggctgtgcaggagccttcatttcagcttcaattaatagggaagaatttatgatagctctatagatgctgaaaaggtatttcgtaagatttaaaatccatcccttattaamactcttagtaaattaagtctggaaagaaacaccctaatctagataaaggtctgtttcagaaaccaacagtgatggcattctaaagagtcagacgccacaggcattcccattaaagtcagaaactagccaagggcaagctattattcagcagtgtcccggcactactaacccctgcaacaagccagatgaggaacataaggaagaattataattgtcattatttgtagacaataaaactgcctacctgtaaaacctaagaatc

SEQ ID NO: 5897 - DNA, 4928 bp, Homo sapiens
  misc_feature (1)...(4928): n = A,T,C or G
ggcagctcggccgactgggcccggagcggcgcggaggccgggcgctgacggtgtgtgtggaggccagtatgaagctgaaaaagcaggtgacagtgtgtggggctgccatcttctgtgtggcagtcttctcgctctacctyatgctggaccgagtgcaacacgatcccacccgacaccagaatggtgggaacttcccccggagccaaatttctgtgctgcagaaccgcattgagcagctggagcagcttttggaggagaaccatgagattatcagccatatcaaggactccgtgctggagctgacagccaacgcagagggcccgcccgccatgctgccctactacacggtcaatggctcctgggtggtgccaccggagccccggcccagcttcttctccatctccccgcaggactgccagtttgctttggggggccggggtcagaagccagagctgcagatgctcactgtgtcggaggagctgccgtttgacaacgtggatggtggtgtgtggaggcaaggcttcgacatctcctacgacccgcacgactgggatgctgaagacctgcaggtgtttgtggtgccccactctcacaatgacccaggctggatcaagacctttgacaagtactacacagagcagacccaacacatcctcaatagcatggtgtctaagctgcaggaggacccccggcggcgcttcctctgggcagaggtctccttcttcgccaagtggtgggacaacatcaatgtccaaaagagagcggcagtccgaaggctggtgggaaacgggcagctggagattgcgacaggaggctgggtgatgccagaygaggccaattcccactactttgcattgattgaccagctcatcgaaggwcaccagtggctggagagaaatcttggtgcaaccccccgctctggctgggcagtggacccctttggatacagctccaccatgccttacctgctgcgccgtgccaacctcaccagcatgctgattcagagagtgcactatgccatcaagaagcactttgctgccacccacagcctagagttcatgtggaggcagacatgggactcggactccagcacagacatcttctgtcacatgatgcccttctacagctatgacgtcccccatacctgtggcccagatcccaagatctgctgccaatttgatttcaaacgcctgcctggtgggcgcatcaactgcccttggaaggtgccaccccgggccatcacagaggccaacgtggcagagagggcagccctgcttctggaccaataccggaagaagtcccngctgttccgaagcaacgtcctcctggtgcctcttggagatgacttccgatatgacaagccccaggagtgggatgcccagttcttcaactaccaacggctctttgacttcttcaacagcaggcctaacctccatgtgcaggcccagtttggcactctttctgactattttgatgccctgtacaagaggacaggggtggagccaggggcccggcctccagggtttcctgtgctgagcggggatttcttctcctatgcggaccgggaggatcattactggacaggctattacacttcccggcccttctacaagagcttagaccgagtcctggaagcccacctgcggggggcagaggttctgtacagcctggctgcagctcacgctcgccgctctggtctggctggccggtacccactgtctgatttcaccctcctgacggaagctcggcgcacattggggctcttccagcatcacgatgccatcactggcacggccaaggaggctgtggtggtggactatggggtcaggcttctgcgctcccttgtcaacctgaagcaggtcatcattcatgcagcccactatytggtgctgggggacaaggagacctaccactttgaccctgaggcgcccttcctccaagtggatgacactcgcttaagtcacgaygccctcccagagcgcacggtgatccagctggattcctcgcccaggtttgtggtcctattcaacccactggaacaggagcgattcagcatggtgtycctgctggtcaactctccccgcgtgcgtgtcctttcggaggagggtcagcccctggccgtgcagatcagcgcacactggagctctgccaccgaggcggtccctgacgtctaccaggtgtctgtgcctgtccgcctgccagccctgggcctgggcgtgctgcagctacagctgggcctggatgggcaccgcacgctgccctcctctgtgcgcatctacctgcacggccggcagctgtccgtcagcaggcacgaagcgtttcctctccgtgtcattgactctggcaccagcgacttcgccctcagcaaccgctacatgcaggtctggttctcaggccttactgggctcctcaaggggtcagggctgtgttttttggcagagcatccgaagggtggatgaggagcacgagcagcaggtggacatgcaggtccttgtctatggcacccgtacgtccaaagacaagagtggagcctacctcttcctgcccgatggcgaggccaagccctacgtccccaaggagccccccgtgctgcgtgtcactgaaggccctttcttctcagaggtggttkcgtactatgagcacattcaccaggcggtccggctttacaatctgccaggggtggaggggctgtctctggacatatcatccctggtggacatccgggactacgtcaacaaggagctggccctgcacatccatacagacatcgacagccagggtgcagccccgacggtatctgaagaagctccccctccaggccaacttytaccccatgccagtcatggcctatatccaggacgcacagaagcgcctcacgctgcacactgcccaggccctgggtgtctctagcctcaaagatggccagctggaggtgatcttggaccggcggctgatgcaggatgacaaccggggcctaggccaagggctcaaggacaacaagagaacctgcaaccgtttccgcctcctgctagagcggcgaaccrtgggcagtgaggtccaagatagccactctaccagctacccatccctcctcagccacctgacctccatgtacctgaacgccccggcgctcgctctgcctgtagccaggatgcagctcccaggccctggtctgcgctcatttcatcctctggcttcctcactgccctgtgacttccacctgctcaacctacgtacgctccaggctgaggaggacaccctaccctcggcggagaccgcactcatcttacaccgcaagggttttgactgcggcctggaggccaagaacttgggcttcaactgcaccacaagccaaggcaaggtagccctgggcagccttttccatggcctggatgtggtattccttcagccaacctccttgacgttactgtaccctctggcctccccgtccaacagcactgacgtctatttggagcccatggagattgctacctttcgcctccgcttgggttagggcttcttgtggcctgaagagaaagttcattcacagagactgcctcttaacatgaagatcattggacaagccacacgggtatcccatcccgatctgcctcccagaactgtgacacactgggctctgccctcattttctgtttattgctgctgctgtgttttcggcgcaacccacaaacccagtgatgggtaaatagggcagacgccagtgagatcagggagagaaggcccttggtcagagtgggcagtgccaggctctgctttgggttgtgagtggacacccaactgggcacaggctcaggcacccatcctttttccaaacagggatatagaagwggtggaagcagacagaagaggtaagggaggctaagtgggtaacagcccagcatcagggtcactgtggcaacagcaggctctaggggaatcctgtggttatgtagagactccatgtcctggtgtgatgagcaggatcagagtgactctgggaggacaggggtggggacccagagttagcagtggggatggagcagtagaaggaatcactrtttctcctaggagtctgaaggcctcgctgctttctgtgatggctttgcagtaagtgccgcctggcctgcatgcattggctaacaggctgcagaatggcaggaaggactcgctagagattgtcatggccagagatcataggtcacttcaggtagcaagacccctggcaaactgggcacttggcctatgtactgatttgtgggatggtggcaggggtgtggggtccttcaccctgcctgaattctctttggcttctgtgctctgtatgctgctgtccccaagrgctctttcttattatggcagggagtggggattggtcctactttctttctctggaaaggaaagcctccaagactccatgtgcttgggcagcttgagaaggcgttcagcaccacgcctagcaggcagaccttgaagcctcacctttagtctatctgcagaggtattcagttcytggcacaggggactaggggcatgtagagtatatgaggaggcagtatggctgtgcaggagccttcatttcagcttcaattaatagggaagaatttatgatagctctatagatgctgaaaaggtatttcgtaagatttaaaatccatcccttattaamactcttagtaaattaagtctggaaagaaacaccctaatctagataaaggtctgtttcagaaaccaacagtgatggcattctaaagagtcagacgccacaggcattcccattaaagtcagaaactagccaagggcaagctattattcagcagtgtcccggcactactaacccctgcaacaagccagatgaggaacataaggaagaattataattgtcattatttgtagacaataaaactgcctacctgtaaaacctaagaatc

SEQ ID NO: 5898 - DNA, 5131 bp, Homo sapiens
  misc_feature (1)...(5131): n = A,T,C or G
ggggctacgggtgrgcgkgcgcccgccttcgcctgcgtcgctgcctgcacgcgggccgccgtccccgggcgtgtgagagccggcagctcggccgactgggcccggagcggcgcggaggccgggcgctgacggtaacgggccgggtgtgtgtggaggccagtatgaagctgaaaaagcaggtgacagtgtgtggggctgccatcttctgtgtggcagtcttctcgctctacctyatgctggaccgagtgcaacacgatcccacccgacaccagaatggtgggaacttcccccggagccaaatttctgtgctgcagaaccgcattgagcagctggagcagcttttggaggagaaccatgagattatcagccatatcaaggactccgtgctggagctgacagccaacgcagagggcccgcccgccatgctgccctactacacggtcaatggctcctgggtggtgccaccggagccccggcccagcttcttctccatctccccgcaggactgccagtttgctttggggggccggggtcagaagccagagctgcagatgctcactgtgtcggaggagctgccgtttgacaacgtggatggtggtgtgtggaggcaaggcttcgacatctcctacgacccgcacgactgggatgctgaagacctgcaggtgtttgtggtgccccactctcacaatgacccaggctggatcaagacctttgacaagtactacacagagcagacccaacacatcctcaatagcatggtgtctaagctgcaggaggacccccggcggcgcttcctctgggcagaggtctccttcttcgccaagtggtgggacaacatcaatgtccaaaagagagcggcagtccgaaggccgctggtgggaaacgggcagctggagattgcgacaggaggctgggtgatgccagaygaggccaattcccactactttgcattgattgaccagctcatcgaaggwcaccagtggctggagagaaatcttggtgcaaccccccgctctggctgggcagtggacccctttggatacagctccaccatgccttacctgctgcgccgtgccaacctcaccagcatgctgattcagagagtgcactatgccatcaagaagcactttgctgccacccacagcctagagttcatgtggaggcagacatgggactcggactccagcacagacatcttctgtcacatgatgcccttctacagctatgacgtcccccatacctgtggcccagatcccaagatctgctgccaatttgatttcaaacgcctgcctggtgggcgcatcaactgcccttggaaggtgccaccccgggccatcacagaggccaacgtggcagagagggcagccctgcttctggaccaataccggaagaagtcccngctgttccgaagcaacgtcctcctggtgcctcttggagatgacttccgatatgacaagccccaggagtgggatgcccagttcttcaactaccaacggctctttgacttcttcaacagcaggcctaacctccatgtgcaggcccagtttggcactctttctgactattttgatgccctgtacaagaggacaggggtggagccaggggcccggcctccagggtttcctgtgctgagcggggatttcttctcctatgcggaccgggaggatcattactggacaggctattacacttcccggcccttctacaagagcttagaccgagtcctggaagcccacctgcggggggcagaggttctgtacagcctggctgcagctcacgctcgccgctctggtctggctggccggtacccactgtctgatttcaccctcctgacggaagctcggcgcacattggggctcttccagcatcacgatgccatcactggcacggccaaggaggctgtggtggtggactatggggtcaggcttctgcgctcccttgtcaacctgaagcaggtcatcattcatgcagcccactatytggtgctgggggacaaggagacctaccactttgaccctgaggcgcccttcctccaagtggatgacactcgcttaagtcacgaygccctcccagagcgcacggtgatccagctggattcctcgcccaggtttgtggtcctattcaacccactggaacaggagcgattcagcatggtgtycctgctggtcaactctccccgcgtgcgtgtcctttcggaggagggtcagcccctggccgtgcagatcagcgcacactggagctctgccaccgaggcggtccctgacgtctaccaggtgtctgtgcctgtccgcctgccagccctgggcctgggcgtgctgcagctacagctgggcctggatgggcaccgcacgctgccctcctctgtgcgcatctacctgcacggccggcagctgtccgtcagcaggcacgaagcgtttcctctccgtgtcattgactctggcaccagcgacttcgccctcagcaaccgctacatgcaggtctggttctcaggccttactgggctcctcaaggggtcagggctgtgttttttggcagagcatccgaagggtggatgaggagcacgagcagcaggtggacatgcaggtccttgtctatggcacccgtacgtccaaagacaagagtggagcctacctcttcctgcccgatggcgaggccaagccctacgtccccaaggagccccccgtgctgcgtgtcactgaaggccctttcttctcagaggtggttkcgtactatgagcacattcaccaggcggtccggctttacaatctgccaggggtggaggggctgtctctggacatatcatccctggtggacatccgggactacgtcaacaaggagctggccctgcacatccatacagacatcgacagccagggtatcttcttcacagacctcaatggctttcaggtgcagccccgacggtatctgaagaagctccccctccaggccaacttytaccccatgccagtcatggcctatatccaggacgcacagaagcgcctcacgctgcacactgcccaggccctgggtgtctctagcctcaaagatggccagctggaggtgatcttggaccggcggctgatgcaggatgacaaccggggcctaggccaagggctcaaggacaacaagagaacctgcaaccgtttccgcctcctgctagagcggcgaaccrtgggcagtgagcctgactttttctccaaactggcagccatgtttaggggcttgatctttcacagcagcaggagcggtaaccgagaggtccaagatagccactctaccagctacccatccctcctcagccacctgacctccatgtacctgaacgccccggcgctcgctctgcctgtagccaggatgcagctcccaggccctggtctgcgctcatttcatcctctggcttcctcactgccctgtgacttccacctgctcaacctacgtacgctccaggctgaggaggacaccctaccctcggcggagaccgcactcatcttacaccgcaagggttttgactgcggcctggaggccaagaacttgggcttcaactgcaccacaagccaaggcaaggtagccctgggcagccttttccatggcctggatgtggtattccttcagccaacctccttgacgttactgtaccctctggcctccccgtccaacagcactgacgtctatttggagcccatggagattgctacctttcgcctccgcttgggttagggcttcttgtggcctgaagagaaagttcattcacagagactgcctcttaacatgaagatcattggacaagccacacgggtatcccatcccgatctgcctcccagaactgtgacacactgggctctgccctcattttctgtttattgctgctgctgtgttttcggcgcaacccacaaacccagtgatgggtaaatagggcagacgccagtgagatcagggagagaaggcccttggtcagagtgggcagtgccaggctctgctttgggttgtgagtggacacccaactgggcacaggctcaggcacccatcctttttccaaacagggatatagaagwggtggaagcagacagaagaggtaagggaggctaagtgggtaacagcccagcatcagggtcactgtggcaacagcaggctctaggggaatcctgtggttatgtagagactccatgtcctggtgtgatgagcaggatcagagtgactctgggaggacaggggtggggacccagagttagcagtggggatggagcagtagaaggaatcactrtttctcctaggagtctgaaggcctcgctgctttctgtgatggctttgcagtaagtgccgcctggcctgcatgcattggctaacaggctgcagaatggcaggaaggactcgctagagattgtcatggccagagatcataggtcacttcaggtagcaagacccctggcaaactgggcacttggcctatgtactgatttgtgggatggtggcaggggtgtggggtccttcaccctgcctgaattctctttggcttctgtgctctgtatgctgctgtccccaagrgctctttcttattatggcagggagtggggattggtcctactttctttctctggaaaggaaagcctccaagactccatgtgcttgggcagcttgagaaggcgttcagcaccacgcctagcaggcagaccttgaagcctcacctttagtctatctgcagaggtattcagttcytggcacaggggactaggggcatgtagagtatatgaggaggcagtatggctgtgcaggagccttcatttcagcttcaattaatagggaagaatttatgatagctctatagatgctgaaaaggtatttcgtaagatttaaaatccatcccttattaamactcttagtaaattaagtctggaaagaaacaccctaatctagataaaggtctgtttcagaaaccaacagtgatggcattctaaagagtcagacgccacaggcattcccattaaagtcagaaactagccaagggcaagctattattcagcagtgtcccggcactactaacccctgcaacaagccagatgaggaacataaggaagaattataattgtcattatttgtagacaataaaactgcctacctgtaaaacctaagaatc

SEQ ID NO: 5899 - DNA, 5130 bp, Homo sapiens
  misc_feature (1)...(5130): n = A,T,C or G
ggggctacgggtgrgcgkgcgcccgccttcgcctgcgtcgctgcctgcacgcgggccgccgtccccgggcgtgtgagagccggcagctcggccgactgggcccggagcggcgcggaggccgggcgctgacggtaacgggccgggtgtgtgtggaggccagtatgaagctgaaaaagcaggtgacagtgtgtggggctgccatcttctgtgtggcagtcttctcgctctacctyatgctggaccgagtgcaacacgatcccacccgacaccagaatggtgggaacttcccccggagccaaatttctgtgctgcagaaccgcattgagcagctggagcagcttttggaggagaaccatgagattatcagccatatcaaggactccgtgctggagctgacagccaacgcagagggcccgcccgccatgctgccctactacacggtcaatggctcctgggtggtgccaccggagccccggcccagcttcttctccatctccccgcaggactgccagtttgctttggggggccggggtcagaagccagagctgcagatgctcactgtgtcggaggagctgccgtttgacaacgtggatggtggtgtgtggaggcaaggcttcgacatctcctacgacccgcacgactgggatgctgaagacctgcaggtgtttgtggtgccccactctcacaatgacccaggctggatcaagacctttgacaagtactacacagagcagacccaacacatcctcaatagcatggtgtctaagctgcaggaggacccccggcggcgcttcctctgggcagaggtctccttcttcgccaagtggctggtgggaaacgggcagctggagattgcgacaggaggctgggtgatgccagaygaggccaattcccactactttgcattgattgaccagctcatcgaaggwcaccagtggctggagagaaatcttggtgcaaccccccgctctggctgggcagtggacccctttggatacagctccaccatgccttacctgctgcgccgtgccaacctcaccagcatgctgattcagagagtgcactatgccatcaagaagcactttgctgccacccacagcctagagttcatgtggaggcagacatgggactcggactccagcacagacatcttctgtcacatgatgcccttctacagctatgacgtcccccatacctgtggcccagatcccaagatctgctgccaatttgatttcaaacgcctgcctggtgggcgcatcaactgcccttggaaggtgccaccccgggccatcacagaggccaacgtggcagagagggcagccctgcttctggaccaataccggaagaagtcccngctgttccgaagcaacgtcctcctggtgcctcttggagatgacttccgatatgacaagccccaggagtgggatgcccagttcttcaactaccaacggctctttgacttcttcaacagcaggcctaacctccatgtgcaggcccagtttggcactctttctgactattttgatgccctgtacaagaggacaggggtggagccaggggcccggcctccagggtttcctgtgctgagcggggatttcttctcctatgcggaccgggaggatcattactggacaggctattacacttcccggcccttctacaagagcttagaccgagtcctggaagcccacctgcggggggcagaggttctgtacagcctggctgcagctcacgctcgccgctctggtctggctggccggtacccactgtctgatttcaccctcctgacggaagctcggcgcacattggggctcttccagcatcacgatgccatcactggcacggccaaggaggctgtggtggtggactatggggtcaggcttctgcgctcccttgtcaacctgaagcaggtcatcattcatgcagcccactatytggtgctgggggacaaggagacctaccactttgaccctgaggcgcccttcctccaagtggtggggtgggaggaggctgagcccatgatggttcttcccttccggctcactgaattccaggatgacactcgcttaagtcacgaygccctcccagagcgcacggtgatccagctggattcctcgcccaggtttgtggtcctattcaacccactggaacaggagcgattcagcatggtgtycctgctggtcaactctccccgcgtgcgtgtcctttcggaggagggtcagcccctggccgtgcagatcagcgcacactggagctctgccaccgaggcggtccctgacgtctaccaggtgtctgtgcctgtccgcctgccagccctgggcctgggcgtgctgcagctacagctgggcctggatgggcaccgcacgctgccctcctctgtgcgcatctacctgcacggccggcagctgtccgtcagcaggcacgaagcgtttcctctccgtgtcattgactctggcaccagcgacttcgccctcagcaaccgctacatgcaggtctggttctcaggccttactgggctcctcaagagcatccgaagggtggatgaggagcacgagcagcaggtggacatgcaggtccttgtctatggcacccgtacgtccaaagacaagagtggagcctacctcttcctgcccgatggcgaggccaagccctacgtccccaaggagccccccgtgctgcgtgtcactgaaggccctttcttctcagaggtggttkcgtactatgagcacattcaccaggcggtccggctttacaatctgccaggggtggaggggctgtctctggacatatcatccctggtggacatccgggactacgtcaacaaggagctggccctgcacatccatacagacatcgacagccagggtatcttcttcacagacctcaatggctttcaggtgcagccccgacggtatctgaagaagctccccctccaggccaacttytaccccatgccagtcatggcctatatccaggacgcacagaagcgcctcacgctgcacactgcccaggccctgggtgtctctagcctcaaagatggccagctggaggtgatcttggaccggcggctgatgcaggatgacaaccggggcctaggccaagggctcaaggacaacaagagaacctgcaaccgtttccgcctcctgctagagcggcgaaccrtgggcagtgaggtccaagatagccactctaccagctacccatccctcctcagccacctgacctccatgtacctgaacgccccggcgctcgctctgcctgtagccaggatgcagctcccaggccctggtctgcgctcatttcatcctctggcttcctcactgccctgtgacttccacctgctcaacctacgtacgctccaggctgagcactgcctctgggcagaggcgctgctgcatctcygatctctgaaagccctgcgcccacttccctgggcactgtctgtcatccaggaggacaccctaccctcggcggagaccgcactcatcttacaccgcaagggttttgactgcggcctggaggccaagaacttgggcttcaactgcaccacaagccaaggcaaggtagccctgggcagccttttccatggcctggatgtggtattccttcagccaacctccttgacgttactgtaccctctggcctccccgtccaacagcactgacgtctatttggagcccatggagattgctacctttcgcctccgcttgggttagggcttcttgtggcctgaagagaaagttcattcacagagactgcctcttaacatgaagatcattggacaagccacacgggtatcccatcccgatctgcctcccagaactgtgacacactgggctctgccctcattttctgtttattgctgctgctgtgttttcggcgcaacccacaaacccagtgatgggtaaatagggcagacgccagtgagatcagggagagaaggcccttggtcagagtgggcagtgccaggctctgctttgggttgtgagtggacacccaactgggcacaggctcaggcacccatcctttttccaaacagggatatagaagwggtggaagcagacagaagaggtaagggaggctaagtgggtaacagcccagcatcagggtcactgtggcaacagcaggctctaggggaatcctgtggttatgtagagactccatgtcctggtgtgatgagcaggatcagagtgactctgggaggacaggggtggggacccagagttagcagtggggatggagcagtagaaggaatcactrtttctcctaggagtctgaaggcctcgctgctttctgtgatggctttgcagtaagtgccgcctggcctgcatgcattggctaacaggctgcagaatggcaggaaggactcgctagagattgtcatggccagagatcataggtcacttcaggtagcaagacccctggcaaactgggcacttggcctatgtactgatttgtgggatggtggcaggggtgtggggtccttcaccctgcctgaattctctttggcttctgtgctctgtatgctgctgtccccaagrgctctttcttattatggcagggagtggggattggtcctactttctttctctggaaaggaaagcctccaagactccatgtgcttgggcagcttgagaaggcgttcagcaccacgcctagcaggcagaccttgaagcctcacctttagtctatctgcagaggtattcagttcytggcacaggggactaggggcatgtagagtatatgaggaggcagtatggctgtgcaggagccttcatttcagcttcaattaatagggaagaatttatgatagctctatagatgctgaaaaggtatttcgtaagatttaaaatccatcccttattaamactcttagtaaattaagtctggaaagaaacaccctaatctagataaaggtctgtttcagaaaccaacagtgatggcattctaaagagtcagacgccacaggcattcccattaaagtcagaaactagccaagggcaagctattattcagcagtgtcccggcactactaacccctgcaacaagccagatgaggaacataaggaagaattataattgtcattatttgtagacaataaaactgcctacctgtaaaacctaagaatc

SEQ ID NO: 5900 - DNA, 5020 bp, Homo sapiens
  misc_feature (1)...(5020): n = A,T,C or G
gaagcagccaatcggaataggcaagcttccggcgggaagtgagccagggcttggcgcggcggccgtggttgcggcgcgggaagtttggatcctggttccgtccgctaggagtctgcgtgcgaggattatggctgctgttcctcaaaataatctacaggagcaactagaacgtcactcagccagaacacttaataataaattaagtctttcaaaaccaaaattttcaggtttcacttttaaaaagaaaacatcttcagataacaatgtatctgtaactaatgtgtcagtagcaaaaacacctgtattaagaaataaagatgttaatgttaccgaagacttttccttcagtgaacctctacccaacaccacaaatcagcaaagggtcaaggacttctttaaaaatgctccagcaggacaggaaacacagagaggtggatcaaaatcattattgccagatttcttgcagactccgaaggaagttgtatgcactacccaaaacacaccaactgtaaagaaatcccgggatactgctctcaagaaattagratttagttcttcaccagattctttaagtaccatcaatgattgggatgatatggatgactttgatacttctgagacttcaaaatcatttgttacaccaccccaaagtcactttgtaagagtaagcactgctcagaaatcaaaaaagggtaagagaaacttttttaaagcacagctttatacaacaaacacagtaaagactgatttgcctccaccctcctctgaaagcgagcaaatagatttgactgaggaacagaaggatgactcagaatggttaagcagcgatgtgatttgcatcgatgatggccccattgctgaagtgcatataaatgaagatgctcargaaagtgactctctgaaaactcatttggaagatgaaagagataatagcgaaaagwagaagaatttggaagaagctgaattacattcaactgagaaagttccatgtattgaatttgatgatgatgattatgatacggattttgttccaccttctccagaagaaattatttctgcttcttcttcctcttcaaaatgccttagtacgttaaaggaccttgacacctctgacagaaaagaggatgttcttagcacatcaaaagatcttttgtcaaaacctgagaaaatgagtatgcaggagctgaatccagaaaccagcacagactgtgacgctagacagataagtttacagcagcagcttattcatgtgatggagcacatctgtaaattaattgatactattcctgatgataaactgaaacttttggattgtgggaacgaactgcttcagcagcggaacataagaaggaaacttctaacggaagtagattttaataaaagtgatgccagtcttcttggctcattgtggagatacaggcctgattcacttgatggccctatggagggtgattcctgccctacagggaattctatgaaggagttaaatttttcacaccttccctcaaattctgtttctcctggggactgtttactgactaccaccctaggaaagacaggattctctgccaccaggaagaatctttttgaaaggcctttattcaatacccatttacagaagtcctttgtaagtagcaactgggctgaaacaccaagactaggaaaaaaaaatgaaagctcttatttcccaggaaatgttctcacaagcactgctgtgaaagatcagartaaacatactgcttcaataaatgacttagaaagagaaacccaaccttcctatgatattgataattttgacatagatgactttgatgatgatgatgactgggaagacataatgcataatttagcagccagcaaatcttccacagctgcctatcaacccatcaaggaaggtcggccaattaaatcagtatcagaaagactttcctcagccaagacagactgtcttccagtgtcatctactgctcaaaatataaacttctcagagtcaattcagaattatactgacaagtcagcacaaaatttagcatccagaaatctgaaacatgagcgtttcyaaagtcttagttttcctcatacaaaggaaatgatgaagatttttcataaaaaatttggcctgcataattttagaactaatcrgctagaggcgatcaatgctgcactgcttggtgaagactgttttatcctgatgccgactggaggtggtaagagtttgtgttaccagctccctgcctgtgtttctcctggggtcactgttgtcatttctcccttgagatcacttatcgtagatcaagtccaaaagctgacttccttggatattccagctacatatctgacaggtgataagactgactcagaagctacaaatatttacctccagttatcaaaaaaagacccaatcataaaacttctatatgtcactccagaaaagatctgtgcaagtaacagactcatttctactctggagaatctctatgagaggaagctcttggcacgttttgttattgatgaagcacattgtgtcagtcagtggggacatgattttcgtcaagattacaaaagaatgaatatgcttcgccagaagtttccttctgttccggtgatggctcttacggccacagctaatcccagggtacagaaggacatcctgactcagctgaagattctcagacctcaggtgtttagcatgagctttaacagacataatctgaaatactatgtattacngaaaaagcctaaaaaggtggcatttgattgcctagaatggatcagaaagcaccacccatatgattcagrgataatttactgcctctccaggcgagaatgtgacaccatggctgacacgttacagagagatgggctcgctgctcttgcttaccatgctggcctcagtgattctgccagagatgaagtgcagcagaagtggattaatcaggatggctgtcaggttatctgtgctacaattgcatttggaatggggattgacaaaccggacgtgcgatttgtgattcatgcatctctccctaaatctgtggagggttactaccaagaatctggcagagctggaagagatggggaaatatctcactgcctgcttttctatacctatcatgatgtgaccagactgaaaagacttataatgatggaaaaagatggaaaccatcatacaagagaaactcacttcaataatttgtatagcatggtacattactgtgaaaatataacrgaatkcaggagaatacagcttttggcctactttggtgaaaatggatttaatcctgatttttstaagaaacacccagatgtttcttgtgataattgctgtaaaacaaaggattataaaacaagagatgtgactgacgatgtgaaaagtattgtaagatttgttcaagaacatagttcatcacaaggaatgagaaatataaaacatgtaggtccttctggaagatttactatgaatatgctggtcgacattttcttggggagtaagagtgcaaaaatccagtcaggtatatttggaaaaggatctgcttattcacgacacaatgccgaaagactttttaaaaagctgatacttgacaagattttggatgaagacttatatatcaatgccaatgaccaggcgatcgcttatgtgatgctcggaaataaagcmcaaactgtactaaatggcaatttaaaggtagactttatggaaacagaaaattccagcagtgtgaaaaaacaaaaagcgttagtagcaaaagtgwctcagagggaagagatggttaaaaaatgtcttggagaacttacagaagtctgcaaatctctggggaaagtttttggtgtccattacttcaatatttttaataccgtcactctcaagaagcttgcagaatctttatcttctgatcctgaggttttgcttcaaattgatggtgttactgaagacaaactggaaaaatatggtgcggaagtgatttcagtattacagaaatactctgaatggacatcgccagctgaagacagttccccagggataagcctgtccagcagcagaggccccggaagaagtgccgctgaggagctygacgaggaaataccyrtatcttcccactactttgcaagtaaaaccagaaatgaaaggaagaggaaaaagatgccagcctcccaaaggtctaagaggagaaaaactgcttccagtggttccaaggcaaagggggggtctgccacatgtagaaagatatcttccaaaacgaaatcctccagcatcattggatccagttcagcctcacatacttctcaagcgacatcaggagccaatagcaaattggggattatggctccaccgaagcctataaatagaccgtttcttaagccttcatatgcattctcataacaaccgaatctcaatgtacatagaccctctttcttgtttgtcagcatctgaccatctgtgactataaagctgttattcttgttataccatttgaagtttttactcgtctctattaatatttaaataaatgctggggggtgatagttcttctttttaaaataaacattttcttttgaataagcatgttttgctgccgctgcaagtgttgtggccgttgtttctcagaacgtctgaggcagcagctgaatcatctcagtgcaagagcttctgagcataacacgaaacccagaagccaaaggaagagccacgcgtgggcccttgtgaaactaaagcttttcgtgtaagacaacacaaacaaaatttaaagacaaatgacggggaaaagaggagaaaatatattacaaaggattagtatccatcataccaaatacccgtgaaccagtcagaaacatcccagggggcaggtggaccaaggatgtgaacaggctagtctcagaagaagaaatacacatgctcatggcccggcactgtggctcacgcctgggatcccagcackttgggaggccgaggcaggtggatcacgaggtcaggagtttgagaccagcctgcccaacatggtgaaaccccgtctctactaaa

SEQ ID NO: 5901 - DNA, 4945 bp, Homo sapiens
  misc_feature (1)...(4945): n = A,T,C or G
gaagcagccaatcggaataggcaagcttccggcgggaagtgagccagggcttggcgcggcggccgtggttgcggcgcgggaagtttggatcctggttccgtccgctaggagtctgcgtgcgaggattatggctgctgttcctcaaaataatctacaggagcaactagaacgtcactcagccagaacacttaataataaattaagtctttcaaaaccaaaattttcaggtttcacttttaaaaagaaaacatcttcagataacaatgtatctgtaactaatgtgtcagtagcaaaaacacctgtattaagaaataaagatgttaatgttaccgaagacttttccttcagtgaacctctacccaacaccacaaatcagcaaagggtcaaggacttctttaaaaatgctccagcaggacaggaaacacagagaggtggatcaaaatcattattgccagatttcttgcagactccgaaggaagttgtatgcactacccaaaacacaccaactgtaaagaaatcccgggatactgctctcaagaaattagratttagttcttcaccagattctttaagtaccatcaatgattgggatgatatggatgactttgatacttctgagacttcaaaatcatttgttacaccaccccaaagtcactttgtaagagtaagcactgctcagaaatcaaaaaagggtaagagaaacttttttaaagcacagctttatacaacaaacacagtaaagactgatttgcctccaccctcctctgaaagcgagcaaatagatttgactgaggaacagaaggatgactcagaatggttaagcagcgatgtgatttgcatcgatgatggccccattgctgaagtgcatataaatgaagatgctcargaaagtgactctctgaaaactcatttggaagatgaaagagtggttaacaaatctatgtttatcaactgttttactgtagataatagcgaaaagwagaagaatttggaagaagctgaattacattcaactgagaaagttccatgtattgaatttgatgatgatgattatgatacggattttgttccaccttctccagaagaaattatttctgcttcttcttcctcttcaaaatgccttagtacgttaaaggaccttgacacctctgacagaaaagaggatgttcttagcacatcaaaagatcttttgtcaaaacctgagaaaatgagtatgcaggagctgaatccagaaaccagcacagactgtgacgctagacagataagtttacagcagcagcttattcatgtgatggagcacatctgtaaattaattgatactattcctgatgataaactgaaacttttggattgtgggaacgaactgcttcagcagcggaacataagaaggaaacttctaacggaagtagattttaataaaagtgatgccagtcttcttggctcattgtggagatacaggcctgattcacttgatggccctatggagggtgattcctgccctacagggaattctatgaaggagttaaatttttcacaccttccctcaaattctgtttctcctggggactgtttactgactaccaccctaggaaagacaggattctctgccaccaggaagaatctttttgaaaggcctttattcaatacccatttacagaagtcctttgtaagtagcaactgggctgaaacaccaagactaggaaaaaaaaatgaaagctcttatttcccaggaaatgttctcacaagcactgctgtgaaagatcagartaaacatactgcttcaataaatgacttagaaagagaaacccaaccttcctatgatattgataattttgacatagatgactttgatgatgatgatgactgggaagacataatgcataatttagcagccagcaaatcttccacagctgcctatcaacccatcaaggaaggtcggccaattaaatcagtatcagaaagactttcctcagccaagacagactgtcttccagtgtcatctactgctcaaaatataaacttctcagagtcaattcagaattatactgacaagtcagcacaaaatttagcatccagaaatctgaaacatgagcgtttcyaaagtcttagttttcctcatacaaaggaaatgatgaagatttttcataaaaaatttggcctgcataattttagaactaatcrgctagaggcgatcaatgctgcactgcttggtgaagactgttttatcctgatgccgactggaggtggtaagagtttgtgttaccagctccctgcctgtgtttctcctggggtcactgttgtcatttctcccttgagatcacttatcgtagatcaagtccaaaagctgacttccttggatatctgtgcaagtaacagactcatttctactctggagaatctctatgagaggaagctcttggcacgttttgttattgatgaagcacattgtgtcagtcagtggggacatgattttcgtcaagattacaaaagaatgaatatgcttcgccagaagtttccttctgttccggtgatggctcttacggccacagctaatcccagggtacagaaggacatcctgactcagctgaagattctcagacctcaggtgtttagcatgagctttaacagacataatctgaaatactatgtattacngaaaaagcctaaaaaggtggcatttgattgcctagaatggatcagaaagcaccacccatatgattcagrgataatttactgcctctccaggcgagaatgtgacaccatggctgacacgttacagagagatgggctcgctgctcttgcttaccatgctggcctcagtgattctgccagagatgaagtgcagcagaagtggattaatcaggatggctgtcaggttatctgtgctacaattgcatttggaatggggattgacaaaccggacgtgcgatttgtgattcatgcatctctccctaaatctgtggagggttactaccaagaatctggcagagctggaagagatggggaaatatctcactgcctgcttttctatacctatcatgatgtgaccagactgaaaagacttataatgatggaaaaagatggaaaccatcatacaagagaaactcacttcaataatttgtatagcatggtacattactgtgaaaatataacrgaatkcaggagaatacagcttttggcctactttggtgaaaatggatttaatcctgatttttstaagaaacacccagatgtttcttgtgataattgctgtaaaacaaaggattataaaacaagagatgtgactgacgatgtgaaaagtattgtaagatttgttcaagaacatagttcatcacaaggaatgagaaatataaaacatgtaggtccttctggaagatttactatgaatatgctggtcgacattttcttggggagtaagagtgcaaaaatccagtcaggtatatttggaaaaggatctgcttattcacgacacaatgccgaaagactttttaaaaagctgatacttgacaagattttggatgaagacttatatatcaatgccaatgaccaggcgatcgcttatgtgatgctcggaaataaagcmcaaactgtactaaatggcaatttaaaggtagactttatggaaacagaaaattccagcagtgtgaaaaaacaaaaagcgttagtagcaaaagtgwctcagagggaagagatggttaaaaaatgtcttggagaacttacagaagtctgcaaatctctggggaaagtttttggtgtccattacttcaatatttttaataccgtcactctcaagaagcttgcagaatctttatcttctgatcctgaggttttgcttcaaattgatggtgttactgaagacaaactggaaaaatatggtgcggaagtgatttcagtattacagaaatactctgaatggacatcgccagctgaagacagttccccagggataagcctgtccagcagcagaggccccggaagaagtgccgctgaggagctygacgaggaaataccyrtatcttcccactactttgcaagtaaaaccagaaatgaaaggaagaggaaaaagatgccagcctcccaaaggtctaagaggagaaaaactgcttccagtggttccaaggcaaagggggggtctgccacatgtagaaagatatcttccaaaacgaaatcctccagcatcattggatccagttcagcctcacatacttctcaagcgacatcaggagccaatagcaaattggggattatggctccaccgaagcctataaatagaccgtttcttaagccttcatatgcattctcataacaaccgaatctcaatgtacatagaccctctttcttgtttgtcagcatctgaccatctgtgactataaagctgttattcttgttataccatttgaagtttttactcgtctctattaatatttaaataaatgctggggggtgatagttcttctttttaaaataaacattttcttttgaataagcatgttttgctgccgctgcaagtgttgtggccgttgtttctcagaacgtctgaggcagcagctgaatcatctcagtgcaagagcttctgagcataacacgaaacccagaagccaaaggaagagccacgcgtgggcccttgtgaaactaaagcttttcgtgtaagacaacacaaacaaaatttaaagacaaatgacggggaaaagaggagaaaatatattacaaaggattagtatccatcataccaaatacccgtgaaccagtcagaaacatcccagggggcaggtggaccaaggatgtgaacaggctagtctcagaagaagaaatacacatgctcatggcccggcactgtggctcacgcctgggatcccagcackttgggaggccgaggcaggtggatcacgaggtcaggagtttgagaccagcctgcccaacatggtgaaaccccgtctctactaaa

SEQ ID NO: 5902 - DNA, 922 bp, Homo sapiens
ttaattttccatgataaataaaaatctataaaataataaacaagagaaaagagattggaaacagccaggttggagcagtgagtgagtaaggaaacctggctgccctctccagattccccaggctctcagagaagatcagcagaaagtctgcaagaccctaagaaccatcagccctcagctgcacctcctcccctccaaggatgacaaaggcgctactcatctatttggtcagcagctttcttgccctaaatcaggccagcctcatcagtcgctgtgacttggcccaggtgctgcagctggaggacttggatgggtttgagggttactccctgagtgactggctgtgcctggcttttgtggaaagcaagttcaacatatcaaagataaatgaaaatgcrgayggaagctttgactatggcctcttccagatcaacagccactactggtgcaacgattataagagttactcggaaaacctttgccacgtagactgtcaagatctgctgaatcccaaccttcttgcaggcatccactgcgcaaaaagkattgtgtccggagcacgggggatgaacaactgggtagaatggaggttgcactgttcaggcsggccactctyctactggctgacaggatgccgcctgagatgaaacagggtgcgggtgcaccgtggagtcattccaagactcctgtcctcactcarggattcttcatttcttcttcctactgcctccacttcatgttattttcttcccttcccatttacaactaaaactgaccagagccccaggaataaatggttttcttggcttcctccttactcccatctggacccagtcccctggttcctgtctgttatttgtaaactgaggaccacaataaagaaatctttatatttatcgaaatattaaagcactcgctctgc

SEQ ID NO: 5903 - DNA, 3478 bp, Homo sapiens
cgtggcgggttgtggtaggtcgtggtctgaggccggtacagctgcgcgtctgcgggaataggtgcagcgggcccttggcgggggactctgagggaggagctggggacggcgaccctaggagagttctttggggtgactttcaagatggactctactctaacagcaagtgaaatccggcagcgatttatagatttcttcaagaggaacgagcatacgtatgttcactcgtctgccaccatcccattggatgaccccactttgctctttgccaatgcaggcatgaaccagtttaaacccattttcctgaacacaattgacccatctcaccccatggcaaagctgagcagagctgccaatacccagaagtgcatccgggctgggggcaaacataatgacctggacgatgtgggcaaggatgtctatcatcacaccttcttcgagatgctgggctcttggtcttttggagattactttaaggaattggcatgtaagatggctctggaactcctcacccaagagtttggcattcccattgaaagactttatgttacttactttggcggggatgaagcagctggcttagaagcagatctggaatgcaaacagatctggcaaaatttggggctggatgacaccaaaatcctcccaggcaacatgaaggataacttctgggagatgggtgacacgggcccctgtggtccttgcagtgagatscactacgaccggattggtggtcgggacgccgcacatcttgtcaaccaggacgaccctaatgtgctggagatctggaaccttgtgttcatccagtataacagggaagctgatggcattctgaaacctcttcccaagaaaagcattgacacagggatgggcctggaacgactggtatctgtgctgcagaataagatgtccaactatgacactgacctttttgtcccttactttgaagccattcagaagggcacagrtgcccgaccatacactgggaaagttggtgctgaggatgccgatgggattgacatggcctaccgggtgctggctgaccaygctcggaccatcactgtggcactggctgatggtggccggcctgacaacacagggcgtggatatgtgttgagacggattctccgccgagctgtccgatacgcccatgaaaagctcaatgccagcaggggcttctttgctacgttagtggatgttgtcgtccagtccctgggagatgcatttcctgagctgaagaaggacccagacatggtgaaggacatcattaatgaagaagaggtgcagtttctcaagactctcagcagagggcgtcgcatcctggacaggaaaattcagagcctgggagacagcaagaccattcccggagacactgcttggctcctctatgacacctatgggtttccagtggatctgactggactgattgctgaagagaagggcctggtggtagacatggatggctttgaagaggagaggaaactggcccagctgaaatcacagggcaagggagctggtggggaagacctcattatgctggacatttacgctatcgaagagctccgggcacggggtctggaggtcacagatgattccccaaagtacaattaccatttggactccagtggtagctatgtatttgagaacacagtggctacggtgatggctctgcgcagggagaagatgttcgtggaagaggtgtccacaggccaggagtgtggagtggtgctggacaagacctgtttctatgctgagcaaggaggccagatctatgacgaaggctacctggtgaaggtggatgacagcagtgaagataaaacagagtttacagtgaagaatgctcaggtccgaggagggtatgtgctacacattggaaccatctacggtgacctgaaagtgggggatcaggtctggctgtttattgatgagccccgacgaagacccatcatgagcaaccacacagctacgcacattctgaacttcgccctgcgctcagtgcttggggaagctgaccagaaaggctcattggttgctcctgaccgcctcagatttgactttactgccaagggagccatgtccacccaacagatcaagaaggctgaagagattgctaatgagatgattgaggcagccaaggccgtctatacccaggattgccccctggcagcagcgaaagccatccagggcctacgggctgtgtttgatgagacctatcctgaccctgtgcgagtcgtctccattggggtcccggtgtccgagttgctggatgacccctctgggcctgctggctccctgacttctgttgagttctgtgggggaacgcacctgcggaactcgagtcatgcaggagcttttgtgatcgtgacggaagaagccattgccaagggtatccggaggattgtggctgtcacaggtgccgaggcccagaaggccctcaggaaagcagagagcttgaagaaatgtctstctgtcatggaagccaaagtgaaggctcagactgctccaaacaaggatgtgcagagggagatcgctgaccttggagaggccctggccactgcagtcatcccccagtggcagaaggatgaattgcgggagactctcaaatccctaaagaaggtcatggatgacttggaccgagccagcaaagccgatgtccagaaacgagtgttagagaagacgaagcagttcatcgacagcaaccccaaccagcctcttgtcatcctggagatggagagcggcgcctcagccaaggccctgaatgaagccttgaagctcttcaagatgcactcccctcagacttctgccatgctcttcacggtggacaatgaggctggcaagatcacgtgcctgtgtcaagtyccccagaatgcagccaatcggggcttaaaagccagcgagtgggtgcagcaggtgtcaggcttgatggacggtaaaggtggtggcaaggatgtgtctgcacaggccacaggcaagaacgttggctgcctgcaggaggcgctgcagctggccacttccttcgcccagctgcgcctcggggatgtaawgaactgagtggggaaggaggaggctcccactggatccatccgtccagccaagagctcttcatctgctacaagaacatttgwatcttgggacctttaaagagcccctcctaacccagcagtaactggaacacacttgggagcagtcctatgtctcagtgccccttaaatttytgccctgagccctccacgtcagtgccatcggtctagaaccactaaccccgcattgctgttgatcgtcacgctcgcatctatagataacggctctccagacctgagctttccgcgtcagcaagtaggaatcgtttttgctgcagagaataaaaggaccacgtgcaatacttaatgccgcatgatctctatccctcttcccaataggggctggctcttttgacagcctttggcgtctgtagaataaatgctgtggctcctgctgg

SEQ ID NO: 5904 - DNA, 1808 bp, Homo sapiens
tctgtactaaaaatacaaaaattaggagtggtggcgggcacctgtatccaagctacttgggtggctgaggcaagagaatcatttgaaactgggaggcagaggttgtggtgagccaagatcacaccattgcactccagcctgaacaacagaacaggactctgtctcaaaacaaacaaacaaaaaaaactatactatcttcaaagaatgaggatgaattaatgaacatttgaggttctctgaactgagaaataaagcctgtttaaggggttgtggtaagattttaaaagtaatcctccaaaattgtcacctagtgagcagaatacaaaaatggagcttaagttccactacaagaccaaaactgtcacgtagagcctaagggtaagactgtattggatattagggaccacaaagcactttcatgtttacctcatttgattttcacagcaactgtgtggggagaatcatccccatttgagaactgagaacactcaggctcagcgagctggtgtcccgcttggtgtcagaatactctcaagcccaggctttccctgactgtcaacccattcctgcttctcttgtccgctagtgtgaccccccagccaagggctgccagggcctctttcactatggactttgtgttctgccattcaggcacctgcggaactcgagtcatgcaggagcttttgtgatcgtgacggaagaagccattgccaagggtatccggaggattgtggctgtcacaggtgccgaggcccagaaggccctcaggaaagcagagagcttgaagaaatgtctstctgtcatggaagccaaagtgaaggctcagactgctccaaacaaggatgtgcagagggagatcgctgaccttggagaggccctggccactgcagtcatcccccagtggcagaaggatgaattgcgggagactctcaaatccctaaagaaggtcatggatgacttggaccgagccagcaaagccgatgtccagaaacgagtgttagagaagacgaagcagttcatcgacagcaaccccaaccagcctcttgtcatcctggagatggagagcggcgcctcagccaaggccctgaatgaagccttgaagctcttcaagatgcactcccctcagacttctgccatgctcttcacggtggacaatgaggctggcaagatcacgtgcctgtgtcaagtyccccagaatgcagccaatcggggcttaaaagccagcgagtgggtgcagcaggtgtcaggcttgatggacggtaaaggtggtggcaaggatgtgtctgcacaggccacaggcaagaacgttggctgcctgcaggaggcgctgcagctggccacttccttcgcccagctgcgcctcggggatgtaawgaactgagtggggaaggaggaggctcccactggatccatccgtccagccaagagctcttcatctgctacaagaacatttgwatcttgggacctttaaagagcccctcctaacccagcagtaactggaacacacttgggagcagtcctatgtctcagtgccccttaaatttytgccctgagccctccacgtcagtgccatcggtctagaaccactaaccccgcattgctgttgatcgtcacgctcgcatctatagataacggctctccagacctgagctttccgcgtcagcaagtaggaatcgtttttgctgcagagaataaaaggaccacgtgcaatacttaatgccgcatgatctctatccctcttcccaataggggctggctcttttgacagcctttggcgtctgtagaataaatgctgtggctcctgctgg

SEQ ID NO: 5905 - DNA, 1952 bp, Homo sapiens
atgagtgccatcacagtggcccttctcagcctcttgtttatcaccagtgggaccattgaaaaccacaaagatttaggaggccattttttttcaaccacccaaagccctccagccacccagggctccacagcygcccaacgctccacagccacccagcattccacagccacccagagctccacagccactcaaacttctccagtgcctttaaccccagagtctcctctatttcagaacttcagtggctaccatattggtgttggacgagctgactgcacaggacaagtagcagatatcaatttgatgggctatggcaaatccggccagaatgcacagggcatcctcaccaggctatacagtcgtgccttcatcatggcagaacctgatgggtccaatcgaacagtgtttgtcagcatcgacataggcatggtatcmcaaaggctcaggctggaggtcctgaacagactgcagagtaaatatggctccctgtacagaagagataatgtcatcctgagtggcactcacactcattcaggtcctgcaggatatttccagtataccgtgtttgtaattgccagtgaaggatttagcaatcaaacttttcagcacatggtcactggtatcttgaagagcattgacatagcacacacaaatatgaaaccaggcaaaatcttcatcaataaaggaaatgtggatggtgtgcagatcaacagaagtccgtattcttaccttcaaaatccgcagtcagagagagcaaggtattcttcaaatacagacaaggaaatgatagttttgaaaatggtagatttgaatggagatgacttgggccttatcagctggtttgccatccacccggtcagcatgaacaacagtaaccatcttgtaaacagtgacaatgtgggctatgcatcttacctgcttgagcaagagaagaacaaaggatatctacctggacaggggccatttgtagcagcctttkcttcatcaaacctaggagatgtgtcccccaacattcttggaccacgttgcatcaacacaggagagtcctgtgataacgccaatagcacttgtcccattggtgggcctagcatgtgcattgctaagggacctggacaggatatgtttgacagcacacaaattataggacgggccatgtatcagagagcaaaggaactctatgcctctgcctcccaggaggtaacaggaccactggcttcagcacaccagtgggtggatatgacagatgtgactgtctggctcaattccacacatgcatcaaaaacatgtaaaccagcattgggctacagttttgcrgctggcactattgatggagttggaggcctcaattttacacaggggaaaacagaaggggatccattttgggacaccattcgggaccagatcctgggaaagccatctgaagaaattaaagaatgtcataaaccaaagcccatccttcttcacaccggagaactatcaaaacctcacccctggcatccagacattgttgatgttcagattattacccttgggtccttggccataactgccatccccggggagtttacgaccatgtctggacgaagacttcgagaggcagttcaagcagaatttgcatctcatgggatgcagaacatgactgttgttatttcaggtctatgcaaygtctatacacattacattaccacttatgaagaataccaggctcagcgatatgaggcagcatcgacaatttatggaccrcacrcattatctgcttacattcagctcttcagaaaccttgctaaggctattgctacggacayggtagccaacctgagcagaggtccagaacctccctttttcaaacaattaatagttccattaattcctagtattgtggatagagcaccaaaaggcagaactttcggggatgtcctgcagccagcaaaacctgaatacagagtggtaag

SEQ ID NO: 5906 - DNA, 1956 bp, Homo sapiens
atgagtgccatcacagtggcccttctcagcctcttgtttatcaccagtgggaccattgaaaaccacaaaggcaagtgaggccattttttttcaaccacccaaagccctccagccacccagggctccacagctgcccaacgctccacagccacccagcattccacagccacccagagctccacagccactcaaacttctccagtgcctttaaccccagagtctcctctatttcagaacttcagtggctaccatattggtgttggacgagctgactgcacaggacaagtagcagatatcaatttggcaaatgggctatggcaaatccggccagaatgcacagggcatcctcaccaggctatacagtcgtgccttcatcatggcagaacctgatgggtccaatcgaacagtgtttgtcagcatcgacataggcatggtatcacaaaggctcaggctggaggtcctgaacagactgcagagtaaatatggctccctgtacagaagagataatgtcatcctgagtggcactcacactcattcaggtcctgcaggatatttccagtataccgtgtttgtaattgccagtgaaggatttagcaatcaaacttttcagcacatggtcactggtatcttgaagagcattgacatagcacacacaaatatgaaaccaggcaaaatcttcatcaataaaggaaatgtggatggtgtgcagatcaacagaagtccgtattcttaccttcaaaatccgcagtcakagagagcaaggtattcttcaaatacagacaaggaaatgatagttttgaaaatggtagatttgaatggagatgacttgggccttatcagctggtttgccatccacccggtcagcatgaacaacagtaaccatcttgtaaacagtgacaatgtgggctatgcatcttacctgcttgagcaagagaagaacaaaggatatctacctggacaggggccatttgtagcagcctttgcttcatcaaacctaggagatgtgtcccccaacattcttggaccacgttgcatcaacacaggagagtcctgtgataacgccaatagcacttgtcccattggtggrcctagcatgtgcattgctaagggacctggacaggatatgtttgacagcacacaaattataggacgggccatgtatcagagagcaaaggaactctatgcctctgcctcccaggaggtaacaggaccactggcttcagcacaccagtgggtggatatgacagatgtgactgtctggctcaattccacacatgcatcaaaaacatgtaaaccagcattgggctacagttttgcggctggcactattgatggagttggaggcctcaattttacacaggggaaaacagaaggggatccattttgggacaccattcgggaccagatcctgggaaagccatctgaagaaattaaagaatgtcataaaccaaagcccatccttcttcacaccggagaactatcaaaacctcacccctggcatccagacattgttgatgttcagattattacccttgggtccttggccataactgccatccccggggagtttacgaccaygtctggacgaagacttcgagaggcagttcaagcagaatttgcatctcatgggatgcagaacatgactgttgttatttcaggtctatgcaacgtctatacacattacattaccacttatgaagaataccaggctcagcgatatgaggcagcatcgacaatttatggaccgcacacattatctgcttacattcagctcttcagaaaccttgctaaggctattgctacggacacggtagccaacctgagcagaggtccagaacctccctttttcaaacaattaatagttccattaattcctagtattgtggatagagcaccaaaaggcagaactttcggggatgtcctgcagccagcaaaacctgaatacagagtggtaag

SEQ ID NO: 5907 - DNA, 1619 bp, Homo sapiens
ttgtaacagaaaattaaaatatactccactcaagggaattctgtactttgccctttgggtaaagtctcatttacatttctaaacctttcttaagaaaatcgaatttcctttgatctctcttctgaattgcagaaatcagataaaaactacttggtgaaatgacttcttgtcacattgctgaagaacatatacaaaaggttgctayctttggaggaacccmtgggaatgrgctaaccrgagtatttctggttaagcattggctagagaatggcgctgagattcagagaacagggctggaggtaaaaccatttattactaaccccagarcagtgaagaagtgtaccagatatattgactgtgacctgaatcgcatttttgaccttgaaaatcttggcaaaaaaatgtcagaagatttgccatatgaagtgagaagggctcaagaaataaatcatttatttggtccaaaagacagtgaagattcctakgacattatttttkamcttcacaacaccacctctaacatggrgtgcactcttattcttgaggattccaggaataactttttaattcagatgtttcattacaytaagacttctctggctccactaccctgctacgtttatctgattgagcatccttccctcaaatatgcgaccactcgttccatagccaagtatcctgtgggtatagaagttggtcctcagcctcaaggggttctgagagctgatatcttggatcaaakgagaaaaatgattaaacatgctcttgattttatacatcatttcaatgaaggaaaagaatttcctccctgmgccattgaggtctataaaattatagagaaagttgattrhccccgggatgaaaatggagaaattgctgctatcatccatcctaatctgcaggwtcaagactggaaaccactgcatcctggggatcccatgtttttaactcttgatgggaagacgatcccactgggcrgagactgtaccgtgtacyycgtgtttgtgaatgmggccrcatattacgaaaagaaagaagcttytgcaaagacaactaaactaacgctcaatgmaaaaagtattcgctgctgtttacattrgaartcacttccagcttacatcttacacggtgtcttacaaattctgctagtctgtaagctccttaagagtagggttgtgccttattcaactgcatacatagctcctagcacagtgccttattcggtaggcatctaagcamatttcttaaattaattaatatatctttaaagatatcatattttatgtatgtagcttattcaaagaagtgtttcctatttctatatagtttattatacatgatacttgggtagctcaacattcttaataaacagcctttgtattcagaatataaaattgaaatagatatatataaagttatttgttttattgtgctttgccttactacacttcacggatactgtactttttttccaaattgaaggtttttggcaaccctgtgtctagaaagtctaacagtgccatgtttccaacagcatgtgctcactccttgtctctgtgtcaccctttgataatatttcaagcttttttatgatttatttattatatctgctatggtga

SEQ ID NO: 5908 - DNA, 1007 bp, Homo sapiens
acaagctggtcttttgggccacccaggggcgtgtttgctctgcactctcccatgaacctgcaggcgtgggaacgtttcttttccctcgtggctgttgaggtgtggttcactaactggaaacgcacacgtgtggctcagctgatggtctcaggctcagctgccctgcccctcccagtgctggagaagtggaagaacatcacgggccacaccctgctggagcggtatggcatgaccgagatcggcatggctctgtccgggcccctgaccactgccrtgcgcctgccaggatgtgctggttttgtccagtgccaccggccacagtcaccacgtaatatggacggaatgagcaaagcccggctcgctgaggctgcaggctgcaggcaagtgaggactgaaagggtaacgggctctgggctttgtcctctctttgttccggacarcccctgcgatggggtcatattttgcactcacatacaagaacccatgagcctgcccacggtcacgcggctggtgagtgatgcacttcccaggagcacggtgrcctcttcratggccctcactagagaagatggacagtgcccccctagccttttttactggaacagatacaaggctgagaagctgaaatcaggagcagcccagggaccactgtctacaccgagggagtcatgagcagcccagggaccactgtctacacccagggagtcaggagcagcccggggactgctgtctacaccgaggrtgtcaggagcagcccagggaccactgtctacactgagagcgtcaggagcagcccagggaccgccgtccacaccaagagcgccaaggagcagcccagggaccgccgtccacaccgagggcgccaaggagcagatagtagcccagagacccaggggaggctcascttccccacgctggaatcagaactcctaggcgaacaggaaggagccccagacagatggcacagggagaggagtccccggctgaggagggggatccagagaccc

SEQ ID NO: 5909 - DNA, 3778 bp, Homo sapiens
gccccgcctcggccggggcgtgggctccggctgcagctccggtcygctctcttggctcsggaacccccgcgggcgctggctccgtctgccagggatgacggcgacccctgagagcctcttccccactggggacgaactggactccagccagctccagatggagtccgatgaggtggacaccctgaaggagggagaggacccagccgaccggatgcacccgtttctggccatctatgagcttcagtctctgaaagtgcaccccttggtgttcgcacctggggtccctgtcacagcccaggtggtgggcaccgaaagatataccagcggatccaaggtgggaacctgcactctgtattctgtccgcttgactcacggcgacttttcctggacaaccaagaagaaataccgtcattttcaggagctgcatcgggacctcctgagacacaaagtcttgatgagtctgctccctctggctcgwtttgccgttgcctattctccagcccgagatgcaggcaacagagagatgccctctctaccccgggcaggtcctgagggctccaccagacatgcagccagcaaacaggtgggaccagatgccaggtcctccgggaaggcattggaggtgcaaatggctcggtcccatctgtctctctctctctctcatctccacttcagaaatacctggagaattacctcaacygtctcttgaccatgtctttctatcgcaactaccatgccatgacagagttcctggaagtcagtcagctgtcctttatcccggacttgggccgcaaaggactggaggggatgatccggaagcgctcaggtggccaccgtgttcctggcctcacctgctgtggccgagaccaagtttgttatcgctggtccaagaggtggctggtggtgaaggactccttcctgctgtacatgtgcctcgagacaggtgccatctcatttgttcagctctttgaccctggctttgaggtgcaagtggggaaaaggagcacggaggcacggyacggcgtgcggatcgatacctcccacaggtccttgattctcaagtgcagcagctaccggcaggcacggtggtgggcccaagagatcactgagctggcrcagggcccaggcagagacttcctacagctgcaccggcatgacagctacgccccaccccggcctgggaccttggcccggtggtttgtgaatggggcaggttactttgctgctgtggcagatgccatccttcgagctcaagaggagattttcatcacagactggtggttgagtcctgaggtttacctgaagcgtccggcccattcagatgactggagactggacattatgctcaagaggaaggcggaggarggtgtccgtgtgtctattctgctgtttaaagaagtggaattggccttgggcatcaacagtggctatagcaagagggcgctgatgctgctgcaccccaacataaaggtgatgcgtcacccagaccaagtgacgttgtgggcccatcatgagaagctcctggtggtggaccaagtggtagcattcctggggggactggaccttgcctatggccgctgggatgacctgcactaccgactgactgaccttggagactcctctgaatcagctgcctcccagtgctcctctctttggccctggctctgtacagccccatgacttmcccttgcccctggcttgggtgtgttccccctacagcctcccaccccgcgcccagactcaccagccaccccagacctctctcacaaccaattcttctggctgggcaaggactacagcaatcttatcaccaaggactgggtgcagctggaccggcctttcgaaggggctggaggtagggagggagccagggcagattggcacctcctgctgactctgccatccctccacgtcagaccaccaaggccaagtacaagactcccayatacccctacctgcttcccaagtctaccagcacggccaatcagctccccttcacacttccaggagggcagtgcaccaccrtacaggtcttgcgatcagtggaccgctggtcagcagggactctggagaactccatcctcaatgcctacctgcacaccatcagggrgagccagcacttcctctacattgaggtctgactgggaggaggtgggggagagcatggaaggggtgtcccaggagagagacctggggaatgagtggagtcagtcattgagggctggtggagcagaagcagacgcctggagcctgggaccaaggctggaggccgaggacagggccaggggccaggctgctgatgtctgtctctgattcttgccccagaatcagttcttcattagctgctcagatgggcggacggttctgaacaaggtgggcgatgagattgtggacagaatcctgaaggcccacaaacaggggtggtgttaccgagtctacgtgcttttgcccttactccctggcttcgagggtgacatctccacgggcggtggcaactccatccaggccattctgcactttacttacaggaccctgtgtcgtggggagtattcaatcctgcatcgccttaaagcagccatggggacagcatggcgggactatatttccatctgcgggcttcgtacacacggagagctgggcgggcaccccgtctcggagctcatctacatccacagcaaggtgctcatcgcagatgaccggacagtcatcattggttctgcaaacatcaatgaccggagcttgctggggaagcgggacagtgagctggccgtgctratcgaggacacagagacggaaccatccctcatgaatgggrcagagtatcaggcgggcaggtttgccttgagtctgcggaagcactgcttcrgtgtgattcttggagcaaatacccggccagacttggatctccgagaccccatctgtgatgacttcttccagttgtggcaagacatggctgagagcaacgccaatatctatgagcagatyttccgctgcctgccatccaatgccacgcgttccctgcggactctccgggagtacgtggccgtggagcccttggccacggtcagtccccccttggctcggtctgagctcacccaggtccaggrccacctggtccacttccccctcaagttcctagaggatgagtctttgctgcccccgctgggtagcaaggagggcatgatccccckagaagtgtggacatagttgaggcccccgtcagggagaggtcaccagctgctgtgccccaccacgtctggctccctgccccttaaccccaaggactgagggcagtgccctttgagatctggggaggcaggcattcctgaagggaactagaggtgttacagmggacccttacgtgagaaatagctgaaaagggcactcccaaccctgggctggggaggaggagagagtcccagagctcatcccccctgctgcccagtgcaaaccacttctccatgctgcaaaggagaagcacagctcctgccagggtgagcagggtcaagcctcttattccaggagaagggggctctgccccaggccctactacccattgttcccttcctcttcctgcccttgaaccccctccctgtcccagggccctcccagcccattgctgccaaggtggagggaaggataaagccacttctggcttcagcccccmccaggggaaggaaggagggcacattaactccctccaccagcctgctgacagacactaactttgtatccgttcaataagcatttcataaataaaggtgtagaaaaggttcaw

SEQ ID NO: 5910 - DNA, 3434 bp, Homo sapiens
gccccgcctcggccggggcgtgggctccggctgcagctccggtcygctctcttggctcsggaacccccgcgggcgctggctccgtctgccagggatgacggcgacccctgagagcctcttccccactggggacgaactggactccagccagctccagatggagtccgatgaggtggacaccctgaaggagggagaggacccagccgaccggatgcacccgtttctggccatctatgagcttcagtctctgaaagtgcaccccttggtgttcgcacctggggtccctgtcacagcccaggtggtgggcaccgaaagatataccagcggatccaaggtgggaacctgcactctgtattctgtccgcttgactcacggcgacttttcctggacaaccaagaagaaataccgtcattttcaggagctgcatcgggacctcctgagacacaaagtcttgatgagtctgctccctctggctcwwtttgccgttgcctattctccagcccgagatgcaggcaacagagagatgccctctctaccccgggcaggtcctgagggctccaccagacatgcagccagcaaacagaaatacctggagaattacctcaacygtctcttgaccatgtctttctatcgcaactaccatgccatgacagagttcctggaagtcagtcagctgtcctttatcccggacttgggccgcaaaggactggaggggatgatccggaagcgctcaggtggccaccgtgttcctggcctcacctgctgtggccgagaccaagtttgttatcgctggtccaagaggtggctggtggtgaaggactccttcctgctgtacatgtgcctcgagacaggtgccatctcatttgttcagctctttgaccctggctttgaggtgcaagtggggaaaaggagcacggaggcacggyacggcgtgcggatcgatacctcccacaggtccttgattctcaagtgcagcagctaccggcaggcacggtggtgggcccaagagatcactgagctggcrcagggcccaggcagagacttcctacagctgcaccggcatgacagctacgccccaccccggcctgggaccttggcccggtggtttgtgaatggggcaggttactttgctgctgtggcagatgccatccttcgagctcaagaggagattttcatcacagactggtggttgagtcctgaggtttacctgaagcgtccggcccattcagatgactggagactggacattatgctcaagaggaaggcggaggarggtgtccgtgtgtctattctgctgtttaaagaagtggaattggccttgggcatcaacagtggctatagcaagagggcgctgatgctgctgcaccccaacataaaggtgatgcgtcacccagaccaagtgacgttgtgggcccatcatgagaagctcctggtggtggaccaagtggtagcattcctggggggactggaccttgcctatggccgctgggatgacctgcactaccgactgactgaccttggagactcctctgaatcagctgcctcccagcctcccaccccgcgcccagactcaccagccaccccagacctctctcacaaccaattcttctggctgggcaaggactacagcaatcttatcaccaaggactgggtgcagctggaccggcctttcgaagatttcattgacagggagacgacccctcggatgccatggcgggacgttggggtggtcgtccatggcctaccggcccgggaccttgcccggcacttcatccagcgctggaacttcaccaagaccaccaaggccaagtacaagactcccayatacccctacctgcttcccaagtctaccagcacggccaatcagctccccttcacacttccaggagggcagtgcaccaccrtacaggtcttgcgatcagtggaccgctggtcagcagggactctggagaactccatcctcaatgcctacctgcacaccatcagggrgagccagcacttcctctacattgagaatcagttcttcattagctgctcagatgggcggacggttctgaacaaggtgggcgatgagattgtggacagaatcctgaaggcccacaaacaggggtggtgttaccgagtctacgtgcttttgcccttactccctggcttcgagggtgacatctccacgggcggtggcaactccatccaggccattctgcactttacttacaggaccctgtgtcgtggggagtattcaatcctgcatcgccttaaagcagccatggggacagcatggcgggactatatttccatctgcgggcttcgtacacacggagagctgggcgggcaccccgtctcggagctcatctacatccacagcaaggtgctcatcgcagatgaccggacagtcatcattggttctgcaaacatcaatgaccggagcttgctggggaagcgggacagtgagctggccgtgctratcgaggacacagagacggaaccatccctcatgaatgggrcagagtatcaggcgggcagtgtgattcttggagcaaatacccggccagacttggatctccgagaccccatctgtgatgacttcttccagttgtggcaagacatggctgagagcaacgccaatatctatgagcagatyttccgctgcctgccatccaatgccacgcgttccctgcggactctccgggagtacgtggccgtggagcccttggccacggtcagtccccccttggctcggtctgagctcacccaggtccaggrccacctggtccacttccccctcaagttcctagaggatgagtctttgctgcccccgctgggtagcaaggagggcatgatccccckagaagtgtggacatagttgaggcccccgtcagggagaggtcaccagctgctgtgccccaccacgtctggctccctgccccttaaccccaaggactgagggcagtgccctttgagatctggggaggcaggcattcctgaagggaactagaggtgttacagmggacccttacgtgagaaatagctgaaaagggcactcccaaccctgggctggggaggaggagagagtcccagagctcatcccccctgctgcccagtgcaaaccacttctccatgctgcaaaggagaagcacagctcctgccagggtgagcagggtcaagcctcttattccaggagaagggggctctgccccaggccctactacccattgttcccttcctcttcctgcccttgaaccccctccctgtcccagggccctcccagcccattgctgccaaggtggagggaaggataaagccacttctggcttcagcccccmccaggggaaggaaggagggcacattaactccctccaccagcctgctgacagacactaactttgtatccgttcaataagcatttcataaataaaggtgtagaaaaggttcat

SEQ ID NO: 5911 - DNA, 3467 bp, Homo sapiens
gccccgcctcggccggggcgtgggctccggctgcagctccggtcygctctcttggctcsggaacccccgcgggcgctggctccgtctgccagggatgacggcgacccctgagagcctcttccccactggggacgaactggactccagccagctccagatggagtccgatgaggtggacaccctgaaggagggagaggacccagccgaccggatgcacccgtttctggccatctatgagcttcagtctctgaaagtgcaccccttggtgttcgcacctggggtccctgtcacagcccaggtggtgggcaccgaaagatataccagcggatccaaggtgggaacctgcactctgtattctgtccgcttgactcacggcgacttttcctggacaaccaagaagaaataccgtcattttcaggagctgcatcgggacctcctgagacacaaagtcttgatgagtctgctccctctggctcwwtttgccgttgcctattctccagcccgagatgcaggcaacagagagatgccctctctaccccgggcaggtcctgagggctccaccagacatgcagccagcaaacagaaatacctggagaattacctcaacygtctcttgaccatgtctttctatcgcaactaccatgccatgacagagttcctggaagtcagtcagctgtcctttatcccggacttgggccgcaaaggactggaggggatgatccggaagcgctcaggtggccaccgtgttcctggcctcacctgctgtggccgagaccaagtttgttatcgctggtccaagaggtggctggtggtgaaggactccttcctgctgtacatgtgcctcgagacaggtgccatctcatttgttcagctctttgaccctggctttgaggtgcaagtggggaaaaggagcacggaggcacggyacggcgtgcggatcgatacctcccacaggtccttgattctcaagtgcagcagctaccggcaggcacggtggtgggcccaagagatcactgagctggcrcagggcccaggcagagacttcctacagctgcaccggcatgacagctacgccccaccccggcctgggaccttggcccggtggtttgtgaatggggcaggttactttgctgctgtggcagatgccatccttcgagctcaagaggagattttcatcacagactggtggttgagtcctgaggtttacctgaagcgtccggcccattcagatgactggagactggacattatgctcaagaggaaggcggaggarggtgtccgtgtgtctattctgctgtttaaagaagtggaattggccttgggcatcaacagtggctatagcaagagggcgctgatgctgctgcaccccaacataaaggtgatgcgtcacccagaccaagtgacgttgtgggcccatcatgagaagctcctggtggtggaccaagtggtagcattcctggggggactggaccttgcctatggccgctgggatgacctgcactaccgactgactgaccttggagactcctctgaatcagctgcctcccagcctcccaccccgcgcccagactcaccagccaccccagacctctctcacaaccaattcttctggctgggcaaggactacagcaatcttatcaccaaggactgggtgcagctggaccggcctttcgaagatttcattgacagggagacgacccctcggatgccatggcgggacgttggggtggtcgtccatggcctaccggcccgggaccttgcccggcacttcatccagcgctggaacttcaccaagaccaccaaggccaagtacaagactcccayatacccctacctgcttcccaagtctaccagcacggccaatcagctccccttcacacttccaggagggcagtgcaccaccrtacaggtcttgcgatcagtggaccgctggtcagcagggactctggagaactccatcctcaatgcctacctgcacaccatcagggrgagccagcacttcctctacattgagaatcagttcttcattagctgctcagatgggcggacggttctgaacaaggtgggcgatgagattgtggacagaatcctgaaggcccacaaacaggggtggtgttaccgagtctacgtgcttttgcccttactccctggcttcgagggtgacatctccacgggcggtggcaactccatccaggccattctgcactttacttacaggaccctgtgtcgtggggagtattcaatcctgcatcgccttaaagcagccatggggacagcatggcgggactatatttccatctgcgggcttcgtacacacggagagctgggcgggcaccccgtctcggagctcatctacatccacagcaaggtgctcatcgcagatgaccggacagtcatcattggttctgcaaacatcaatgaccggagcttgctggggaagcgggacagtgagctggccgtgctratcgaggacacagagacggaaccatccctcatgaatgggrcagagtatcaggcgggcaggtttgccttgagtctgcggaagcactgcttcrgtgtgattcttggagcaaatacccggccagacttggatctccgagaccccatctgtgatgacttcttccagttgtggcaagacatggctgagagcaacgccaatatctatgagcagatyttccgctgcctgccatccaatgccacgcgttccctgcggactctccgggagtacgtggccgtggagcccttggccacggtcagtccccccttggctcggtctgagctcacccaggtccaggrccacctggtccacttccccctcaagttcctagaggatgagtctttgctgcccccgctgggtagcaaggagggcatgatccccckagaagtgtggacatagttgaggcccccgtcagggagaggtcaccagctgctgtgccccaccacgtctggctccctgccccttaaccccaaggactgagggcagtgccctttgagatctggggaggcaggcattcctgaagggaactagaggtgttacagmggacccttacgtgagaaatagctgaaaagggcactcccaaccctgggctggggaggaggagagagtcccagagctcatcccccctgctgcccagtgcaaaccacttctccatgctgcaaaggagaagcacagctcctgccagggtgagcagggtcaagcctcttattccaggagaagggggctctgccccaggccctactacccattgttcccttcctcttcctgcccttgaaccccctccctgtcccagggccctcccagcccattgctgccaaggtggagggaaggataaagccacttctggcttcagcccccmccaggggaaggaaggagggcacattaactccctccaccagcctgctgacagacactaactttgtatccgttcaataagcatttcataaataaaggtgtagaaaaggttcat

SEQ ID NO: 5912 - DNA, 1656 bp, Homo sapiens
cgggcaactgagggacccactcacgtgcagccgccattcgcgccgcttccagggcaagcacccagtcagggcctctcgctgcgcgccctagaccgcgcccgcccccacccaagtccctccctcagggtccaaaccggagcagtgccccggaccgcgcaggcctcgcagtaccgtgatgttgacgaacgttttcccggggacggcggcccagacggagggcgagtccttgtagcccacgatggccgcgtcctgacagccatggccatgcagaaaatctttgcccgggaaatcttggactccaggggcaaccccacggtggaggtggacctgcacacggccaagggccgattccgagcagctgtgcccagtggggcttccacgggtatctatgaggctctggaactaagagacggagacaaaggccgctacctggggaaaggagtcctgaaggctgtggagaacatcaacartactctgggccctgctctgctgcaaaaggcaaaaactaagcgttgyggatcaagaaaaagttgacaaatttatgattgagctagatgggaccgagaataagtccaagtttggggccaatgccatcctgggcgtgtccttggccgtgtgtaaggcgggagcagctgagaagggggtccccctgtaccgccacatcgcagatctcgctgggaaccctgacctcatactcccagtgccagccttcaatgtgatcaacgggggctcccatgctggaaacaagctggccatgcaggagttcatgattctgcctgtgggagccagctccttcaaggaagccatgcgcattggcgccgaggtctaccaccacctcaagggggtcatcaaggccaagtatgggaaggatgccaccaatgtgggtgatgaaggtggcttcgcacccaacatcctggagaacaatgaggccctggagctgctgaagacggccatccaggcggctggttacccagacaaggtggtgatcggcatggatgtggcagcatctgagttctatcgcaatgggaagtacgatcttgacttcaagtcgcctgatgatcccgcacggcacatcactggggagaagctyggagagctgtataagagctttatcaagaactatcctgtggtctccatcgaagacccctttgaccaggatgactgggccacttggacctccttcctctcgggggtgaacatccagattgtgggggatgacttgacagtcaccaaccccaagaggattgcccaggcyrttgagaagaaggcctgcaactgtctgctgctgaaggtcaaccagatcggctcggtgaccgaatcgatccaggcgtgcaaactggctcagtctaatggctggggggtgatggtgagccaccgctctgrggagactgaggacacattcattgctgaccttgtggtggggctctgcacaggacagatcaagactggcgccccctgccgctcggagcgtctggccaaatacaaccaactcatgaggatcgaggaggctcttggggacaaggcaatctttgctggacgcaagttccgtaacccgaaggccaagtgagaagctggaggctccaggactccactggacagacccaggtcttccagacctgcttcctgaaataaacactggtgccaaccaagacagct

SEQ ID NO: 5913 - DNA, 1540 bp, Homo sapiens
aggtcacagagcgcggacacccgcggggcttaacaggcggggctatttttcgaggcggaagaatactcaagttgcaagagtggcaactttttcaagaaggggaaagtcccacttcgggccctttgggtttcttcgcagtcagatccatggccatgcagaaaatctttgcccgggaaatcttggactccaggggcaaccccacggtggaggtggacctgcacacggccaagggccgattccgagcagctgtgcccagtggggcttccacgggtatctatgaggctctggaactaagagacggagacaaaggccgctacctggggaaaggagtcctgaaggctgtggagaacatcaacartactctgggccctgctctgctgcaaaagaaactaagcgttgyggatcaagaaaaagttgacaaatttatgattgagctagatgggaccgagaataagtccaagtttggggccaatgccatcctgggcgtgtccttggccgtgtgtaaggcgggagcagctgagaagggggtccccctgtaccgccacatcgcagatctcgctgggaaccctgacctcatactcccagtgccagccttcaatgtgatcaacgggggctcccatgctggaaacaagctggccatgcaggagttcatgattctgcctgtgggagccagctccttcaaggaagccatgcgcattggcgccgaggtctaccaccacctcaagggggtcatcaaggccaagtatgggaaggatgccaccaatgtgggtgatgaaggtggcttcgcacccaacatcctggagaacaatgaggccctggagctgctgaagacggccatccaggcggctggttacccagacaaggtggtgatcggcatggatgtggcagcatctgagttctatcgcaatgggaagtacgatcttgacttcaagtcgcctgatgatcccgcacggcacatcactggggagaagctyggagagctgtataagagctttatcaagaactatcctgtggtctccatcgaagacccctttgaccaggatgactgggccacttggacctccttcctctcgggggtgaacatccagattgtgggggatgacttgacagtcaccaaccccaagaggattgcccaggcyrttgagaagaaggcctgcaactgtctgctgctgaaggtcaaccagatcggctcggtgaccgaatcgatccaggcgtgcaaactggctcagtctaatggctggggggtgatggtgagccaccgctctgrggagactgaggacacattcattgctgaccttgtggtggggctctgcacaggacagatcaagactggcgccccctgccgctcggagcgtctggccaaatacaaccaactcatgaggatcgaggaggctcttggggacaaggcaatctttgctggacgcaagttccgtaacccgaaggccaagtgagaagctggaggctccaggactccactggacagacccaggtcttccagacctgcttcctgaaataaacactggtgccaaccaagacagct

SEQ ID NO: 5914 - DNA, 2199 bp, Homo sapiens
ggcgccgtgtgtcccccgccggtcggctggtatggctgcagaggagctcggggcagaccccgcactggccccagagccggcaaagtggagatctctaccgagggcagagacctacctccccgcagtgctacaagtggggcgccggaagagccccaggcgtgcagaagctcacaaaaggccacccgtcctcggtccattcatttttgttcactgttgattcagccccattcattgatgggctggggccgtgcgctgagcgcccacagtcgatggggaaaggggctctgaccgacagtccccacgccgggcgacaagtgctgtcccagcgttatcagtcgggcgccttgccagccgaaagggcctgtctaaattcgtttcctgtcccctaactcatcccggcgctggctggcctggagagggtaggatggggyggcgccgagaatggccgttatgaggaccctaagagccatggccatgcagaaaatctttgcccgggaaatcttggactccaggggcaaccccacggtggaggtggacctgcacacggccaagggccgattccgagcagctgtgcccagtggggcttccacgggtatctatgaggctctggaactaagagacggagacaaaggccgctacctggggaaaggagtcctgaaggctgtggagaacatcaacartactctgggccctgctctgctgcaaaagaaactaagcgttgyggatcaagaaaaagttgacaaatttatgattgagctagatgggaccgagaataagtccaagtttggggccaatgccatcctgggcgtgtccttggccgtgtgtaaggcgggagcagctgagaagggggtccccctgtaccgccacatcgcagatctcgctgggaaccctgacctcatactcccagtgccagccttcaatgtgatcaacgggggctcccatgctggaaacaagctggccatgcaggagttcatgattctgcctgtgggagccagctccttcaaggaagccatgcgcattggcgccgaggtctaccaccacctcaagggggtcatcaaggccaagtatgggaaggatgccaccaatgtgggtgatgaaggtggcttcgcacccaacatcctggagaacaatgaggccctggagctgctgaagacggccatccaggcggctggttacccagacaaggtggtgatcggcatggatgtggcagcatctgagttctatcgcaatgggaagtacgatcttgacttcaagtcgcctgatgatcccgcacggcacatcactggggagaagctyggagagctgtataagagctttatcaagaactatcctggtgaggcgttcgggtgtcccagtgttcctgcccgaatcccgtgcagctgcctaatatactgatttcagtgacctgctttgccatcgacttggatccttccaattcttagccccattaaaatccccatttaagctcttctgccctgtcacccctccatgaggctccttctgacctctagccgtgtctctgccctgtctctgccttgtctctgcyctgtctctgctctgtctctgcyctgtctctgcyctgtctctgccctgtctctgcyctgtctctgccctgtctctgccctgtctctgctctgtctctgccctgtctctgctccaaaccccaccagtggtctccatcgaagacccctttgaccaggatgactgggccacttggacctccttcctctcgggggtgaacatccagattgtgggggatgacttgacagtcaccaaccccaagaggattgcccaggcyrttgagaagaaggcctgcaactgtctgctgctgaaggtcaaccagatcggctcggtgaccgaatcgatccaggcgtgcaaactggctcagtctaatggctggggggtgatggtgagccaccgctctgrggagactgaggacacattcattgctgaccttgtggtggggctctgcacaggacagatcaagactggcgccccctgccgctcggagcgtctggccaaatacaaccaactcatgaggatcgaggaggctcttggggacaaggcaatctttgctggacgcaagttccgtaacccgaaggccaagtgagaagctggaggctccaggactccactggacagacccaggtcttccagacctgcttcctgaaataaacactggtgccaaccaagacagct

SEQ ID NO: 5915 - DNA, 1652 bp, Homo sapiens
gcgccgagaatggccgttatgaggaccctaagaggtgagaccctctcgccttctggggtggggggtcccgtcctttcccccactgaggacagaggcccgcccagcgatctgagcatgtgtggacgtcaatcttgcagcccctcttccaggccccctccccagccttgcagggctcaggttacccctggcctttcctaaaggtcactcattcctcttgacgtttgcaaaaggggaatgtaatcctggggtgggccatggccatgcagaaaatctttgcccgggaaatcttggactccaggggcaaccccacggtggaggtggacctgcacacggccaagggccgattccgagcagctgtgcccagtggggcttccacgggtatctatgaggctctggaactaagagacggagacaaaggccgctacctggggaaaggagtcctgaaggctgtggagaacatcaacartactctgggccctgctctgctgcaaaaggcaaaaactaagcgttgyggatcaagaaaaagttgacaaatttatgattgagctagatgggaccgagaataagtccaagtttggggccaatgccatcctgggcgtgtccttggccgtgtgtaaggcgggagcagctgagaagggggtccccctgtaccgccacatcgcagatctcgctgggaaccctgacctcatactcccagtgccagccttcaatgtgatcaacgggggctcccatgctggaaacaagctggccatgcaggagttcatgattctgcctgtgggagccagctccttcaaggaagccatgcgcattggcgccgaggtctaccaccacctcaagggggtcatcaaggccaagtatgggaaggatgccaccaatgtgggtgatgaaggtggcttcgcacccaacatcctggagaacaatgaggccctggagctgctgaagacggccatccaggcggctggttacccagacaaggtggtgatcggcatggatgtggcagcatctgagttctatcgcaatgggaagtacgatcttgacttcaagtcgcctgatgatcccgcacggcacatcactggggagaagctyggagagctgtataagagctttatcaagaactatcctgtggtctccatcgaagacccctttgaccaggatgactgggccacttggacctccttcctctcgggggtgaacatccagattgtgggggatgacttgacagtcaccaaccccaagaggattgcccaggcyrttgagaagaaggcctgcaactgtctgctgctgaaggtcaaccagatcggctcggtgaccgaatcgatccaggcgtgcaaactggctcagtctaatggctggggggtgatggtgagccaccgctctgrggagactgaggacacattcattgctgaccttgtggtggggctctgcacaggacagatcaagactggcgccccctgccgctcggagcgtctggccaaatacaaccaactcatgaggatcgaggaggctcttggggacaaggcaatctttgctggacgcaagttccgtaacccgaaggccaagtgagaagctggaggctccaggactccactggacagacccaggtcttccagacctgcttcctgaaataaacactggtgccaaccaagacagct

SEQ ID NO: 5916 - DNA, 1529 bp, Homo sapiens
aatgcgcagcctgagagggggtgagctgacactgtcccagctgccacctagactcggagctccatccaaacctccagcgaagacatcccaggtygggtgaatcttccagccctgggggtggaggtagtaaaggccatggccatgcagaaaatctttgcccgggaaatcttggactccaggggcaaccccacggtggaggtggacctgcacacggccaagggccgattccgagcagctgtgcccagtggggcttccacgggtatctatgaggctctggaactaagagacggagacaaaggccgctacctggggaaaggagtcctgaaggctgtggagaacatcaacartactctgggccctgctctgctgcaaaagaaactaagcgttgyggatcaagaaaaagttgacaaatttatgattgagctagatgggaccgagaataagtccaagtttggggccaatgccatcctgggcgtgtccttggccgtgtgtaaggcgggagcagctgagaagggggtccccctgtaccgccacatcgcagatctcgctgggaaccctgacctcatactcccagtgccagccttcaatgtgatcaacgggggctcccatgctggaaacaagctggccatgcaggagttcatgattctgcctgtgggagccagctccttcaaggaagccatgcgcattggcgccgaggtctaccaccacctcaagggggtcatcaaggccaagtatgggaaggatgccaccaatgtgggtgatgaaggtggcttcgcacccaacatcctggagaacaatgaggccctggagctgctgaagacggccatccaggcggctggttacccagacaaggtggtgatcggcatggatgtggcagcatctgagttctatcgcaatgggaagtacgatcttgacttcaagtcgcctgatgatcccgcacggcacatcactggggagaagctyggagagctgtataagagctttatcaagaactatcctgtggtctccatcgaagacccctttgaccaggatgactgggccacttggacctccttcctctcgggggtgaacatccagattgtgggggatgacttgacagtcaccaaccccaagaggattgcccaggcyrttgagaagaaggcctgcaactgtctgctgctgaaggtcaaccagatcggctcggtgaccgaatcgatccaggcgtgcaaactggctcagtctaatggctggggggtgatggtgagccaccgctctgrggagactgaggacacattcattgctgaccttgtggtggggctctgcacaggacagatcaagactggcgccccctgccgctcggagcgtctggccaaatacaaccaactcatgaggatcgaggaggctcttggggacaaggcaatctttgctggacgcaagttccgtaacccgaaggccaagtgagaagctggaggctccaggactccactggacagacccaggtcttccagacctgcttcctgaaataaacactggtgccaaccaagacagct

SEQ ID NO: 5917 - DNA, 1461 bp, Homo sapiens
tgacactgtcccagctgccacctagactcggagctccatccaaacctccagcgaagacatcccagccatggccatgcagaaaatctttgcccgggaaatcttggactccaggggcaaccccacggtggaggtggacctgcacacggccaagggccgattccgagcagctgtgcccagtggggcttccacgggtatctatgaggctctggaactaagagacggagacaaaggccgctacctggggaaaggagtcctgaaggctgtggagaacatcaacartactctgggccctgctctgctgcaaaagaaactaagcgttgyggatcaagaaaaagttgacaaatttatgattgagctagatgggaccgagaataagtccaagtttggggccaatgccatcctgggcgtgtccttggccgtgtgtaaggcgggagcagctgagaagggggtccccctgtaccgccacatcgcagatctcgctgggaaccctgacctcatactcccagtgccagccttcaatgtgatcaacgggggctcccatgctggaaacaagctggccatgcaggagttcatgattctgcctgtgggagccagctccttcaaggaagccatgcgcattggcgccgaggtctaccaccacctcaagggggtcatcaaggccaagtatgggaaggatgccaccaatgtgggtgatgaaggtggcttcgcacccaacatcctggagaacaatgaggccctggagctgctgaagacggccatccaggcggctggttacccagacaaggtggtgatcggcatggatgtggcagcatctgagttctatcgcaatgggaagtacgatcttgacttcaagtcgcctgatgatcccgcacggcacatcactggggagaagctyggagagctgtataagagctttatcaagaactatcctgtggtctccatcgaagacccctttgaccaggatgactgggccacttggacctccttcctctcgggggtgaacatccagattgtgggggatgacttgacagtcaccaaccccaagaggattgcccaggcyrttgagaagaaggcctgcaactgtctgctgctgaaggtcaaccagatcggctcggtgaccgaatcgatccaggcgtgcaaactggctcagtctaatggctggggggtgatggtgagccaccgctctgrggagactgaggacacattcattgctgaccttgtggtggggctctgcacaggacagatcaagactggcgccccctgccgctcggagcgtctggccaaatacaaccaactcatgaggatcgaggaggctcttggggacaaggcaatctttgctggacgcaagttccgtaacccgaaggccaagtgagaagctggaggctccaggactccactggacagacccaggtcttccagacctgcttcctgaaataaacactggtgccaaccaagacagct

SEQ ID NO: 5918 - DNA, 3427 bp, Homo sapiens
tgagggcgcaggcgccacggcccgtcgagctgggttccaaggcggctggcggcggtagcgtctctgtttccttgtgggcgctcgcgcggccctgggtagtctgtagagaatgccaaatgagggaatcccccactcaagtcaaactcaggagcaagactgtttacagagtcaacctgtcagtaataatgaagaaatggcaatcaagcaagaaagtggtggtgatggggaggtggaggagtacctstcctttcgttctgtgggtgacgggctgtccacctctgctgtggggtgcgcatcagcagctccgaggagagggccagccctgctgcacatcgaccgacatcagatccaggcagtagagcctagcgcccaggcccttgagctgcagggtttgggtgtggacgtctatgaccaggacgtgctggaacagggagtgcttcagcaggtggacaatgccatccatgaggccagccgtgcctcccagctcgttgacgtggagaaggagtatcggtcggtcctrgatgacctcacgtcatgtacgacatccctaaggcaaatcaataaaattattgaacagcttagccctcaagctgccaccagcagagacatcaacaggaaactagattctgtaaaacgrcagaagtataataaggaacaayagctaaaaaagatcactgcaaaacaaaagcatctccaggccatccttggaggagcagaggtgaaaattgaactagatcacgccagtctggaggaggatgcagagccggggccatccagtcttggcagcatgctcatgcctgtccaggagactgcctgggaagagctcatccgcactggccagatgacaccttttggtacccagatccctcagaaacaggagaaaaagcccagaaaaatcatgcttaatgaagcatcaggcttcgaaaagtatttggcagatcaagcaaaactgtcttttgaaaggaagaagcaaggttgtaataaaagagcagctagaaaagctccagccccagtcacgcctccagccccagtgcaaaataaaaacaaaccaaacaagaaagccagagttctgtccaaaaaagaggagcgtttgaaaaagcacatcaagaaactccagwagagggctttgcagttccaggggaaagtgggattgccaaaggcaaggagaccttgggagtcagacatgaggccagaggcagagggagactctgagggtgaagagtctgagtatttccccacagaggaggaggaagargaggaagatgacgaggtggagggggcagaggcggacctgtctggagatgrtactgactatgagctgaagcctctgcccaagggcgggaaacggcagaagaaagtgccagtgcaggagattgatgatgactttttcccaagttctggggaagaagctgaagctgcttctgtaggagaaggaggaggaggaggtcggaaagtgggaagatacygagatgatggagatgaagattattataagcagcggttaagtcccaagatgcctcgaacactaagtttacatgaaataactgaccttttagagacagatgacagcatagaagcaagtgctatagtgatacaaccacctgaaaatgctacagcacctgtttctgatgaggaatcaggagatgaagaaggtggaacaataaataatctgccaggttctttgttgcacacagctgcgtatcttattcaagatggctctgatgctgagtctgactcagatgatccctcatacgcacctaaagatgactctcctgatgaagttccatctacgtttactgtgcagcaacctccaccatcaaggaggaggaaaatgacaaaaattctttgcaaatggaaaaaagccgacctaactgtacaacccgtagcaggtagagttacagcaccaccaaacgatttcttcaccgtaatgagaactcccacagaaattcttgaactttttcttgatgacgaggtcattgaactcattgtcaagtactccaacttatatgcttgcagtaaaggtgtacatcttggcttgactagctctgaattcaaatgttttctgggaattatttttctgagtggttatgtctcagttcctagaaggcgtatgttttgggaacaaagaacagatgtgcataatgtactggttagtgctgccatgagacgtgaccggtttgaaactatattttctaatttgcatgttgctgacaatgcaaatttggatccagtggacaaattttccaaattgcgacctctcataagcaaacttaatgagagatgcatgaaatttgttccaaatgaaacatatttcagctttgatgaattcatggttccttattttggtcgtcacgggtgcaaacaatttattcggggaaagcccattcggtttggctataagttttggtgtggtgccacctgtctgggctacatttgctggtttcagccgtatcagggtaaaaacccaaatactaaacatgaggaatatggtgtcggtgcgtcacttgtccttcagtttagtgaggcacttacagaggcacaccctggacaataccattttgtattcaataactttttcaccagtattgcacttcttgataagctcagttcaatgggacatcaggcaacaggtacagtgagaaaggatcacattgacaaagttccactggaatcagatgtagctttaaagaaaaaagaaagaggcacatttgattatcgaattgatggcaaaggcaatattgtctgcagatggaatgataacagtgttgtcactgttgcctcatctggtgctggtatccatcccctgtgtcttgtcagtcgttactcccagaaactgaaaaagaagatacaagttcagcagccaaacatgatcaaagtgtataaccagttcatgggaggcgtagacagagctgatgaaaacattgataagtatcgggcatcaatccgtggaaagaaatggtattcaagccctcttttgttctgtttcgaattggtcttacaaaatgcttggcaattgcataaaacatatgatgagaaaccagtggattttctggagtttcgtcgacgtgtggtatgccattatctggagacccatggtcatcctccagaacctggccaaaaaggaagacctcagaagcgtaacattgactcacgttatgatggcataaatcatgtgatagtcaaacagggaaagcaaacgcgatgcgctgaatgtcataagaacacaacttttcgatgtgaaaaatgtgatgttgccttacatgtgaagtgttccgttgaatatcacactgaatagcaggtgtcaccacctcctgagataagaaacatagttttatacattatgtacagtgtagcagtggttttgcctagtgttccaattttggaacgtcacataacaatggaacataataaatttttttttctcttc

SEQ ID NO: 5919 - DNA, 8042 bp, Homo sapiens
tgagggcgcaggcgccacggcccgtcgagctgggttccaaggcggctggcggcggtagcgtctctgtttccttgtgggcgctcgcgcggccctgggtagtctgtagagaatgccaaatgagggaatcccccactcaagtcaaactcaggagcaagactgtttacagagtcaacctgtcagtaataatgaagaaatggcaatcaagcaagaaagtggtggtgatggggaggtggaggagtacctstcctttcgttctgtgggtgacgggctgtccacctctgctgtggggtgcgcatcagcagctccgaggagagggccagccctgctgcacatcgaccgacatcagatccaggcagtagagcctagcgcccaggcccttgagctgcagggtttgggtgtggacgtctatgaccaggacgtgctggaacagggagtgcttcagcaggtggacaatgccatccatgaggccagccgtgcctcccagctcgttgacgtggagaaggagtatcggtcggtcctrgatgacctcacgtcatgtacgacatccctaaggcaaatcaataaaattattgaacagcttagccctcaagctgccaccagcagagacatcaacaggaaactagattctgtaaaacgrcagaagtataataaggaacaayagctaaaaaagatcactgcaaaacaaaagcatctccaggccatccttggaggagcagaggtgaaaattgaactagatcacgccagtctggaggaggatgcagagccggggccatccagtcttggcagcatgctcatgcctgtccaggagactgcctgggaagagctcatccgcactggccagatgacaccttttggtacccagatccctcagaaacaggagaaaaagcccagaaaaatcatgcttaatgaagcatcaggcttcgaaaagtatttggcagatcaagcaaaactgtcttttgaaaggaagaagcaaggttgtaataaaagagcagctagaaaagctccagccccagtcacgcctccagccccagtgcaaaataaaaacaaaccaaacaagaaagccagagttctgtccaaaaaagaggagcgtttgaaaaagcacatcaagaaactccagwagagggctttgcagttccaggggaaagtgggattgccaaaggcaaggagaccttgggagtcagacatgaggccagaggcagagggagactctgagggtgaagagtctgagtatttccccacagaggaggaggaagargaggaagatgacgaggtggagggggcagaggcggacctgtctggagatgrtactgactatgagctgaagcctctgcccaagggcgggaaacggcagaagaaagtgccagtgcaggagattgatgatgactttttcccaagttctggggaagaagctgaagctgcttctgtaggagaaggaggaggaggaggtcggaaagtgggaagatacygagatgatggagatgaagattattataagcagcggttaaggagatggaataaactgagactgcaggacaaagagaaacgtctgaagctggaggacgattctgaggaaagtgatgctgaatttgacgaaggttttaaagtgccaggttttctgttcaaaaagctttttaagtaccagcagacaggtgttaggtggctgtgggaattgcactgccagcargcaggaggaattctgggagatgaaatgggattgggcaagaccatccagataattgccttcttggcaggtctgagctacagcaagatcaggactcgtggttcaaattacaggtttgaggggttgggtccaactgtaattgtctgtccaacaacagtgatgcatcagtgggtgaaggaatttcacacgtggtggcctccgttcagagtggcaattctacatgaaaccggttcctatacccacaaaaaggagaaactaattcgagatgttgctcattgtcatggaattttgatcacatcttactcctacattcgattgatgcaggatgacattagcaggtatgactggcactatgtgatcttggacgaaggacacaaaattcgaaatccaaatgctgctgtcacccttgcttgcaaacagtttcgcacccctcatyggatcattctgtctggctcaccgatgcaaaataacctccgagagctgtggtcgctctttgacttcatcttcccrggaaagttaggcacgttgcctgtgtttatggagcagttctccgtccccatcaccatggggggatattcaaatgcttccccagtacaggtcaaaactgcttacaagtgtgcatgtgtcttacgagataccataaatccatacctactgcggagaatgaagtcagatgtcaagatgagcctttctttgccagataaaaatgaacaggtcttattttgccgtcttacagatgagcagcataaagtctaccaaaatttcgttgattccaaagaagtttacaggattctcaatggagagatgcagattttctccggacttatagccctaagaaaaatttgcaaccaccctgatctcttttctggaggtcccaagaatctcaaaggtcttcctgatgatgaactagaagaagatcagtttgggtactggaaacgttctgggaaaatgattgttgttgagtctttgttgaaaatawggcacaagyagggtcagcgagtattgctgttttctcagtcaaggcagatgctggacatacttgaagtattccttagagcccaaaagtatacctatctcaagatggatggtaccactacaatagcttcaagacagccactgattacgagatacaatgaggacacatccatatttgtgtttcttctgaccacgcgggtgggyggcttaggtgtcaacctgacgggggcaaacagagttgtcatctatgacccagactggaacccaagcacggacacgcaggcccgggagygagcatggagaataggccagaagaagcaagkgactgtgtacaggctcctgactgcgggcaccattgaagaaaagatctaccaccgacaaatcttcaagcagtttttgacaaatagagtgctaaaagacccaaaacaaaggcggtttttcaaatccaatgatctctatgagytatttactctgactagtcctgatgcatcccagagcactgaaacaagtgcaatttttgcaggaactggatcagatgttcagacacccaaatgccatctaaaaagaaggattcaacyagcctttggagcagaccatgatgttccaaaacgcaagaagttccctgcttcyaacatatctgtaaatgatgccacatcatctgaagagaaatctgaggctaaaggagctgaagtaaatgcagtaacttctaatcgaagtgatcctttgaaagatgaccstcacrtgagtagtaatgtaactagcaatgataggcttggagaagagacaaatgcagtatctggaccagaagagttgtcagtgattagtggaaatggggaatgttcaaattcttcaggaacaggcaaaacttctatgccatctggtgatgaaagcattgatgaaaagttaggtctttcttacaaaagagaaagacccagccaggctcaaacagaagctttttgggagaataaacaaatggaaaataatttttataagcacaagtcaaaaacaaaacatcatagtgtggcagaagaagagaccctggagaaacatctgagaccaaagcaaaagcctaagaactctaagcattgcrgagacgccaagtttgaaggaaytcgaattccacacctggtgaagaaaaggcsttaccagaagcaagacagtgaaaacaagagtgaggccaaggaacagagcaatgacgattatgttttggaaaagcttttcaaaaartcagttggcgtgcacagtgtcatgaagcacgatgccatcatggatggagccagcccagattatgtactggtggaggcagaagccaaccgagtggcccaggatgccctgaaagcactgaggctctctcgtcagcggtgtctgggagcagtgtctggtgttcccacctggactggccacagggggatttctggtgcaccagcaggaaaaaagagtagatttggtaagaaaaggaattctaacttctctgtgcagcatccttcatcaacatctccaacagagaagtgccaggatggcatcatgaaaaaggagggaaaagataatgtccctgagcattttagtrgaagagcagaagatgcagactcttcatccgggcccctcgcttcctcctcactcttggctaaaatgagagctagaaaccacctgattctgccagagcgtttagaaagtgaaagcgggcacctgcrggaagcttctgccctgctgcccaccacagaacacgatgaccttctggtggagatgagaaacttcatcgctttccaggcccacaytgatggccaggccagcaccagggagatactgcaggagtttgaatccaagttatctgcatcacagtcttgtgtcttccgagaactattgagaaatctgtgcactttccatagaacttctggtggtgaaggaatttggaaactcaagccagaatactgctaaacaacattgcttcctaaactttcaagtccctttttctaacgggcatttctgaytattaatttattattaataatcatgtttgtcaatggaagttggctgcacttgatgtttgtttgcatgatgtctacctcagaattaaaactttaaggaagaagaaactcttctctgaaagttaaaagttttaataatgctagctaaaggagaaaatacttggattgatttttttttttttggcaatctaattatattgtaaatcaggtacctaacagttactccttggagcacatttgttcctttacccaaaagatgctgtcagggagcacagttagaagtttgcagaacagaaatctcaatatttttttttattggtgctaaaaasaggtcttacattcagtcagacctgttcaataagttcatcaatatctgataacagcattattttgatgcttaaactttaaacatttatatttaccatttgccacccacaaaggtcaggtttgttatttgttgtttgataattatattaattttcttggaaagatcctcttttcaaggtactggtaaattggtgagtatttttattagtaaagcatgaaatagtatggtaataaatgataagacatgtatttgtggaaagctgtagggtattcagtttaccctggctttcctttaagcagagggcatctttttctctcctacagtcacaaaatgtgttatcattaaaaaaaatcaaattaaagccaaaagtaggtacataaaaaccacacacatgcatgcacacaaacatcactgcagcccacagcagacccagccgttgttaccatgaagtgacaccactccaggcctctcttgtctgcaggctggcaggctgtcttctctccagttgccttcgtcttgcgcctgcctttgcattccttgcgacgggctttcttrtttctgcggtttggattccagccaaggctgtttgtatctcactactgtttatgtgtttgtggttctgtgatggtgttgctttgatcctcagtttattttcttacccatgtttttcttgtttccttctcaggatgattttatcatctcatctttgaagtgttgttttccgaaattcatcgtattcctgaaatttcttcttagctgtcttagtgcagtttgtttcttggatttgtattctctggcatgctcttttcctctctctcatttttctgtagtatgcctgccctcctaccctgctatttctttacatctctctcatgcttaacatggatagctgtgtccagatcttctgtctgctcatccatgtgactcagagaggagggttctgggcaggggggccttgccggactgcatgagaggacatgagttttgctttctctgctctaatattttgcttaagccaagaatccttttcttagagatgttctatatgattcctgtcaggattttctagttttttttggattatagcttgttcatttcttttgtttttagtttggtttatatataatgagggaagaagatgattacattatttttgtcactttgccatcattgtttagaagtcatagaaagaatttttaaataggccaataagtcttaaacttgagtacttggcttagaagaaagtcaaaactccttcctttttgactaagtggtttgtttctggggagctcttaatttctatttttataatcattagcctataaggaaattgtgtcttccttgttctcagggtgatctgctgaccttgttcactcatgaagcatttgggtatcatacttatagtgtctgaaacataaactgtattgagctagacaaggtatagcctcctcttcaagtagcaaatactatcaaaagctataatgcagtaggagcaaggtggtccttgttccagtttttgtctcagttctgctgctgatgtaccatgatcttgggaaggtggtgtctcagtgtggagatctgacacattgttaccgtgcctcctggctggagggacttggagaacaatgcagttaagtagaatggttttaacaatacagagaaatttattcatttagataaaaatctgatttttagaactttaaaagctttgtacagtgtaaatagatttaatgtatttaacatgctttatcagcacaaataaaggattttaaaattttgtcaaaaaattaaatgttaatactatcaccattaaaaatgttcaagcaatagtctgcctccccacccccacaccatcttgcacctgttccacagctaagtacagccctaggtttggtgtgtattctccatgcatttagagaatcacatgacacagactgctgctataatgtcattttcccattcttcctttactaataaaatttttgagttttacctggacgtctggctgctcagcttaagactacttctcagcctctcttatagttaattgtggccatatgactaagttttaaacttcccaattggccctttaaagaagcagggtatgcactctccttgacattcccctttcttgctggctgggaggccaatgggagcttcagtagtgacctggcatctcaagagatggaagtgatgtgttgaggaaggagaagttggcctgccagtcttgaactgctctcctttgacctgttatttaagagtaaaataaaatactgacttgcttaagctactgtcttttgamgtctattatagcaattagtttgctttaaatatgtaatttatattaatggccttataccatccttattttgcaactaacttttcatttaatattatatgcaagacatttctattcctgtaagtatagctctgcctgcacagaattgttggattaatgatgtagattttaaatgtcagtggatgtagcagaattgcttgcatcaattcaccctccataaaaggacccatttctccaaacccttgccaacagtaagtggtatcaatatcgataggttgttttgttttgttttaaccagtctcgtgattgaaagtaccttgttttcacttgaatttccctgattacgtacaaaatcaaacatttccatgtttattggccatttgtagatctctaccgtacattgcctattagtgttatgttggcctagttttcctgtgggttgtttatcttttaggattgctcccctaaacaaaaacaaaaaggcagttattccaatgatcaacaaatattcttttctccaccagtttaaaatgtcagctttcaactcatcacatgctaagttgtctatttctgtcctgtggatccaggtgttggttctaccaaccacactcctcacgctgtcatttggtgctttgcattgtgttttgccattcatgggcaagttccttttcctttctccccctcttcagtgtcttatacttgggtgttttctgttccagctgaatcaagaattagtttattaaattccagtaaaattgtggtgttcttttgact

SEQ ID NO: 5920 - DNA, 8059 bp, Homo sapiens
cgcccaggtgcgcgcgtggcggagggggaacagagaagcaggacagctctscatccttcccgtgttcagtcgtgggagacaayaagagaggtcacagcctggcgaccaaaaagtagtctgtagagaatgccaaatgagggaatcccccactcaagtcaaactcaggagcaagactgtttacagagtcaacctgtcagtaataatgaagaaatggcaatcaagcaagaaagtggtggtgatggggaggtggaggagtacctstcctttcgttctgtgggtgacgggctgtccacctctgctgtggggtgcgcatcagcagctccgaggagagggccagccctgctgcacatcgaccgacatcagatccaggcagtagagcctagcgcccaggcccttgagctgcagggtttgggtgtggacgtctatgaccaggacgtgctggaacagggagtgcttcagcaggtggacaatgccatccatgaggccagccgtgcctcccagctcgttgacgtggagaaggagtatcggtcggtcctrgatgacctcacgtcatgtacgacatccctaaggcaaatcaataaaattattgaacagcttagccctcaagctgccaccagcagagacatcaacaggaaactagattctgtaaaacgrcagaagtataataaggaacaayagctaaaaaagatcactgcaaaacaaaagcatctccaggccatccttggaggagcagaggtgaaaattgaactagatcacgccagtctggaggaggatgcagagccggggccatccagtcttggcagcatgctcatgcctgtccaggagactgcctgggaagagctcatccgcactggccagatgacaccttttggtacccagatccctcagaaacaggagaaaaagcccagaaaaatcatgcttaatgaagcatcaggcttcgaaaagtatttggcagatcaagcaaaactgtcttttgaaaggaagaagcaaggttgtaataaaagagcagctagaaaagctccagccccagtcacgcctccagccccagtgcaaaataaaaacaaaccaaacaagaaagccagagttctgtccaaaaaagaggagcgtttgaaaaagcacatcaagaaactccagwagagggctttgcagttccaggggaaagtgggattgccaaaggcaaggagaccttgggagtcagacatgaggccagaggcagagggagactctgagggtgaagagtctgagtatttccccacagaggaggaggaagargaggaagatgacgaggtggagggggcagaggcggacctgtctggagatgrtactgactatgagctgaagcctctgcccaagggcgggaaacggcagaagaaagtgccagtgcaggagattgatgatgactttttcccaagttctggggaagaagctgaagctgcttctgtaggagaaggaggaggaggaggtcggaaagtgggaagatacygagatgatggagatgaagattattataagcagcggttaaggagatggaataaactgagactgcaggacaaagagaaacgtctgaagctggaggacgattctgaggaaagtgatgctgaatttgacgaaggttttaaagtgccaggttttctgttcaaaaagctttttaagtaccagcagacaggtgttaggtggctgtgggaattgcactgccagcargcaggaggaattctgggagatgaaatgggattgggcaagaccatccagataattgccttcttggcaggtctgagctacagcaagatcaggactcgtggttcaaattacaggtttgaggggttgggtccaactgtaattgtctgtccaacaacagtgatgcatcagtgggtgaaggaatttcacacgtggtggcctccgttcagagtggcaattctacatgaaaccggttcctatacccacaaaaaggagaaactaattcgagatgttgctcattgtcatggaattttgatcacatcttactcctacattcgattgatgcaggatgacattagcaggtatgactggcactatgtgatcttggacgaaggacacaaaattcgaaatccaaatgctgctgtcacccttgcttgcaaacagtttcgcacccctcatyggatcattctgtctggctcaccgatgcaaaataacctccgagagctgtggtcgctctttgacttcatcttcccrggaaagttaggcacgttgcctgtgtttatggagcagttctccgtccccatcaccatggggggatattcaaatgcttccccagtacaggtcaaaactgcttacaagtgtgcatgtgtcttacgagataccataaatccatacctactgcggagaatgaagtcagatgtcaagatgagcctttctttgccagataaaaatgaacaggtcttattttgccgtcttacagatgagcagcataaagtctaccaaaatttcgttgattccaaagaagtttacaggattctcaatggagagatgcagattttctccggacttatagccctaagaaaaatttgcaaccaccctgatctcttttctggaggtcccaagaatctcaaaggtcttcctgatgatgaactagaagaagatcagtttgggtactggaaacgttctgggaaaatgattgttgttgagtctttgttgaaaatawggcacaagyagggtcagcgagtattgctgttttctcagtcaaggcagatgctggacatacttgaagtattccttagagcccaaaagtatacctatctcaagatggatggtaccactacaatagcttcaagacagccactgattacgagatacaatgaggacacatccatatttgtgtttcttctgaccacgcgggtgggyggcttaggtgtcaacctgacgggggcaaacagagttgtcatctatgacccagactggaacccaagcacggacacgcaggcccgggagygagcatggagaataggccagaagaagcaagkgactgtgtacaggctcctgactgcgggcaccattgaagaaaagatctaccaccgacaaatcttcaagcagtttttgacaaatagagtgctaaaagacccaaaacaaaggcggtttttcaaatccaatgatctctatgagytatttactctgactagtcctgatgcatcccagagcactgaaacaagtgcaatttttgcaggaactggatcagatgttcagacacccaaatgccatctaaaaagaaggattcaacyagcctttggagcagaccatgatgttccaaaacgcaagaagttccctgcttcyaacatatctgtaaatgatgccacatcatctgaagagaaatctgaggctaaaggagctgaagtaaatgcagtaacttctaatcgaagtgatcctttgaaagatgaccstcacrtgagtagtaatgtaactagcaatgataggcttggagaagagacaaatgcagtatctggaccagaagagttgtcagtgattagtggaaatggggaatgttcaaattcttcaggaacaggcaaaacttctatgccatctggtgatgaaagcattgatgaaaagttaggtctttcttacaaaagagaaagacccagccaggctcaaacagaagctttttgggagaataaacaaatggaaaataatttttataagcacaagtcaaaaacaaaacatcatagtgtggcagaagaagagaccctggagaaacatctgagaccaaagcaaaagcctaagaactctaagcattgcrgagacgccaagtttgaaggaaytcgaattccacacctggtgaagaaaaggcsttaccagaagcaagacagtgaaaacaagagtgaggccaaggaacagagcaatgacgattatgttttggaaaagcttttcaaaaartcagttggcgtgcacagtgtcatgaagcacgatgccatcatggatggagccagcccagattatgtactggtggaggcagaagccaaccgagtggcccaggatgccctgaaagcactgaggctctctcgtcagcggtgtctgggagcagtgtctggtgttcccacctggactggccacagggggatttctggtgcaccagcaggaaaaaagagtagatttggtaagaaaaggaattctaacttctctgtgcagcatccttcatcaacatctccaacagagaagtgccaggatggcatcatgaaaaaggagggaaaagataatgtccctgagcattttagtrgaagagcagaagatgcagactcttcatccgggcccctcgcttcctcctcactcttggctaaaatgagagctagaaaccacctgattctgccagagcgtttagaaagtgaaagcgggcacctgcrggaagcttctgccctgctgcccaccacagaacacgatgaccttctggtggagatgagaaacttcatcgctttccaggcccacaytgatggccaggccagcaccagggagatactgcaggagtttgaatccaagttatctgcatcacagtcttgtgtcttccgagaactattgagaaatctgtgcactttccatagaacttctggtggtgaaggaatttggaaactcaagccagaatactgctaaacaacattgcttcctaaactttcaagtccctttttctaacgggcatttctgaytattaatttattattaataatcatgtttgtcaatggaagttggctgcacttgatgtttgtttgcatgatgtctacctcagaattaaaactttaaggaagaagaaactcttctctgaaagttaaaagttttaataatgctagctaaaggagaaaatacttggattgatttttttttttttggcaatctaattatattgtaaatcaggtacctaacagttactccttggagcacatttgttcctttacccaaaagatgctgtcagggagcacagttagaagtttgcagaacagaaatctcaatatttttttttattggtgctaaaaasaggtcttacattcagtcagacctgttcaataagttcatcaatatctgataacagcattattttgatgcttaaactttaaacatttatatttaccatttgccacccacaaaggtcaggtttgttatttgttgtttgataattatattaattttcttggaaagatcctcttttcaaggtactggtaaattggtgagtatttttattagtaaagcatgaaatagtatggtaataaatgataagacatgtatttgtggaaagctgtagggtattcagtttaccctggctttcctttaagcagagggcatctttttctctcctacagtcacaaaatgtgttatcattaaaaaaaatcaaattaaagccaaaagtaggtacataaaaaccacacacatgcatgcacacaaacatcactgcagcccacagcagacccagccgttgttaccatgaagtgacaccactccaggcctctcttgtctgcaggctggcaggctgtcttctctccagttgccttcgtcttgcgcctgcctttgcattccttgcgacgggctttcttrtttctgcggtttggattccagccaaggctgtttgtatctcactactgtttatgtgtttgtggttctgtgatggtgttgctttgatcctcagtttattttcttacccatgtttttcttgtttccttctcaggatgattttatcatctcatctttgaagtgttgttttccgaaattcatcgtattcctgaaatttcttcttagctgtcttagtgcagtttgtttcttggatttgtattctctggcatgctcttttcctctctctcatttttctgtagtatgcctgccctcctaccctgctatttctttacatctctctcatgcttaacatggatagctgtgtccagatcttctgtctgctcatccatgtgactcagagaggagggttctgggcaggggggccttgccggactgcatgagaggacatgagttttgctttctctgctctaatattttgcttaagccaagaatccttttcttagagatgttctatatgattcctgtcaggattttctagttttttttggattatagcttgttcatttcttttgtttttagtttggtttatatataatgagggaagaagatgattacattatttttgtcactttgccatcattgtttagaagtcatagaaagaatttttaaataggccaataagtcttaaacttgagtacttggcttagaagaaagtcaaaactccttcctttttgactaagtggtttgtttctggggagctcttaatttctatttttataatcattagcctataaggaaattgtgtcttccttgttctcagggtgatctgctgaccttgttcactcatgaagcatttgggtatcatacttatagtgtctgaaacataaactgtattgagctagacaaggtatagcctcctcttcaagtagcaaatactatcaaaagctataatgcagtaggagcaaggtggtccttgttccagtttttgtctcagttctgctgctgatgtaccatgatcttgggaaggtggtgtctcagtgtggagatctgacacattgttaccgtgcctcctggctggagggacttggagaacaatgcagttaagtagaatggttttaacaatacagagaaatttattcatttagataaaaatctgatttttagaactttaaaagctttgtacagtgtaaatagatttaatgtatttaacatgctttatcagcacaaataaaggattttaaaattttgtcaaaaaattaaatgttaatactatcaccattaaaaatgttcaagcaatagtctgcctccccacccccacaccatcttgcacctgttccacagctaagtacagccctaggtttggtgtgtattctccatgcatttagagaatcacatgacacagactgctgctataatgtcattttcccattcttcctttactaataaaatttttgagttttacctggacgtctggctgctcagcttaagactacttctcagcctctcttatagttaattgtggccatatgactaagttttaaacttcccaattggccctttaaagaagcagggtatgcactctccttgacattcccctttcttgctggctgggaggccaatgggagcttcagtagtgacctggcatctcaagagatggaagtgatgtgttgaggaaggagaagttggcctgccagtcttgaactgctctcctttgacctgttatttaagagtaaaataaaatactgacttgcttaagctactgtcttttgamgtctattatagcaattagtttgctttaaatatgtaatttatattaatggccttataccatccttattttgcaactaacttttcatttaatattatatgcaagacatttctattcctgtaagtatagctctgcctgcacagaattgttggattaatgatgtagattttaaatgtcagtggatgtagcagaattgcttgcatcaattcaccctccataaaaggacccatttctccaaacccttgccaacagtaagtggtatcaatatcgataggttgttttgttttgttttaaccagtctcgtgattgaaagtaccttgttttcacttgaatttccctgattacgtacaaaatcaaacatttccatgtttattggccatttgtagatctctaccgtacattgcctattagtgttatgttggcctagttttcctgtgggttgtttatcttttaggattgctcccctaaacaaaaacaaaaaggcagttattccaatgatcaacaaatattcttttctccaccagtttaaaatgtcagctttcaactcatcacatgctaagttgtctatttctgtcctgtggatccaggtgttggttctaccaaccacactcctcacgctgtcatttggtgctttgcattgtgttttgccattcatgggcaagttccttttcctttctccccctcttcagtgtcttatacttgggtgttttctgttccagctgaatcaagaattagtttattaaattccagtaaaattgtggtgttcttttgact

SEQ ID NO: 5921 - DNA, 5155 bp, Homo sapiens
ctgggagaataaatgacagggagggacagggtggctggtggaggtgcctgttccagagtggcagtggtgtggggcttcagcagagtgtggacctgcaggtgggagcagggagagagaggtcagagtggagacattgcaaagcccagacaaatcttcaagcagtttttgacaaatagagtgctaaaagacccaaaacaaaggcggtttttcaaatccaatgatctctatgagytatttactctgactagtcctgatgcatcccagagcactgaaacaagtgcaatttttgcaggaactggatcagatgttcagacacccaaatgccatctaaaaagaaggattcaacyagcctttggagcagaccatgatgttccaaaacgcaagaagttccctgcttcyaacatatctgtaaatgatgccacatcatctgaagagaaatctgaggctaaaggagctgaagtaaatgcagtaacttctaatcgaagtgatcctttgaaagatgaccstcacrtgagtagtaatgtaactagcaatgataggcttggagaagagacaaatgcagtatctggaccagaagagttgtcagtgattagtggaaatggggaatgttcaaattcttcaggaacaggcaaaacttctatgccatctggtgatgaaagcattgatgaaaagttaggtctttcttacaaaagagaaagacccagccaggctcaaacagaagctttttgggagaataaacaaatggaaaataatttttataagcacaagtcaaaaacaaaacatcatagtgtggcagaagaagagaccctggagaaacatctgagaccaaagcaaaagcctaagaactctaagcattgcrgagacgccaagtttgaaggaaytcgaattccacacctggtgaagaaaaggcsttaccagaagcaagacagtgaaaacaagagtgaggccaaggaacagagcaatgacgattatgttttggaaaagcttttcaaaaartcagttggcgtgcacagtgtcatgaagcacgatgccatcatggatggagccagcccagattatgtactggtggaggcagaagccaaccgagtggcccaggatgccctgaaagcactgaggctctctcgtcagcggtgtctgggagcagtgtctggtgttcccacctggactggccacagggggatttctggtgcaccagcaggaaaaaagagtagatttggtaagaaaaggaattctaacttctctgtgcagcatccttcatcaacatctccaacagagaagtgccaggatggcatcatgaaaaaggagggaaaagataatgtccctgagcattttagtrgaagagcagaagatgcagactcttcatccgggcccctcgcttcctcctcactcttggctaaaatgagagctagaaaccacctgattctgccagagcgtttagaaagtgaaagcgggcacctgcrggaagcttctgccctgctgcccaccacagaacacgatgaccttctggtggagatgagaaacttcatcgctttccaggcccacaytgatggccaggccagcaccagggagatactgcaggagtttgaatccaagttatctgcatcacagtcttgtgtcttccgagaactattgagaaatctgtgcactttccatagaacttctggtggtgaaggaatttggaaactcaagccagaatactgctaaacaacattgcttcctaaactttcaagtccctttttctaacgggcatttctgaytattaatttattattaataatcatgtttgtcaatggaagttggctgcacttgatgtttgtttgcatgatgtctacctcagaattaaaactttaaggaagaagaaactcttctctgaaagttaaaagttttaataatgctagctaaaggagaaaatacttggattgatttttttttttttggcaatctaattatattgtaaatcaggtacctaacagttactccttggagcacatttgttcctttacccaaaagatgctgtcagggagcacagttagaagtttgcagaacagaaatctcaatatttttttttattggtgctaaaaasaggtcttacattcagtcagacctgttcaataagttcatcaatatctgataacagcattattttgatgcttaaactttaaacatttatatttaccatttgccacccacaaaggtcaggtttgttatttgttgtttgataattatattaattttcttggaaagatcctcttttcaaggtactggtaaattggtgagtatttttattagtaaagcatgaaatagtatggtaataaatgataagacatgtatttgtggaaagctgtagggtattcagtttaccctggctttcctttaagcagagggcatctttttctctcctacagtcacaaaatgtgttatcattaaaaaaaatcaaattaaagccaaaagtaggtacataaaaaccacacacatgcatgcacacaaacatcactgcagcccacagcagacccagccgttgttaccatgaagtgacaccactccaggcctctcttgtctgcaggctggcaggctgtcttctctccagttgccttcgtcttgcgcctgcctttgcattccttgcgacgggctttcttrtttctgcggtttggattccagccaaggctgtttgtatctcactactgtttatgtgtttgtggttctgtgatggtgttgctttgatcctcagtttattttcttacccatgtttttcttgtttccttctcaggatgattttatcatctcatctttgaagtgttgttttccgaaattcatcgtattcctgaaatttcttcttagctgtcttagtgcagtttgtttcttggatttgtattctctggcatgctcttttcctctctctcatttttctgtagtatgcctgccctcctaccctgctatttctttacatctctctcatgcttaacatggatagctgtgtccagatcttctgtctgctcatccatgtgactcagagaggagggttctgggcaggggggccttgccggactgcatgagaggacatgagttttgctttctctgctctaatattttgcttaagccaagaatccttttcttagagatgttctatatgattcctgtcaggattttctagttttttttggattatagcttgttcatttcttttgtttttagtttggtttatatataatgagggaagaagatgattacattatttttgtcactttgccatcattgtttagaagtcatagaaagaatttttaaataggccaataagtcttaaacttgagtacttggcttagaagaaagtcaaaactccttcctttttgactaagtggtttgtttctggggagctcttaatttctatttttataatcattagcctataaggaaattgtgtcttccttgttctcagggtgatctgctgaccttgttcactcatgaagcatttgggtatcatacttatagtgtctgaaacataaactgtattgagctagacaaggtatagcctcctcttcaagtagcaaatactatcaaaagctataatgcagtaggagcaaggtggtccttgttccagtttttgtctcagttctgctgctgatgtaccatgatcttgggaaggtggtgtctcagtgtggagatctgacacattgttaccgtgcctcctggctggagggacttggagaacaatgcagttaagtagaatggttttaacaatacagagaaatttattcatttagataaaaatctgatttttagaactttaaaagctttgtacagtgtaaatagatttaatgtatttaacatgctttatcagcacaaataaaggattttaaaattttgtcaaaaaattaaatgttaatactatcaccattaaaaatgttcaagcaatagtctgcctccccacccccacaccatcttgcacctgttccacagctaagtacagccctaggtttggtgtgtattctccatgcatttagagaatcacatgacacagactgctgctataatgtcattttcccattcttcctttactaataaaatttttgagttttacctggacgtctggctgctcagcttaagactacttctcagcctctcttatagttaattgtggccatatgactaagttttaaacttcccaattggccctttaaagaagcagggtatgcactctccttgacattcccctttcttgctggctgggaggccaatgggagcttcagtagtgacctggcatctcaagagatggaagtgatgtgttgaggaaggagaagttggcctgccagtcttgaactgctctcctttgacctgttatttaagagtaaaataaaatactgacttgcttaagctactgtcttttgamgtctattatagcaattagtttgctttaaatatgtaatttatattaatggccttataccatccttattttgcaactaacttttcatttaatattatatgcaagacatttctattcctgtaagtatagctctgcctgcacagaattgttggattaatgatgtagattttaaatgtcagtggatgtagcagaattgcttgcatcaattcaccctccataaaaggacccatttctccaaacccttgccaacagtaagtggtatcaatatcgataggttgttttgttttgttttaaccagtctcgtgattgaaagtaccttgttttcacttgaatttccctgattacgtacaaaatcaaacatttccatgtttattggccatttgtagatctctaccgtacattgcctattagtgttatgttggcctagttttcctgtgggttgtttatcttttaggattgctcccctaaacaaaaacaaaaaggcagttattccaatgatcaacaaatattcttttctccaccagtttaaaatgtcagctttcaactcatcacatgctaagttgtctatttctgtcctgtggatccaggtgttggttctaccaaccacactcctcacgctgtcatttggtgctttgcattgtgttttgccattcatgggcaagttccttttcctttctccccctcttcagtgtcttatacttgggtgttttctgttccagctgaatcaagaattagtttattaaattccagtaaaattgtggtgttcttttgact

SEQ ID NO: 5922 - DNA, 4520 bp, Homo sapiens
tgagggcgcaggcgccacggcccgtcgagctgggttccaaggcggctggcggcggtagcgtctctgtttccttgtgggcgctcgcgcggccctgggtagtctgtagagaatgccaaatgagggaatcccccactcaagtcaaactcaggagcaagactgtttacagagtcaacctgtcagtaataatgaagaaatggcaatcaagcaagaaagtggtggtgatggggaggtggaggagtacctstcctttcgttctgtgggtgacgggctgtccacctctgctgtggggtgcgcatcagcagctccgaggagagggccagccctgctgcacatcgaccgacatcagatccaggcagtagagcctagcgcccaggcccttgagctgcagggtttgggtgtggacgtctatgaccaggacgtgctggaacagggagtgcttcagcaggtggacaatgccatccatgaggccagccgtgcctcccagctcgttgacgtggagaaggagtatcggtcggtcctrgatgacctcacgtcatgtacgacatccctaaggcaaatcaataaaattattgaacagcttagccctcaagctgccaccagcagagacatcaacaggaaactagattctgtaaaacgrcagaagtataataaggaacaayagctaaaaaagatcactgcaaaacaaaagcatctccaggccatccttggaggagcagaggtgaaaattgaactagatcacgccagtctggaggaggatgcagagccggggccatccagtcttggcagcatgctcatgcctgtccaggagactgcctgggaagagctcatccgcactggccagatgacaccttttggtacccagatccctcagaaacaggagaaaaagcccagaaaaatcatgcttaatgaagcatcaggcttcgaaaagtatttggcagatcaagcaaaactgtcttttgaaaggaagaagcaaggttgtaataaaagagcagctagaaaagctccagccccagtcacgcctccagccccagtgcaaaataaaaacaaaccaaacaagaaagccagagttctgtccaaaaaagaggagcgtttgaaaaagcacatcaagaaactccagwagagggctttgcagttccaggggaaagtgggattgccaaaggcaaggagaccttgggagtcagacatgaggccagaggcagagggagactctgagggtgaagagtctgagtatttccccacagaggaggaggaagargaggaagatgacgaggtggagggggcagaggcggacctgtctggagatgrtactgactatgagctgaagcctctgcccaagggcgggaaacggcagaagaaagtgccagtgcaggagattgatgatgactttttcccaagttctggggaagaagctgaagctgcttctgtaggagaaggaggaggaggaggtcggaaagtgggaagatacygagatgatggagatgaagattattataagcagcggttaaggagatggaataaactgagactgcaggacaaagagaaacgtctgaagctggaggacgattctgaggaaagtgatgctgaatttgacgaaggttttaaagtgccaggttttctgttcaaaaagctttttaagtaccagcagacaggtgttaggtggctgtgggaattgcactgccagcargcaggaggaattctgggagatgaaatgggattgggcaagaccatccagataattgccttcttggcaggtctgagctacagcaagatcaggactcgtggttcaaattacaggtttgaggggttgggtccaactgtaattgtctgtccaacaacagtgatgcatcagtgggtgaaggaatttcacacgtggtggcctccgttcagagtggcaattctacatgaaaccggttcctatacccacaaaaaggagaaactaattcgagatgttgctcattgtcatggaattttgatcacatcttactcctacattcgattgatgcaggatgacattagcaggtatgactggcactatgtgatcttggacgaaggacacaaaattcgaaatccaaatgctgctgtcacccttgcttgcaaacagtttcgcacccctcatyggatcattctgtctggctcaccgatgcaaaataacctccgagagctgtggtcgctctttgacttcatcttcccrggaaagttaggcacgttgcctgtgtttatggagcagttctccgtccccatcaccatggggggatattcaaatgcttccccagtacaggtcaaaactgcttacaagtgtgcatgtgtcttacgagataccataaatccatacctactgcggagaatgaagtcagatgtcaagatgagcctttctttgccagataaaaatgaacaggtcttattttgccgtcttacagatgagcagcataaagtctaccaaaatttcgttgattccaaagaagtttacaggattctcaatggagagatgcagattttctccggacttatagccctaagaaaaatttgcaaccaccctgatctcttttctggaggtcccaagaatctcaaaggtcttcctgatgatgaactagaagaagatcagtttgggtactggaaacgttctgggaaaatgattgttgttgagtctttgttgaaaatawggcacaagyagggtcagcgagtattgctgttttctcagtcaaggcagatgctggacatacttgaagtattccttagagcccaaaagtatacctatctcaagatggatggtaccactacaatagcttcaagacagccactgattacgagatacaatgaggacacatccatatttgtgtttcttctgaccacgcgggtgggyggcttaggtgtcaacctgacgggggcaaacagagttgtcatctatgacccagactggaacccaagcacggacacgcaggcccgggagygagcatggagaataggccagaagaagcaagkgactgtgtacaggctcctgactgcgggcaccattgaagaaaagatctaccaccgacaaatcttcaagcagtttttgacaaatagagtgctaaaagacccaaaacaaaggcggtttttcaaatccaatgatctctatgagytatttactctgactagtcctgatgcatcccagagcactgaaacaagtgcaatttttgcaggaactggatcagatgttcagacacccaaatgccatctaaaaagaaggattcaacyagcctttggagcagaccatgatgttccaaaacgcaagaagttccctgcttcyaacatatctgtaaatgatgccacatcatctgaagagaaatctgaggctaaaggagctgaagtaaatgcagtaacttctaatcgaagtgatcctttgaaagatgaccstcacrtgagtagtaatgtaactagcaatgataggcttggagaagagacaaatgcagtatctggaccagaagagttgtcagtgattagtggaaatggggaatgttcaaattcttcaggaacaggcaaaacttctatgccatctggtgatgaaagcattgatgaaaagttaggtctttcttacaaaagagaaagacccagccaggctcaaacagaagctttttgggagaataaacaaatggaaaataatttttataagcacaagtcaaaaacaaaacatcatagtgtggcagaagaagagaccctggagaaacatctgagaccaaagcaaaagcctaagaactctaagcattgcrgagacgccaagtttgaaggaaytcgaattccacacctggtgaagaaaaggcsttaccagaagcaagacagtgaaaacaagagtgaggccaaggaacagagcaatgacgattatgttttggaaaagcttttcaaaaartcagttggcgtgcacagtgtcatgaagcacgatgccatcatggatggagccagcccagattatgtactggtggaggcagaagccaaccgagtggcccaggatgccctgaaagcactgaggctctctcgtcagcggtgtctgggagcagtgtctggtgttcccacctggactggccacagggggatttctggtgcaccagcaggaaaaaagagtagatttggtaagaaaaggaattctaacttctctgtgcagcatccttcatcaacatctccaacagagaagtgccaggtaatatagataacctttttgctttccagggtgagacttgcttgattgaatgctgtgaaaatttcacctgattctggatgtgaagaaaatggtcatctctggtgtaatgacacctgatatttgtgttgcacgctctgatttacgatgcacattcacttgaatctaaaaggacctgctgatttcctaaagacaaagtctttaacccaagatccgtagcagcatttctgttttgccattagaaggttgacacagggataggtgtgtcgctgctaggacagcctgccttgtctagagggaaagtgccagctccagagaccacaaccctctgaaataaaagtccagaaaactg

SEQ ID NO: 5923 - DNA, 3649 bp, Homo sapiens
cagcctccggacctcgctgcagcgcggacccggcccgcccgcccggctgcgaggctcctggctgcacatgacgtcccggtgtttggctggcgcagcaggtcctccgggccaccggccaccttcccaagcagcaaaggtggaggcggctccagttacatggaggagatgtacttcgcctggttggaaaacccccagagtgtccacaagtcctgggacagcttcttcagggaagccagcgaggaagccttttctggctctgctcagccacggcccccttctgttgtccatgagagcaggtctgcagtctcaagtcggaccaagaccagcaaattggtggaggaccacctggctgtgcagtccctgatccgggcctaccagatccggggtcaccatgtggcccagctggaccccctgggcattctggatgcagacctggactcctttgtgccctcagacttgatcacaaccattgataaactggccttctatgaccttcaggaggctgaccttgataaggagttccagctgccgacaaccaccttcattgggggctctgaaaacaccctytctctgcgggagatcattcggcgcctggagaacacctactgccagcacattggcctggagttcatgttcatcaaygatgtggagcagtgccartggatccggcagaagtttgagacccctggtgtgatgcagttctccagcgaggagaagcggaccctgctggcccggctagtgcgctccatgaggtttgaagacttcctggcccggaaatggtcctcagagaagcggtttggcctggagggctgtgaagtgatgattcctgccctcaagaccatcatcgacaaatccagcgagatggggattgagaatgtcatcttggggatgccacacaggggaaggctgaacgtgctggccaacgtgatccgcaaggacctggagcagatcttctgccagtttgaccccaagctggaggcggcggaygagggctccggggatgtcaagtaccacctgggcatgtaccatgagaggatcaaccgcgtcaccaaccggaacmtcactctgtcgctggttgccaacccctcccacytggaggcagtggaccctgtggtgcaggggaagacaaaggcagagcagttctaccgtggagatgcccagggcaagaaggtcatgtccatcctggttcatggggacgccgcctttgctggccagggcgtggtatatgagaccttccacctgagcgacctgccctcctacacgaccaatggtaccgtgcacgtcgtcgtcaacaaccagattggattcaccacagacccccgaatggcccgctcctcaccatacccgaccgacgtggcccgggtggtcaatgcgcctatcttccatgtgaatgccgatgacccagaggctgtgatatatgtgtgcagtgtggcagccgaatggagaaacactttcaacaaagatgttgtcgtggacctggtctgttaccgccggcgtggccacaatgagatggacgagcccatgttcacccagccgctcatgtacaagcagatccacagacaggtgcctgtgctgaagaagtacgcagacaagctgattgccgagggcacagtcaccctgcaggagtttgaggaagaaattgccaaatacgaccggatctgtgaggaggcttatggcaggtccaaggataaaaagattctgcatataaagcactggttggactccccctggcctggcttcttcaacgtagatggggagcccaagagcatgacatgcccagccacggggatccctgaggacatsctcacccacatcggcagtgtggccagctctgtgcccctggaggactttaagatccacactggcctctstcgcattctgcggggccgtgcggacatgaccaagaaccggayggtggactgggcgttggcagagtacatggcctttggctccctgctgaaggaaggcatccacgtgcggctcagygggcaggatgtggagaggggcacattcagtcaccggcaccatgttctccatgaccaggaggttgaccgcaggacgtgtgtgcctatgaatcatctctggcctgaccaggccccgtacaccgtgtgcaacagctccctctcggagtacggagtcctgggctttgagctgggctatgccatggccagccccartgccctggtcctctgggaggcccagtttggggacttccacaacacggcccagtgcatcatcgaccagttcatcagcaccggccaggccaagtgggtgcggcataatggcattgtgctgctgctgccccatggcatggaaggcatgggcccagagcactcgtcagcgaggcccgaaaggttcctgcagatgagcaatgatgactcggatgcctaccctgcattcaccaaggacttcgaggtgagccagctctatgactgcaactggatcgtggtcaactgctccacaccggccaactacttccacgtgctgcgccggcagatcctgctgcccttccgcaagccgctgattatcttcacacctaaatctctkctgaggcacccagaggccaagtccagctttgaccaaatggtatccgggaccagcttccagcgggtgattcctgaagatggggccgcagcacgggcccctgagcaggtgcagcggctcatcttctgcacgggaaaggtgtactatracctggtgaaggagcggagcagccaggacctggaggagaaagtggccatcacgcgcctggagcagatctctccattccccttcgacctgatcaagcaggaggcagagaagtacccaggtgcggagctggcctggtgtcaggaggagcacaagaacatgggctactatgactacatcagcccacgcttcatgaccatcctgaggcgcgcacggcccatatggtatgttggccgggacccagcggctgcaccagccacaggaaacaggaacactcacctggtgtcactgaagaagtttctggatactgccttcaatctccaggcctttgagggcaagacattttagagctgggcaaaacctgtgtaggtctygctgtgggtttgctggggaccaagggggtgatgaaaaggggaggggcggagctcctgcccargagaggggctgtggggccccaggataaaacagacacagtgacagggccaagagccagcactgctggccttggtgtcatgccagaatctaccaggactgagggagccagaggagtcctrtaggcaggctactgtgctggagcatcccccagctgctcccatcttgctggaatttcttgggcggcttctccacctgtatctcaagacagacacccgggggcctgtgtctgtggccgctcccatcccggcagccctggctgctgctcgccccaccctcgcttatctgtagattcaaagcgatgttctcttctgtgctcttagaagtagggagttcagcagtaacagccaggtgaagcgaacctgctgggtgatttgtttgcgctctgttttatggggcattcctgcgagatgtgtcagcttctgtrtgaaatgcagccacagctcatgtgtaccaaagtagaaaaccaaatcacagagaaataaaaacatgcttcagagagatttgctgttttcatttcatgttgtaa

SEQ ID NO: 5924 - DNA, 3742 bp, Homo sapiens
ggtaattggcacggcgcgcgcgcaccccttccgcgcagccccctgacctgcagcctccggacctcgctgcagcgcggacccggcccgcccgcccgaatgagtcagctgaggctgctgccgtcccgtcttggggtacaggctgcgaggctcctggctgcacatgacgtcccggtgtttggctggcgcagcaggtcctccgggccaccggccaccttcccaagcagcaaaggtggaggcggctccagttacatggaggagatgtacttcgcctggttggaaaacccccagagtgtccacaagtcctgggacagcttcttcagggaagccagcgaggaagccttttctggctctgctcagccacggcccccttctgttgtccatgagagcaggtctgcagtctcaagtcggaccaagaccagcaaattggtggaggaccacctggctgtgcagtccctgatccgggcctaccagatccggggtcaccatgtggcccagctggaccccctgggcattctggatgcagacctggactcctttgtgccctcagacttgatcacaaccattgataaactggccttctatgaccttcaggaggctgaccttgataaggagttccagctgccgacaaccaccttcattgggggctctgaaaacaccctytctctgcgggagatcattcggcgcctggagaacacctactgccagcacattggcctggagttcatgttcatcaaygatgtggagcagtgccartggatccggcagaagtttgagacccctggtgtgatgcagttctccagcgaggagaagcggaccctgctggcccggctagtgcgctccatgaggtttgaagacttcctggcccggaaatggtcctcagagaagcggtttggcctggagggctgtgaagtgatgattcctgccctcaagaccatcatcgacaaatccagcgagatggggattgagaatgtcatcttggggatgccacacaggggaaggctgaacgtgctggccaacgtgatccgcaaggacctggagcagatcttctgccagtttgaccccaagctggaggcggcggaygagggctccggggatgtcaagtaccacctgggcatgtaccatgagaggatcaaccgcgtcaccaaccggaacmtcactctgtcgctggttgccaacccctcccacytggaggcagtggaccctgtggtgcaggggaagacaaaggcagagcagttctaccgtggagatgcccagggcaagaaggtcatgtccatcctggttcatggggacgccgcctttgctggccagggcgtggtatatgagaccttccacctgagcgacctgccctcctacacgaccaatggtaccgtgcacgtcgtcgtcaacaaccagattggattcaccacagacccccgaatggcccgctcctcaccatacccgaccgacgtggcccgggtggtcaatgcgcctatcttccatgtgaatgccgatgacccagaggctgtgatatatgtgtgcagtgtggcagccgaatggagaaacactttcaacaaagatgttgtcgtggacctggtctgttaccgccggcgtggccacaatgagatggacgagcccatgttcacccagccgctcatgtacaagcagatccacagacaggtgcctgtgctgaagaagtacgcagacaagctgattgccgagggcacagtcaccctgcaggagtttgaggaagaaattgccaaatacgaccggatctgtgaggaggcttatggcaggtccaaggataaaaagattctgcatataaagcactggttggactccccctggcctggcttcttcaacgtagatggggagcccaagagcatgacatgcccagccacggggatccctgaggacatsctcacccacatcggcagtgtggccagctctgtgcccctggaggactttaagatccacactggcctctstcgcattctgcggggccgtgcggacatgaccaagaaccggayggtggactgggcgttggcagagtacatggcctttggctccctgctgaaggaaggcatccacgtgcggctcagygggcaggatgtggagaggggcacattcagtcaccggcaccatgttctccatgaccaggaggttgaccgcaggacgtgtgtgcctatgaatcatctctggcctgaccaggccccgtacaccgtgtgcaacagctccctctcggagtacggagtcctgggctttgagctgggctatgccatggccagccccartgccctggtcctctgggaggcccagtttggggacttccacaacacggcccagtgcatcatcgaccagttcatcagcaccggccaggccaagtgggtgcggcataatggcattgtgctgctgctgccccatggcatggaaggcatgggcccagagcactcgtcagcgaggcccgaaaggttcctgcagatgagcaatgatgactcggatgcctaccctgcattcaccaaggacttcgaggtgagccagctctatgactgcaactggatcgtggtcaactgctccacaccggccaactacttccacgtgctgcgccggcagatcctgctgcccttccgcaagccgctgattatcttcacacctaaatctctkctgaggcacccagaggccaagtccagctttgaccaaatggtatccgggaccagcttccagcgggtgattcctgaagatggggccgcagcacgggcccctgagcaggtgcagcggctcatcttctgcacgggaaaggtgtactatracctggtgaaggagcggagcagccaggacctggaggagaaagtggccatcacgcgcctggagcagatctctccattccccttcgacctgatcaagcaggaggcagagaagtacccaggtgcggagctggcctggtgtcaggaggagcacaagaacatgggctactatgactacatcagcccacgcttcatgaccatcctgaggcgcgcacggcccatatggtatgttggccgggacccagcggctgcaccagccacaggaaacaggaacactcacctggtgtcactgaagaagtttctggatactgccttcaatctccaggcctttgagggcaagacattttagagctgggcaaaacctgtgtaggtctygctgtgggtttgctggggaccaagggggtgatgaaaaggggaggggcggagctcctgcccargagaggggctgtggggccccaggataaaacagacacagtgacagggccaagagccagcactgctggccttggtgtcatgccagaatctaccaggactgagggagccagaggagtcctrtaggcaggctactgtgctggagcatcccccagctgctcccatcttgctggaatttcttgggcggcttctccacctgtatctcaagacagacacccgggggcctgtgtctgtggccgctcccatcccggcagccctggctgctgctcgccccaccctcgcttatctgtagattcaaagcgatgttctcttctgtgctcttagaagtagggagttcagcagtaacagccaggtgaagcgaacctgctgggtgatttgtttgcgctctgttttatggggcattcctgcgagatgtgtcagcttctgtrtgaaatgcagccacagctcatgtgtaccaaagtagaaaaccaaatcacagagaaataaaaacatgcttcagagagatttgctgttttcatttcatgttgtaa

SEQ ID NO: 5925 - DNA, 3351 bp, Homo sapiens
gcgcgcgcaccccttccgcgcagccccctgacctgcagcctccggacctcgctgcagcgcggacccggcccgcccgcccgatccggggtcaccatgtggcccagctggaccccctgggcattctggatgcagacctggactcctttgtgccctcagacttgatcacaaccattgataaactggccttctatgaccttcaggaggctgaccttgataaggagttccagctgccgacaaccaccttcattgggggctctgaaaacaccctytctctgcgggagatcattcggcgcctggagaacacctactgccagcacattggcctggagttcatgttcatcaaygatgtggagcagtgccartggatccggcagaagtttgagacccctggtgtgatgcagttctccagcgaggagaagcggaccctgctggcccggctagtgcgctccatgaggtttgaagacttcctggcccggaaatggtcctcagagaagcggtttggcctggagggctgtgaagtgatgattcctgccctcaagaccatcatcgacaaatccagcgagatggggattgagaatgtcatcttggggatgccacacaggggaaggctgaacgtgctggccaacgtgatccgcaaggacctggagcagatcttctgccagtttgaccccaagctggaggcggcggaygagggctccggggatgtcaagtaccacctgggcatgtaccatgagaggatcaaccgcgtcaccaaccggaacmtcactctgtcgctggttgccaacccctcccacytggaggcagtggaccctgtggtgcaggggaagacaaaggcagagcagttctaccgtggagatgcccagggcaagaaggtcatgtccatcctggttcatggggacgccgcctttgctggccagggcgtggtatatgagaccttccacctgagcgacctgccctcctacacgaccaatggtaccgtgcacgtcgtcgtcaacaaccagattggattcaccacagacccccgaatggcccgctcctcaccatacccgaccgacgtggcccgggtggtcaatgcgcctatcttccatgtgaatgccgatgacccagaggctgtgatatatgtgtgcagtgtggcagccgaatggagaaacactttcaacaaagatgttgtcgtggacctggtctgttaccgccggcgtggccacaatgagatggacgagcccatgttcacccagccgctcatgtacaagcagatccacagacaggtgcctgtgctgaagaagtacgcagacaagctgattgccgagggcacagtcaccctgcaggagtttgaggaagaaattgccaaatacgaccggatctgtgaggaggcttatggcaggtccaaggataaaaagattctgcatataaagcactggttggactccccctggcctggcttcttcaacgtagatggggagcccaagagcatgacatgcccagccacggggatccctgaggacatsctcacccacatcggcagtgtggccagctctgtgcccctggaggactttaagatccacactggcctctstcgcattctgcggggccgtgcggacatgaccaagaaccggayggtggactgggcgttggcagagtacatggcctttggctccctgctgaaggaaggcatccacgtgcggctcagygggcaggatgtggagaggggcacattcagtcaccggcaccatgttctccatgaccaggaggttgaccgcaggacgtgtgtgcctatgaatcatctctggcctgaccaggccccgtacaccgtgtgcaacagctccctctcggagtacggagtcctgggctttgagctgggctatgccatggccagccccartgccctggtcctctgggaggcccagtttggggacttccacaacacggcccagtgcatcatcgaccagttcatcagcaccggccaggccaagtgggtgcggcataatggcattgtgctgctgctgccccatggcatggaaggcatgggcccagagcactcgtcagcgaggcccgaaaggttcctgcagatgagcaatgatgactcggatgcctaccctgcattcaccaaggacttcgaggtgagccagctctatgactgcaactggatcgtggtcaactgctccacaccggccaactacttccacgtgctgcgccggcagatcctgctgcccttccgcaagccgctgattatcttcacacctaaatctctkctgaggcacccagaggccaagtccagctttgaccaaatggtatccgggaccagcttccagcgggtgattcctgaagatggggccgcagcacgggcccctgagcaggtgcagcggctcatcttctgcacgggaaaggtgtactatracctggtgaaggagcggagcagccaggacctggaggagaaagtggccatcacgcgcctggagcagatctctccattccccttcgacctgatcaagcaggaggcagagaagtacccaggtgcggagctggcctggtgtcaggaggagcacaagaacatgggctactatgactacatcagcccacgcttcatgaccatcctgaggcgcgcacggcccatatggtatgttggccgggacccagcggctgcaccagccacaggaaacaggaacactcacctggtgtcactgaagaagtttctggatactgccttcaatctccaggcctttgagggcaagacattttagagctgggcaaaacctgtgtaggtctygctgtgggtttgctggggaccaagggggtgatgaaaaggggaggggcggagctcctgcccargagaggggctgtggggccccaggataaaacagacacagtgacagggccaagagccagcactgctggccttggtgtcatgccagaatctaccaggactgagggagccagaggagtcctrtaggcaggctactgtgctggagcatcccccagctgctcccatcttgctggaatttcttgggcggcttctccacctgtatctcaagacagacacccgggggcctgtgtctgtggccgctcccatcccggcagccctggctgctgctcgccccaccctcgcttatctgtagattcaaagcgatgttctcttctgtgctcttagaagtagggagttcagcagtaacagccaggtgaagcgaacctgctgggtgatttgtttgcgctctgttttatggggcattcctgcgagatgtgtcagcttctgtrtgaaatgcagccacagctcatgtgtaccaaagtagaaaaccaaatcacagagaaataaaaacatgcttcagagagatttgctgttttcatttcatgttgtaa

SEQ ID NO: 5926 - DNA, 1759 bp, Homo sapiens
  misc_feature (1)...(1759): n = A,T,C or G
attgtagatgtgaaaaacccttgacacgattgcatgtcacttacgaaggtaccatagaagaaaatggccnaggcatgctacaggtggattttgcaaatcrttttgttggaggtggtgtaaccagtgcaggacttgtgcaagaagaaatccgctttttaatcaatcctgagttgattatttcacggctcttcactgaggtgctggatcacaatgaatgtctaattatcacaggtactgagcagtacagtgaatacacaggctatgctgagacatatcgttggtcccggagccacgaagatgggagtgaaagggacgactggcagcggcgctgcactgagatcgttgccatygatgctcttcacttcagacgctacctcgatcagtttgtgcctgagaaaatgagacgcgagctgaacaaggcttactgtggatttctccgtcctggagtttcttcagagaatctttctgcagtggccacaggaaactggggctgtggtgcctttgggggtgatgccaggttaaaagccttaatacagatattggcagctgctgcagctgagcgagatgtggtttatttcacctttggggactcagaattgatgagagacatttacagcatgcacattttccttactgaaaggaaactcactgttggagatgtgtataagctgttgctacgatactacaatgaagaatgcagaaactgttccacccctggaccagacatcaagctttatccattcatataccatgctgtcgagtcctgtgcagagaccgctgaccattcagggcaaaggayagggacctgaggagccgagcgaatagcatctcctcccacctcccaccagagacgtcctgtttgagctgtcaggtgtaatatatgaattgacttaagttaatataaatgtgtacataatccacatttgtagtcaaggacgcaatctcttccacacatgtgcagttgtcagttggtacatctaaactccctccatcctgactcacgtggacttagatatgttttgtttctattttcttctatttcagtttttcattctttgatgtttatttcttttgtccatcagatctcttgtgaaatcccatggaaggttgtgctcagcctgtcgggtctctttcttcctgcccatatattataccagttgcttctgcagcccgcagatgccagcgatgccaggaaacaagttgaaatccaggaatctctttaactgattttgctaaaaatctccctgtgagccttccactcaactcttaatatgcttgcattgtttaagtttttaaattctgaaaattaataattagggtttttttcatatgtgttgcataatgcaaacctcctaggttaaaatagtttctttatttaagatagaataatttccagaaattgtacttttgaggtatcatttttatctgtaatggtttgtctgtcttttttcctctgatcagtatttttttataccagttttggagactgsctgagatgaaaggaaatgtggaataaaaggaggttttcctgatgtggtgtaaagaaaacagattcaagagaattgaagattttttttgtttcttggtacttttttctttttaaattaggactaatgtttcttttgtggtgcttgaggcatattcatataaccaaagtttgagaactgggaacttcatgctgatttgtacatattgaagtttctctggtattcaaaggttatatagtgaatgaattttcattaataaatcactttgtcag

SEQ ID NO: 5927 - DNA, 2509 bp, Homo sapiens
gttctgagaagacaagagcaagggactgagagcaggcttccgctgcggcgcgcgaacacagccgggacacaacccccagcgtctccacccgctcctcgccaccccggcgggaatgtgaggaaggaaagcccccagcgccgccgcccgccctcgaaggcgtcccagagagcgtcctgggggcccgcggctggagcccttgtgcccgcagcaccgccggactggagcggcgaggcgcaccgggtgccgcttctcggcttccactcttcagaaagagcgcggtggggatcagcgcctttcccgcactcggcacaactccgggaccggcggcgcgcggctggaccgagtcccgcttcccgccagctcacctggagtcgggggcagcccctgcccgcccgcctgcaccccttgtcgctctagcttgcgcgaacctgccgctcctccacgcccaggtagtgagccccgcggctccaggtctctgcagcgccctcggccccatggacagcgcacccatcaccactycctaagtgctggcgccgccgctgtccaagctgcgcactggggtccctcggctcgcccctctctggggtgtccgagaggccrgggagcgtgcaccatgaagtccgcgcttttcacccgcttctttatcctcctgccctggatcctaattgtcatcatcatgctcgacgtggacacgcgcaggccagtgcccccgctcaccccgcgcccctacttctctccctacgcggtgggccgcgggggygcccgactcccgctccgcaggggcggcccggctcacgggacccaaaagcgcaaccagtctcggccgcagccacagccggagccgcagctgcccaccatctatgccatcacgcccacctacagccgcccggtgcagaaagcggagctgacccgcctggccaacacgttccgccaggtggcgcagctgcactggatcctggtggaggacgcggcggcgcgcagcgagctggtgagccgcttcctggcgcgggccgggctgcccagcactcacctgcacgtgcccacgccgcggcgctacaagcggcccgggctgccgcgcgccactgagcagcgcaacgcgggcctcgcctggctgcgccagaggcaccagcaccagcgcgcgcagcccggcgtgctcttcttcgctgacgacgacaacacctatagtctggagctcttccaggagatgcgaaccacccgcaaggtctccgtctggcctgtgggcctggttggtgggcggcgctacgaacgtccgctggtggaaaacggcaaagttgttggctggtacaccggctggagagcagacaggccttttgccatcgacatggcaggatttgctgtaagtcttcaagtcattttgtccaatccaaaagctgkatttaagcgtcgtggatcccagccagggatgcaagaatctgactttctcaaacagataacaacagtcgaagaactggaaccgaaagcaaataactgcactaaggttctcgtgtggcacactcggacagagaaggttaatctagccaacgagccaaagtaccacctggacacagtgaaaattgaggtataaattgaagcagcaactggtgcagtttgtccagccagtggatccatatggaagaggatgtttggagtttaggctacagagcattcaggtattgtttgttttacttcagtacagcagcctttcttgtcatctgatggacatctgtttaaatggagcttgtcagttaacataagctaattggatggttggtacaaaatgtatgttttgtcttcatttgttctgcatgttttctctacaacaactaaattggaagatttttttgtacagtgccgatactgcaagataccactcttgagtatatattttttctttttctccaatttgcccttataattggtagacttgaacaggttggtagacttgaacaggtttttaaaacagacaagtattttgtcagctaaacgttcctgatgattcctgactttgcaatactaagtaatttttggaaggttagtggcagtatacatcataggaaataaaaacccacaaatgaaaaggtctatggagtcatgtttaatgtagggaaataacattttgtcaatactaggcaccataaaatgtaaacacaattactgtcataaacctagatataccttcaaggattgaagattgaaagtggctttgttttagttagttaccctgtttgcatatagtgcagaaaaaggtcttcatgttagcactatgtacattaagaagagatccaaattacaagagaggcagataaaatytgaattctttaagcattcattaaacgaagttttggagtaacatccacgtttatcttcctttcactaatcacgttccctgttaagcacatcataacaacagcacagtgaagtgaatgatgaaataagagcattttgatacactagaaaacagtgctcagtgagacatttacattctatttatatgattaaacatttgatc

SEQ ID NO: 5928 - DNA, 3254 bp, Homo sapiens
acccagtccccctccccctcccctcgccggctagggtggtgcgtgccggcaggccggtcaaggaggcgggacacgtcggcgctaccaccgccaccgcygccgcygcccctcctcccgttccagctgccgctgccgcttcctgggctgagtccgcccgcggtcccggcggcgccaggtgcgttcactctgcccggctccagccagcgtccgccgccgccgtagctgccccaggctccycgccccgctgccgagatggcgacgcgctcctgtcgggagaaggctcagaagctgaacgagcagcaccagctcatcctatccaagcttctgagggaggaggacaacaagtactgcgccgactgcgaggccaaaggtcctcgatgggcttcctggaatattggtgtgtttatttgcatcagatgtgctggaattcatagaaatcttggggttcatatatccagggtcaaatcagtcaacctagaccaatggacagcagaacagatacagtgcatgcaagatatgggaaatactaaagcaagactactctatgaagccaatcttccagagaactttcgaagaccacagacagatcaagcagtggaatttttcatcagagataaatatgaaaagaagaaatactacgataaaaatgccatagctattacaaataaagaaaaggaaaaaaaaaaggaagagaaaaagagagaaaaggagccagaaaagccggcaaaaccacttacagctgaaaagctgcagaagaaagatcagcaactggagcctaaaaaaagtaccagccctaaaaaagctgyggagcccactgtggatcttttaggacttgatggccctgctgtggcaccagtgaccaacgggaacacaacggtgccacccctgaacgatgatctggacatctttggaccgatgatttctaatcccttacctgcaactgtcatgcccccagctcaggggacaccctctgcaccagcagctgcaaccctgtctacagtaacatctggggatctagatttattcactgagcaaactacaaaatcagaagaagtggcaaagaaacaactttccaaagactccatcttatctctgtatggcacaggaaccattcaacagcaaagtactcctggtgtatttatgggacccacaaatataccatttacctcacaagcaccagctgcatttcagggctttccatcgatgggcgtgcctgtgcctgcagctcctggccttataggaaatgtgatgggacagagtccaagcatgatggtgggcatgcccatgcccaatgggtttatgggaaatgcacaaactggtgtgatgccacttcctcagaacgttgttggcccccaaggaggaatggtgggacaaatgggtgcaccccagagtaagtttggcctgccgcaagctcagcagccccagtggagcctctcacagatgaatcagcagatggctggcatgagtatcagtagtgcaacccctactgcaggttttggccagccctccagcacaacagcaggatggtctggaagctcatcaggtcagactctcagcacacaactgtggaaatgaaaactgcaatacaagtttcatccagaactaccacctgacattccttgctgaaacgcatctagttcccctgtttattcatatgcatattttttttctttttacccatttgttcatattaagaawgatctgattgaccgtgttggtctgtactgaktcaatttgatgtggtgaaaagcaggttgataaatcattttatgtcaagggcagctttgctcatatttcccatgatttcatgtactgcattatttgagaagctgctcaacttgcaaaatcagttttcctctcaataaaattatagctctaatgtttgcatataagggaagtagttatcatgttagtaatacctctaatagtataaaccccaccccaaaattagccagtaatcctgtaggaaggtactgtatgatcaaatgtttaatcatataaatagaatgtaaatgtctcactgagcactgttttctagtgtatcaaaatgctcttatttcatcattcacttcactgtgctgttgttatgatgtgcttaacagggaacgtgattagtgaaaggaagataaacgtggatgttactccaaaacttcgtttaatgaatgcttaaagaattcarattttatctgcctctcttgtaatttggatctcttcttaatgtacatagtgctaacatgaagacctttttctgcactatatgcaaacagggtaactaactaaaacaaagccactttcaatcttcaatccttgaaggtatatctaggtttatgacagtaattgtgtttacattttatggtgcctagtattgacaaaatgttatttccctacattaaacatgactccatagaccttttcatttgtgggtttttatttcctatgatgtatactgccactaaccttccaaaaattacttagtattgcaaagtcaggaatcatcaggaacgtttagctgacaaaatacttgtctgttttaaaaacctgttcaagtctaccaacctgttcaagtctaccaattataagggcaaattggagaaaaagaaaaaatatatactcaagagtggtatcttgcagtatcggcactgtacaaaaaaatcttccaatttagttgttgtagagaaaacatgcagaacaaatgaagacaaaacatacattttgtaccaaccatccaattagcttatgttaactgacaagctccatttaaacagatgtccatcagatgacaagaaaggctgctgtactgaagtaaaacaaacaatacctgaatgctctgtagcctaaactccaaacatcctcttccatatggatccactggctggacaaactgcaccagttgctgcttcaatttatacctcaattttcactgtgtccaggtggtactttggctcgttggctagattaaccttctctgtccgagtgtgccacacgagaacctgaaggggaaggaaatagcttgggtagcgcactcttcatggtgacactcgaggtcgggcagcacaagtgtaatgaataccttagtgcagttatttgctttcggttccagttcttcgactgttgttatctgtttgagaaagtcagattcttgcatccctggctgggatccacgacgcttaaatmcagcttttggattggacaaaatgacttgaagacttacagcaaatcctttgtgaaaaataaaaaaaaaaaagagactttaa

SEQ ID NO: 5929 - DNA, 3423 bp, Homo sapiens
acccagtccccctccccctcccctcgccggctagggtggtgcgtgccggcaggccggtcaaggaggcgggacacgtcggcgctaccaccgccaccgcygccgcygcccctcctcccgttccagctgccgctgccgcttcctgggctgagtccgcccgcggtcccggcggcgccaggtgcgttcactctgcccggctccagccagcgtccgccgccgccgtagctgccccaggctccycgccccgctgccgagatggcgacgcgctcctgtcgggagaaggctcagaagctgaacgagcagcaccagctcatcctatccaagcttctgagggaggaggacaacaagtactgcgccgactgcgaggccaaaggtcctcgatgggcttcctggaatattggtgtgtttatttgcatcagatgtgctggaattcatagaaatcttggggttcatatatccagggtcaaatcagtcaacctagaccaatggacagcagaacagatacagtgcatgcaagatatgggaaatactaaagcaagactactctatgaagccaatcttccagagaactttcgaagaccacagacagatcaagcagtggaatttttcatcagagataaatatgaaaagaagaaatactacgataaaaatgccatagctattacaaatatttcctcctctgatgctcctcttcagcctttggtatcctctccttctctgcaagctgctgttgacaaaaataaattggagaaagaaaaggaaaaaaaaaaggaagagaaaaagagagaaaaggagccagaaaagccggcaaaaccacttacagctgaaaagctgcagaagaaagatcagcaactggagcctaaaaaaagtaccagccctaaaaaagctgyggagcccactgtggatcttttaggacttgatggccctgctgtggcaccagtgaccaacgggaacacaacggtgccacccctgaacgatgatctggacatctttggaccgatgatttctaatcccttacctgcaactgtcatgcccccagctcaggggacaccctctgcaccagcagctgcaaccctgtctacagtaacatctggggatctagatttattcactgagcaaactacaaaatcagaagaagtggcaaagaaacaactttccaaagactccatcttatctctgtatggcacaggaaccattcaacagcaaagtactcctggtgtatttatgggacccacaaatataccatttacctcacaagcaccagctgcatttcagggctttccatcgatgggcgtgcctgtgcctgcagctcctggccttataggaaatgtgatgggacagagtccaagcatgatggtgggcatgcccatgcccaatgggtttatgggaaatgcacaaactggtgtgatgccacttcctcagaacgttgttggcccccaaggaggaatggtgggacaaatgggtgcaccccagagtaagtttggcctgccgcaagctcagcagccccagtggagcctctcacagataatgcagaagggtgatgctgttctccagcactccatcagtgcaatctactggccaaygacaaggtggttaaaatgtcctttagtagatgaatcagcagatggctggcatgagtatcagtagtgcaacccctactgcaggttttggccagccctccagcacaacagcaggatggtctggaagctcatcaggtcagactctcagcacacaactgtggaaatgaaaactgcaatacaagtttcatccagaactaccacctgacattccttgctgaaacgcatctagttcccctgtttattcatatgcatattttttttctttttacccatttgttcatattaagaawgatctgattgaccgtgttggtctgtactgaktcaatttgatgtggtgaaaagcaggttgataaatcattttatgtcaagggcagctttgctcatatttcccatgatttcatgtactgcattatttgagaagctgctcaacttgcaaaatcagttttcctctcaataaaattatagctctaatgtttgcatataagggaagtagttatcatgttagtaatacctctaatagtataaaccccaccccaaaattagccagtaatcctgtaggaaggtactgtatgatcaaatgtttaatcatataaatagaatgtaaatgtctcactgagcactgttttctagtgtatcaaaatgctcttatttcatcattcacttcactgtgctgttgttatgatgtgcttaacagggaacgtgattagtgaaaggaagataaacgtggatgttactccaaaacttcgtttaatgaatgcttaaagaattcarattttatctgcctctcttgtaatttggatctcttcttaatgtacatagtgctaacatgaagacctttttctgcactatatgcaaacagggtaactaactaaaacaaagccactttcaatcttcaatccttgaaggtatatctaggtttatgacagtaattgtgtttacattttatggtgcctagtattgacaaaatgttatttccctacattaaacatgactccatagaccttttcatttgtgggtttttatttcctatgatgtatactgccactaaccttccaaaaattacttagtattgcaaagtcaggaatcatcaggaacgtttagctgacaaaatacttgtctgttttaaaaacctgttcaagtctaccaacctgttcaagtctaccaattataagggcaaattggagaaaaagaaaaaatatatactcaagagtggtatcttgcagtatcggcactgtacaaaaaaatcttccaatttagttgttgtagagaaaacatgcagaacaaatgaagacaaaacatacattttgtaccaaccatccaattagcttatgttaactgacaagctccatttaaacagatgtccatcagatgacaagaaaggctgctgtactgaagtaaaacaaacaatacctgaatgctctgtagcctaaactccaaacatcctcttccatatggatccactggctggacaaactgcaccagttgctgcttcaatttatacctcaattttcactgtgtccaggtggtactttggctcgttggctagattaaccttctctgtccgagtgtgccacacgagaacctgaaggggaaggaaatagcttgggtagcgcactcttcatggtgacactcgaggtcgggcagcacaagtgtaatgaataccttagtgcagttatttgctttcggttccagttcttcgactgttgttatctgtttgagaaagtcagattcttgcatccctggctgggatccacgacgcttaaatmcagcttttggattggacaaaatgacttgaagacttacagcaaatcctttgtgaaaaataaaaaaaaaaaagagactttaa

SEQ ID NO: 5930 - DNA, 3254 bp, Homo sapiens
ttaaaggacccaaagtatgtacagcatatatagtataggatgtctggctcagtgtgggtacttgcatagatgttaatttcttataccaaaaaccccaaatgaacytgaattgaatttaaagtgtggtgatgcattgatagtggtggtggtgatgtaggaattaagaattgtcatttacttttctttctagaattagtttggatgagttttgttcagtgagaaaatttcctgaaagaggtagacttctttaagagaaagaaaagtagtttacagaatgtagttgcagaaataatgtgaaagagagcacagattgaggagtaggaaaattaaatttagagtcccarctttgtggagtggcgtgaataaagggaagtgtacatatcactgaattcatgcttttccttaagttatctgttttcagagcagtggaatttttcatcagagataaatatgaaaagaagaaatactacgataaaaatgccatagctattacaaatatttcctcctctgatgctcctcttcagcctttggtatcctctccttctctgcaagctgctgttgacaaaaataaattggagaaagaaaaggaaaaaaaaaaggaagagaaaaagagagaaaaggagccagaaaagccggcaaaaccacttacagctgaaaagctgcagaagaaagatcagcaactggagcctaaaaaaagtaccagccctaaaaaagctgyggagcccactgtggatcttttaggacttgatggccctgctgtggcaccagtgaccaacgggaacacaacggtgccacccctgaacgatgatctggacatctttggaccgatgatttctaatcccttacctgcaactgtcatgcccccagctcaggggacaccctctgcaccagcagctgcaaccctgtctacagtaacatctggggatctagatttattcactgagcaaactacaaaatcagaagaagtggcaaagaaacaactttccaaagactccatcttatctctgtatggcacaggaaccattcaacagcaaagtactcctggtgtatttatgggacccacaaatataccatttacctcacaagcaccagctgcatttcagggctttccatcgatgggcgtgcctgtgcctgcagctcctggccttataggaaatgtgatgggacagagtccaagcatgatggtgggcatgcccatgcccaatgggtttatgggaaatgcacaaactggtgtgatgccacttcctcagaacgttgttggcccccaaggaggaatggtgggacaaatgggtgcaccccagagtaagtttggcctgccgcaagctcagcagccccagtggagcctctcacagataatgcagaagggtgatgctgttctccagcactccatcagtgcaatctactggccaaygacaaggtggttaaaatgtcctttagtagatgaatcagcagatggctggcatgagtatcagtagtgcaacccctactgcaggttttggccagccctccagcacaacagcaggatggtctggaagctcatcaggtcagactctcagcacacaactgtggaaatgaaaactgcaatacaagtttcatccagaactaccacctgacattccttgctgaaacgcatctagttcccctgtttattcatatgcatattttttttctttttacccatttgttcatattaagaawgatctgattgaccgtgttggtctgtactgaktcaatttgatgtggtgaaaagcaggttgataaatcattttatgtcaagggcagctttgctcatatttcccatgatttcatgtactgcattatttgagaagctgctcaacttgcaaaatcagttttcctctcaataaaattatagctctaatgtttgcatataagggaagtagttatcatgttagtaatacctctaatagtataaaccccaccccaaaattagccagtaatcctgtaggaaggtactgtatgatcaaatgtttaatcatataaatagaatgtaaatgtctcactgagcactgttttctagtgtatcaaaatgctcttatttcatcattcacttcactgtgctgttgttatgatgtgcttaacagggaacgtgattagtgaaaggaagataaacgtggatgttactccaaaacttcgtttaatgaatgcttaaagaattcarattttatctgcctctcttgtaatttggatctcttcttaatgtacatagtgctaacatgaagacctttttctgcactatatgcaaacagggtaactaactaaaacaaagccactttcaatcttcaatccttgaaggtatatctaggtttatgacagtaattgtgtttacattttatggtgcctagtattgacaaaatgttatttccctacattaaacatgactccatagaccttttcatttgtgggtttttatttcctatgatgtatactgccactaaccttccaaaaattacttagtattgcaaagtcaggaatcatcaggaacgtttagctgacaaaatacttgtctgttttaaaaacctgttcaagtctaccaacctgttcaagtctaccaattataagggcaaattggagaaaaagaaaaaatatatactcaagagtggtatcttgcagtatcggcactgtacaaaaaaatcttccaatttagttgttgtagagaaaacatgcagaacaaatgaagacaaaacatacattttgtaccaaccatccaattagcttatgttaactgacaagctccatttaaacagatgtccatcagatgacaagaaaggctgctgtactgaagtaaaacaaacaatacctgaatgctctgtagcctaaactccaaacatcctcttccatatggatccactggctggacaaactgcaccagttgctgcttcaatttatacctcaattttcactgtgtccaggtggtactttggctcgttggctagattaaccttctctgtccgagtgtgccacacgagaacctgaaggggaaggaaatagcttgggtagcgcactcttcatggtgacactcgaggtcgggcagcacaagtgtaatgaataccttagtgcagttatttgctttcggttccagttcttcgactgttgttatctgtttgagaaagtcagattcttgcatccctggctgggatccacgacgcttaaatmcagcttttggattggacaaaatgacttgaagacttacagcaaatcctttgtgaaaaataaaaaaaaaaaagagactttaa

SEQ ID NO: 5931 - DNA, 3335 bp, Homo sapiens
acccagtccccctccccctcccctcgccggctagggtggtgcgtgccggcaggccggtcaaggaggcgggacacgtcggcgctaccaccgccaccgcygccgcygcccctcctcccgttccagctgccgctgccgcttcctgggctgagtccgcccgcggtcccggcggcgccaggtgcgttcactctgcccggctccagccagcgtccgccgccgccgtagctgccccaggctccycgccccgctgccgagatggcgacgcgctcctgtcgggagaaggctcagaagctgaacgagcagcaccagctcatcctatccaagcttctgagggaggaggacaacaagtactgcgccgactgcgaggccaaaggtcctcgatgggcttcctggaatattggtgtgtttatttgcatcagatgtgctggaattcatagaaatcttggggttcatatatccagggtcaaatcagtcaacctagaccaatggacagcagaacagatacagtgcatgcaagatatgggaaatactaaagcaagactactctatgaagccaatcttccagagaactttcgaagaccacagacagatcaagcagtggaatttttcatcagagataaatatgaaaagaagaaatactacgataaaaatgccatagctattacaaatatttcctcctctgatgctcctcttcagcctttggtatcctctccttctctgcaagctgctgttgacaaaaataaattggagaaagaaaaggaaaaaaaaaaggaagagaaaaagagagaaaaggagccagaaaagccggcaaaaccacttacagctgaaaagctgcagaagaaagatcagcaactggagcctaaaaaaagtaccagccctaaaaaagctgyggagcccactgtggatcttttaggacttgatggccctgctgtggcaccagtgaccaacgggaacacaacggtgccacccctgaacgatgatctggacatctttggaccgatgatttctaatcccttacctgcaactgtcatgcccccagctcaggggacaccctctgcaccagcagctgcaaccctgtctacagtaacatctggggatctagatttattcactgagcaaactacaaaatcagaagaagtggcaaagaaacaactttccaaagactccatcttatctctgtatggcacaggaaccattcaacagcaaagtactcctggtgtatttatgggacccacaaatataccatttacctcacaagcaccagctgcatttcagggctttccatcgatgggcgtgcctgtgcctgcagctcctggccttataggaaatgtgatgggacagagtccaagcatgatggtgggcatgcccatgcccaatgggtttatgggaaatgcacaaactggtgtgatgccacttcctcagaacgttgttggcccccaaggaggaatggtgggacaaatgggtgcaccccagagtaagtttggcctgccgcaagctcagcagccccagtggagcctctcacagatgaatcagcagatggctggcatgagtatcagtagtgcaacccctactgcaggttttggccagccctccagcacaacagcaggatggtctggaagctcatcaggtcagactctcagcacacaactgtggaaatgaaaactgcaatacaagtttcatccagaactaccacctgacattccttgctgaaacgcatctagttcccctgtttattcatatgcatattttttttctttttacccatttgttcatattaagaawgatctgattgaccgtgttggtctgtactgaktcaatttgatgtggtgaaaagcaggttgataaatcattttatgtcaagggcagctttgctcatatttcccatgatttcatgtactgcattatttgagaagctgctcaacttgcaaaatcagttttcctctcaataaaattatagctctaatgtttgcatataagggaagtagttatcatgttagtaatacctctaatagtataaaccccaccccaaaattagccagtaatcctgtaggaaggtactgtatgatcaaatgtttaatcatataaatagaatgtaaatgtctcactgagcactgttttctagtgtatcaaaatgctcttatttcatcattcacttcactgtgctgttgttatgatgtgcttaacagggaacgtgattagtgaaaggaagataaacgtggatgttactccaaaacttcgtttaatgaatgcttaaagaattcarattttatctgcctctcttgtaatttggatctcttcttaatgtacatagtgctaacatgaagacctttttctgcactatatgcaaacagggtaactaactaaaacaaagccactttcaatcttcaatccttgaaggtatatctaggtttatgacagtaattgtgtttacattttatggtgcctagtattgacaaaatgttatttccctacattaaacatgactccatagaccttttcatttgtgggtttttatttcctatgatgtatactgccactaaccttccaaaaattacttagtattgcaaagtcaggaatcatcaggaacgtttagctgacaaaatacttgtctgttttaaaaacctgttcaagtctaccaacctgttcaagtctaccaattataagggcaaattggagaaaaagaaaaaatatatactcaagagtggtatcttgcagtatcggcactgtacaaaaaaatcttccaatttagttgttgtagagaaaacatgcagaacaaatgaagacaaaacatacattttgtaccaaccatccaattagcttatgttaactgacaagctccatttaaacagatgtccatcagatgacaagaaaggctgctgtactgaagtaaaacaaacaatacctgaatgctctgtagcctaaactccaaacatcctcttccatatggatccactggctggacaaactgcaccagttgctgcttcaatttatacctcaattttcactgtgtccaggtggtactttggctcgttggctagattaaccttctctgtccgagtgtgccacacgagaacctgaaggggaaggaaatagcttgggtagcgcactcttcatggtgacactcgaggtcgggcagcacaagtgtaatgaataccttagtgcagttatttgctttcggttccagttcttcgactgttgttatctgtttgagaaagtcagattcttgcatccctggctgggatccacgacgcttaaatmcagcttttggattggacaaaatgacttgaagacttacagcaaatcctttgtgaaaaataaaaaaaaaaaagagactttaa

SEQ ID NO: 5932 - DNA, 3342 bp, Homo sapiens
acccagtccccctccccctcccctcgccggctagggtggtgcgtgccggcaggccggtcaaggaggcgggacacgtcggcgctaccaccgccaccgcygccgcygcccctcctcccgttccagctgccgctgccgcttcctgggctgagtccgcccgcggtcccggcggcgccaggtgcgttcactctgcccggctccagccagcgtccgccgccgccgtagctgccccaggctccycgccccgctgccgagatggcgacgcgctcctgtcgggagaaggctcagaagctgaacgagcagcaccagctcatcctatccaagcttctgagggaggaggacaacaagtactgcgccgactgcgaggccaaaggtcctcgatgggcttcctggaatattggtgtgtttatttgcatcagatgtgctggaattcatagaaatcttggggttcatatatccagggtcaaatcagtcaacctagaccaatggacagcagaacagatacagtgcatgcaagatatgggaaatactaaagcaagactactctatgaagccaatcttccagagaactttcgaagaccacagacagatcaagcagtggaatttttcatcagagataaatatgaaaagaagaaatactacgataaaaatgccatagctattacaaataaagaaaaggaaaaaaaaaaggaagagaaaaagagagaaaaggagccagaaaagccggcaaaaccacttacagctgaaaagctgcagaagaaagatcagcaactggagcctaaaaaaagtaccagccctaaaaaagctgyggagcccactgtggatcttttaggacttgatggccctgctgtggcaccagtgaccaacgggaacacaacggtgccacccctgaacgatgatctggacatctttggaccgatgatttctaatcccttacctgcaactgtcatgcccccagctcaggggacaccctctgcaccagcagctgcaaccctgtctacagtaacatctggggatctagatttattcactgagcaaactacaaaatcagaagaagtggcaaagaaacaactttccaaagactccatcttatctctgtatggcacaggaaccattcaacagcaaagtactcctggtgtatttatgggacccacaaatataccatttacctcacaagcaccagctgcatttcagggctttccatcgatgggcgtgcctgtgcctgcagctcctggccttataggaaatgtgatgggacagagtccaagcatgatggtgggcatgcccatgcccaatgggtttatgggaaatgcacaaactggtgtgatgccacttcctcagaacgttgttggcccccaaggaggaatggtgggacaaatgggtgcaccccagagtaagtttggcctgccgcaagctcagcagccccagtggagcctctcacagataatgcagaagggtgatgctgttctccagcactccatcagtgcaatctactggccaaygacaaggtggttaaaatgtcctttagtagatgaatcagcagatggctggcatgagtatcagtagtgcaacccctactgcaggttttggccagccctccagcacaacagcaggatggtctggaagctcatcaggtcagactctcagcacacaactgtggaaatgaaaactgcaatacaagtttcatccagaactaccacctgacattccttgctgaaacgcatctagttcccctgtttattcatatgcatattttttttctttttacccatttgttcatattaagaawgatctgattgaccgtgttggtctgtactgaktcaatttgatgtggtgaaaagcaggttgataaatcattttatgtcaagggcagctttgctcatatttcccatgatttcatgtactgcattatttgagaagctgctcaacttgcaaaatcagttttcctctcaataaaattatagctctaatgtttgcatataagggaagtagttatcatgttagtaatacctctaatagtataaaccccaccccaaaattagccagtaatcctgtaggaaggtactgtatgatcaaatgtttaatcatataaatagaatgtaaatgtctcactgagcactgttttctagtgtatcaaaatgctcttatttcatcattcacttcactgtgctgttgttatgatgtgcttaacagggaacgtgattagtgaaaggaagataaacgtggatgttactccaaaacttcgtttaatgaatgcttaaagaattcarattttatctgcctctcttgtaatttggatctcttcttaatgtacatagtgctaacatgaagacctttttctgcactatatgcaaacagggtaactaactaaaacaaagccactttcaatcttcaatccttgaaggtatatctaggtttatgacagtaattgtgtttacattttatggtgcctagtattgacaaaatgttatttccctacattaaacatgactccatagaccttttcatttgtgggtttttatttcctatgatgtatactgccactaaccttccaaaaattacttagtattgcaaagtcaggaatcatcaggaacgtttagctgacaaaatacttgtctgttttaaaaacctgttcaagtctaccaacctgttcaagtctaccaattataagggcaaattggagaaaaagaaaaaatatatactcaagagtggtatcttgcagtatcggcactgtacaaaaaaatcttccaatttagttgttgtagagaaaacatgcagaacaaatgaagacaaaacatacattttgtaccaaccatccaattagcttatgttaactgacaagctccatttaaacagatgtccatcagatgacaagaaaggctgctgtactgaagtaaaacaaacaatacctgaatgctctgtagcctaaactccaaacatcctcttccatatggatccactggctggacaaactgcaccagttgctgcttcaatttatacctcaattttcactgtgtccaggtggtactttggctcgttggctagattaaccttctctgtccgagtgtgccacacgagaacctgaaggggaaggaaatagcttgggtagcgcactcttcatggtgacactcgaggtcgggcagcacaagtgtaatgaataccttagtgcagttatttgctttcggttccagttcttcgactgttgttatctgtttgagaaagtcagattcttgcatccctggctgggatccacgacgcttaaatmcagcttttggattggacaaaatgacttgaagacttacagcaaatcctttgtgaaaaataaaaaaaaaaaagagactttaa

SEQ ID NO: 5933 - DNA, 1675 bp, Homo sapiens
cagaagctgctgttagctcgccggtcctcggcacgccgcccgttcgcccctgcgctgtccgcccttcccctagcgttacttccggtccctcgctgagggggttcgtgcggctcccaggaggcgtgaaccgcggaccatgagcgtgggcttcatcggggccggccagctggcctatgctctggcgcggggcttcacggccgcagcatcctgtcggctcacaagataatagccagctccccagaaatgaacctgcccacggtgtccgcgctcaggaagatgggtgtgaacctgacacgcagcaacaaggagacggtgaagcacagcgacgtcctgtttctggctgtgaagccacatatcatccccttcatcctggatgagattggggccgacgtgcaagccagacacatcgtggtctcctgtgcggctggtgtcaccatcagctctgtggagaagaagctgatggcattccagccagcccccaaagtgattcgctgcatgaccaacacacctgtggtagtgcaggaaggcgctacagtgtacgccacgggcacccatgccctggtggaggatgggcagctcctggagcagctcatgagcagcgtgggcttctgcactgaggtggaagaggacctcatcgatgccgtcacggggctcagtggcagcgggcctgcctatgcattcatggctctggacgcattggctgatggtggggtgaagatgggtttgccacggcgcytggcaatccaactcggggcccaggctttgctgggagctgccaagatgctgctggactcggagcagcatccatgccagcttaaggacaatgtctgctcccctgggggagccaccatccacgccctgcactttctagagagtgggggcttccgctctctgctcatcaatgcagttgaggcctcctgtatccgaacacgagagctacagtccatggccgaccaagaaaagatctccccagctgcccttaagaagaccctcttagacagagtgaagctggaatcccccacagtctccacactgaccccctccagcccagggaagctcctcacaagaagcctggccctgggaggcaagaaggactaaggcagcatctgtcccctctgtgattcagagcccttagttgagagcccctgccgcccctgccacccccctgccccgctcccaccattgcccctcctcagctgtgcaaggagaaagcatgcttaggaagttttcaggtccttgtgataaaacctccttaaatctgttcagaccaagcaatgcgagcttcctctcctgtcccatgttggaagttgctctgaaggggtggtagatgctggaagccagacacaaccctgcgtacgctgctcagttggtggagactggggctgggactggagtcagcccagctgggaggaggggctggggaggatctgcagctgaagcccgaggcagggttggtgtgatsccarggcaaagtggtgaggagaaaacaggaaacgggctttctctgaattggtaaatgggaaagaagtgagcaacttaagattgtcacaattaatcacaagtgtacaggattagactgggtttatatttaactcttgcttcataggtgtaccatttaaagagtgttatttaatgctaagtttaactgctttaataaagtttatttttaaatatc

SEQ ID NO: 5934 - DNA, 1292 bp, Homo sapiens
ttgcaccatcccagaagctgctgttagctcgccggtcctcggcacgccgcccgttcgcccctgcgctgtccgcccttcccctagcgttacttccggtccctcgctgagggggttcgtgcggctcccaggaggcgtgaaccgcggaccatgagcgtgggcttcatcggggccggccagctggcctatgctctggcgcggggcttcacggccgcatcctgtcggctcacaagataatagccagctccccagaaatgaacctgcccacggtgtccgcgctcaggaagatgggtgtgaacctgacacgcagcaacaaggagacggtgaagcacagcgacgtcctgtttctggctgtgaagccacatatcatccccttcatcctggatgagattggggccgacgtgcaagccagacacatcgtggtctcctgtgcggctggtgtcaccatcagctctgtggagaagaagctgatggcattccagccagcccccaaagtgattcgctgcatgaccaacacacctgtggtagtgcaggaaggcgctacagtgtacgccacgggcacccatgccctggtggaggatgggcagctcctggagcagctcatgagcagcgtgggcttctgcactgaggtggaagaggacctcatcgatgccgtcacggggctcagtggcagcgggcctgcctatgcattcatggctctggacgcattggctgatggtggggtgaagatgggtttgccacggcgcytggcaatccaactcggggcccaggctttgctgggagctgccaagatgctgctggactcggagcagcatccatgccagcttaaggacaatgtctgctcccctgggggagccaccatccacgccctgcactttctagagagtgggggcttccgctctctgctcatcaatgcagttgaggcctcctgtatccgaacacgagagctacagtccatggccgaccaagaaaagatctccccagctgcccttaagaagaccctcttagacagagtgaagctggaatcccccacagtctccacactgaccccctccagcccagggaagctcctcacaagaagcctggccctgggaggcaagaaggactaaggcagcatctgtcccctctgtgattcagagcccttagttgagatgcccctcctcagctgtgcaaggagaaagcatgcttaggaagttttcaggtccttgtgataaaacctccttaaatctgttcagaccaagcaatgcgagcttcctctcctgtcccatgttggaagttgctctgaaggggtggta

SEQ ID NO: 5935 - DNA, 1745 bp, Homo sapiens
ccacgtggcctaaggcgccatcagccgcccgggagatatccgccgggggagaatagggttgcaccatcccagaagctgctgttagctcgccggtcctcggcacgccgcccgttcgcccctgcgctgtccgcccttcccctagcgttacttccggtccctcgctgagggggttcgtgcggctcccaggaggcgtgaaccgcggaccatgagcgtgggcttcatcggggccggccagctggcctatgctctggcgcggggcttcacggccgcaggcatcctgtcggctcacaagataatagccagctccccagaaatgaacctgcccacggtgtccgcgctcaggaagatgggtgtgaacctgacacgcagcaacaaggagacggtgaagcacagcgacgtcctgtttctggctgtgaagccacatatcatccccttcatcctggatgagattggggccgacgtgcaagccagacacatcgtggtctcctgtgcggctggtgtcaccatcagctctgtggagaagaagctgatggcattccagccagcccccaaagtgattcgctgcatgaccaacacacctgtggtagtgcaggaaggcgctacagtgtacgccacgggcacccatgccctggtggaggatgggcagctcctggagcagctcatgagcagcgtgggcttctgcactgaggtggaagaggacctcatcgatgccgtcacggggctcagtggcagcgggcctgcctatgcattcatggctctggacgcattggctgatggtggggtgaagatgggtttgccacggcgcytggcaatccaactcggggcccaggctttgctgggagctgccaagatgctgctggactcggagcagcatccatgccagcttaaggacaatgtctgctcccctgggggagccaccatccacgccctgcactttctagagagtgggggcttccgctctctgctcatcaatgcagttgaggcctcctgtatccgaacacgagagctacagtccatggccgaccaagaaaagatctccccagctgcccttaagaagaccctcttagacagagtgaagctggaatcccccacagtctccacactgaccccctccagcccagggaagctcctcacaagaagcctggccctgggaggcaagaaggactaaggcagcatctgtcccctctgtgattcagagcccttagttgagagcccctgccgcccctgccacccccctgccccgctcccaccattgcccctcctcagctgtgcaaggagaaagcatgcttaggaagttttcaggtccttgtgataaaacctccttaaatctgttcagaccaagcaatgcgagcttcctctcctgtcccatgttggaagttgctctgaaggggtggtagatgctggaagccagacacaaccctgcgtacgctgctcagttggtggagactggggctgggactggagtcagcccagctgggaggaggggctggggaggatctgcagctgaagcccgaggcagggttggtgtgatsccarggcaaagtggtgaggagaaaacaggaaacgggctttctctgaattggtaaatgggaaagaagtgagcaacttaagattgtcacaattaatcacaagtgtacaggattagactgggtttatatttaactcttgcttcataggtgtaccatttaaagagtgttatttaatgctaagtttaactgctttaataaagtttatttttaaatatc

SEQ ID NO: 5936 - DNA, 1157 bp, Homo sapiens
atgagcgtgggcttcatcggggccggccagctggcctatgctctggcgcggggcttcacggccgcaggcaagcgcgcatcctgtcggctcacaagataatagccagctccccagaaatgaacctgcccacggtgtccgcgctcaggaagatgggtgtgaacctgacacgcagcaacaaggagacggtgaagcacagcgacgtcctgtttctggctgtgaagccacatatcatccccttcatcctggatgagattggggccgacgtgcaagccagacacatcgtggtctcctgtgcggctggtgtcaccatcagctctgtggagaagaagctgatggcattccagccagcccccaaagtgattcgctgcatgaccaacacacctgtggtagtgcaggaaggcgctacagtgtacgccacgggcacccatgccctggtggaggatgggcagctcctggagcagctcatgagcagcgtgggcttctgcactgaggtggaagaggacctcatcgatgccgtcacggggctcagtggcagcgggcctgcctatgcattcatggctctggacgcattggctgatggtggggtgaagatgggtttgccacggcgcytggcaatccaactcggggcccaggctttgctgggagctgccaagatgctgctggactcggagcagcatccatgccagcttaaggacaatgtctgctcccctgggggagccaccatccacgccctgcactttctagagagtgggggcttccgctctctgctcatcaatgcagttgaggcctcctgtatccgaacacgagagctacagtccatggccgaccaagaaaagatctccccagctgcccttaagaagaccctcttagacagagtgaagctggaatcccccacagtctccacactgaccccctccagcccagggaagctcctcacaagaagcctggccctgggaggcaagaaggactaaggcagcatctgtcccctctgtgattcagagcccttagttgagatgcccctcctcagctgtgcaaggagaaagcatgcttaggaagttttcaggtccttgtgataaaacctccttaaatctgttcagaccaagcaatgcgagcttcctctcctgtcccatgttggaagttgctctgaaggggtggta

SEQ ID NO: 5937 - DNA, 3123 bp, Homo sapiens
cacarcgtgtgttgctttccgctcctcggaacatccgggagagttgacttccggcggcttgtgggagtgctggttctgtcctccttgcgggtgcggagatggttgtcttggttacgggtcctaacggtcccctgccttgaaatcccttgttgagggcctgcaaccttgtgcttccgaccggagacgcctttggtccctcggtgtctgcactggctgctggtcaaggcttcagtgtggagtaattgacactttcgagaatattaaaatcaaattagagaagaaaactgatccataataataaaaatgtctcgaaaaatttcaaaggagtcaaaaaaagtgaacatctctagttctctggaatctgaagatattagtttagaaacaacagttcctacggatgatatttcctcatcagaagagcgagagggcaaagtcagaatcaccaggcagctaattgaacgaaaagaactacttcataatattcagttactaaaaattgagctatcccagaaaactatgatgatcgacaatttgaaagtggattatcttacaaagattgaagaattggaggagaaacttaatgatgcacttcaccagaagcagctactaacattgagattagacaaccaattggcttttcaacagaaagatgccagcaaatatcaagaattaatgaaacaagaaatggaaaccattttgttgagacagaaacaactagaagagacaaatcttcagctaagagaaaaagctggagatgttcgtcgaaacctgcgtgactttgagttgacagaagagcaatatrttaaattaaaagcttttcctgaagatcagctttctattcctgaatatgtatctgttcgcttctatgagctagtgaatccattaagaaaggaaatctgtgaactacaagtgaaaaagaatatcctagcagaagaattaagtacaaacaaaaaccaactgaagcagctgacagagacatatgaggaagatcgaaaaaactactctgaagttcaaattagwtgtcaacgtttggccttagaattagcagacacaaaacagttaattcagcaaggtgactaccgtcaagagaactatgataaagtcaagagtgaacgtgatgcacttgaacaggaagtaattgagcttaggagaaaacatgaaatacttgaagcctctcacatgattcaaacaaaagaacraagtgaattatcaaaagaggtagtcaccttagagcaaactgttactttactgcaaaaggataaagaatatcttaatcgccaaaacatggagcttagtgttcgctgtgctcatgaagaggatcgccttgaaagacttcaagctcaactggaagaaagcaaaaaggctagagaagagatgtatgaaaaatatgtagcatccagagaccattataaaacagaatatgaaaataaactacatgatgaactagaacaaatcagattgaaaaccaaccaagaaattgatcaacttcgaaatgcctctagggaaatgtatgaacgagaaaacagaaatctccgagaagcaagggataatgctgtggctgaaaaggaacgagcagtgatggctgaaaaggatgctttagaaaaacacgatcagctcttagacaggtacagagaactacaacttagtacagaaagcaaagtaacagaatttctccatcaaagtaaattaaaatcttttgaaagtgagcgtgttcaacttctgcaagaggaaacagcaagaaatctcacacagtgtcaattggaatgtgaaaaatatcagaaaaaattggaggttttaaccaaagaattttatagtctccaagcctcttctgaaaaacgcattactgaacttcaagcacagaactcagagcatcaagcaaggctagacatttatgagaaactggaaaaagagcttgatgaaataataatgcaaactgcagaaattgaaaatgaagatgaggctgaaagggttcttttttcctacggctatggtgctaatgttcccacaacagccaaaagacgactaaagcaaagtgttcacttggcaagaagagtgcttcaattagaaaaacaaaactcgctgattttaaaagatctggaacatcgaaaggaccaagtaacacagctttcacaagagcttgacagagccaattcgctattaaaccagactcaacagccttacaggtatctcattgaatcagtgcgtcagagagattctaagattgattcactgacggaatctattgcacaacttgagaaagatgtcagcaacttaaataaagaaaagtcagctttactacagacgaagaatcaaatggcattagatttagaacaacttctaaatcatcgtgaggaattggcagcaatgaaacagattctcgttaagatgcatagtaaacattctgagaacagcttacttctcactaaaacagaaccaaaacatgtgacagaaaatcagaaatcaaagactttgaatgtgcctaaagagcatgaagacaatatatttacacctaaaccaacactctttactaaaaaagaagcacctgagtggtctaagaaacaaaagatgaagacctagtgttttggatgggaagcacctgtagaccattatatactcctgaagttctttttctgatggaaaacaaaattcagcttaatcgtgtactcagcattttttaaataacaatgtttatttgaactaatattaaattaacaaattcagtgtaatcaaaatgtgtaaagaacaatcaatatactttawttttttttctattttataaaataaatatatatgctatgctttaaattttggagctttcataaatgttcaatgcattttaagtgtgtggcttataaatattttggtgagtatttttctatactacgtaaattctgagtttaaatgtcatacacaaatactaagacactttgcatttttaaaaattaagaatcatttgtgaagtccactacgaggtacttcaaaagcccagtaatggtggtcagataccatgtagatggatacagattgttgactcttttgaagttgtttttttcttatattttatattaccattaaccaataaaatctggcagaaagtctgctattccattggtaaagtgaaaa

SEQ ID NO: 5938 - DNA, 1503 bp, Homo sapiens
cacarcgtgtgttgctttccgctcctcggaacatccgggagagttgacttccggcggcttgtgggagtgctggttctgtcctccttgcgggtgcggagatggttgtcttggttacgggtcctaacggtcccctgccttgaaatcccttgttgagggcctgcaaccttgtgcttccgaccggagacgcctttggtccctcggtgtctgcactggctgctggtcaaggcttcagtgtggagtaattgacactttcgagaatattaaaatcaaattagagaagaaaactgatccataataataaaaatgtctcgaaaaatttcaaaggagtcaaaaaaagtgaacatctctagttctctggaatctgaagatattagtttagaaacaacagttcctacggatgatatttcctcatcagaagagcgagagggcaaagtcagaatcaccaggcagctaattgaacgaaaagaactacttcataatattcagttactaaaaattgagctatcccagaaaactatgatgatcgacaatttgaaagtggattatcttacaaagattgaagaattggaggagaaacttaatgatgcacttcaccagaagcagctactaacattgagattagacaaccaattggcttttcaacagaaagatgccagcaaatatcaagaattaatgaaacaagaaatggaaaccattttgttgagacagaaacaactagaagagacaaatcttcagctaagagaaaaagctggagatgttcgtcgaaacctgcgtgactttgagttgacagaagagcaatatrttaaattaaaagcttttcctgaagatcagctttctattcctgaatatgtatctgttcgcttctatgagctagtgaatccattaagaaaggaaatctgtgaactacaagtgaaaaagaatatcctagcagaagaattaagtacaaacaaaaaccaactgaagcagctgacagagacatatgaggaagatcgaaaaaactactctgaagttcaaattagwtgtcaacgtttggccttagaattagcagacacaaaacagttaattcagcaaggtgactaccgtcaagagaactatgataaagtcaagagtgaacgtgatgcacttgaacaggaagtaattgagcttaggagaaaacatgaaatacttgaagcctctcacatgattcaaacaaaagaacraagtgaattatcaaaagaggtagtcaccttagagcaaactgttactttactgcaaaaggataaagaatatcttaatcgccaaaacatggagcttagtgttcgctgtgctcatgaagaggatcgccttgaaagacttcaagctcaactggaagaaagcaaaaaggctagagaagagatagaccattataaaacagaatatgaaaataaactacatgatgaactagaacaaatcagattgaaaaccaaccaagaaattgatcaacttcgaaatgcctctagggaaatgtatgaacgagaaaacagg

SEQ ID NO: 5939 - DNA, 2957 bp, Homo sapiens
tgccartcggaagtgcggccgccggaactggctgttggtgggggtgcagcactgagccgccgacggggcgggtgggctttgctgccgagcaggcggcgccgtcttggggcctagcggcgaggcgacccgcacagtactgtaagattgatgttaaaggcatggtgttcaccccacttcatcagcgtacataagttatctcttcttttggacccktattttatgccataatgcaacaagctttagaactagctttggatcgtgcagagtatgtcattgaaagtgcccgacagagacctcctaaaaggaaatacctatcaagtggaagaaaatctgtatttcaaaaactttatgacttgtatattgaagaatgtgaaaaagaacctgaagttaagcagaaattaagaagaaatgtgaacttgttagagaagcttgttatgcaagagactttgtcatgtttagtggtcaatctatacccaggaaatgagggatattctctgatgctcaggggaaaaaacggatcagattccgagaccattcgactgccctatgaagaaggagagttgcttgaatatttggatgcagaagaattacctcctattttggttgatctcctagaaaaatctcaggttaatatttttcattgcggatgtgtcatagcagaaatacgtgactacaggcagtccagtaacrtgaaatctcctggttaccaaagtcggcacattctcttacgtccaacaatgcagactttaatttgtgatgtacattcaataacaagtgataaccacaaatggacccaggaagacaaacttttgcttgagagccagctcatcctagctacagctgaaccactctgtcttgatccttctatagcagtcacctgcactgcaaacagactgctctataacaagcaaaagatgaacactcgcccaatgaaacggtgtttcaagaggtattccagatcctctctgaatcggcagcaagatctatctcattgtccacctcctcctcagctgaggttacttgatttcttacaaaaaagaaaggaaagaaaagcaggtcagcattatgacctcaaaatttctaaggcaggaaattgtgtagatatgtggaaacggagtccctgtaatttggccataccttctgaagtagatgtggagaaatatgctaaagtggaaaagtctatcaaatctgatgactcacagccaacagtctggccagcccatgatgtaaaagatgattatgtatttgaatgtgaagctggtactcagtatcagaaaacaaagctgaccatcttgcagtcgcttggagatccactttactatggtaaaatacagccatgtaaagcagatgaagaaagtgacagccagatgtctccatcacactcgtccacagatgatcattcaaattggttcattattggatcaaagaccgatgctgagagggtagtcaatcagtaccaagaattagtccagaatgaagccaaatgtccggtcaagatgtcacacagctccagtggctcagccagtctgagtcaggtttctccagggaaagaaacagatcaaactgaaaccgtgtcagttcagtcttcggtattggggaagggtgtaaaacatcgacccccaccaatcaaacttccctcaagctcaggaaatagttcctcaggtaactattttacaccacaacagacaagcagctttctcaaatctccaactcctcctccttcttctaagccatcaagtattcctcggaaatcatctgtggatctcaatcaagttagcatgctttctccagctgccctatcacctgccagctcatcacaaagaaccacggccacccaggtcatggcaaactctgctggacttaacttcatcaatgtagtgggctctgtttgtggggcccaggctttgatgagtggttcaaaccccatgctgggctgtaacactggtgccataactcctgcaggaataaacctgagcggccttctaccctcaggaggtctgctaccaaatgcactgcccagtgcaatgcaggcagcttctcaagcaggtgttccatttggtttaaaaaatacttcaagtctcaggcccttaaatctactccagcttccaggtggttcacttatttttaacactctgcagcagcagcaacagcagctctcccagtttacaccacaacaacctcagcagcccacaacttgtagtcctcaacagccaggggagcagggttctgagcaaggttcaaccagtcaagaacaggccttatctgctcagcaagctgctgttattaaccttactggagtaggaagttttatgcagtcacaggcagctgcagttgcgattcttgcagcatcaaatggctatggcagcagcagcagcacaaacagctcagctacatcatcatcggcatacaggcagccagtcaaaaagtaaaatgaagagaggcaygccaaccactccaaaattttgagtcttgcattactttttgttccttttttaaaaacacaagagcactgaatcaaaagaattgagtttctactttttgttttttttaatgtgtcagtattttacattgctagatgtacaaactttatacagaagcacaaccttatcatttttaaataaaaacagggaaatggtttaacaaactagggttggtttgcctaagtcattgctttttaaaaatggtttcactatacataatatatatggaagygacctaagaaataatagaaacatctttcagaagaatgtagtttgatatttatttagtataaaacgtttgtgcacagtgttaacaaatacaatttttacaaatctgttttgaaaatgtggtggctgtttatttgggtttcatastcttaattacttcatccatcagttttttaacttctttgtgtcttgtaactgctcggctcatacagtcctgaagtttagctccagttagcccacttccacctg

SEQ ID NO: 5940 - DNA, 3019 bp, Homo sapiens
gccgccggaactggctgttggtgggggtgcagcactgagccgccgacggggcgggtgggctttgctgccgagcaggcggcgccgtcttggggcctagcggcgaggcgacccgcacaggtgggcggtggcggtaggtgggtggccagcgactggcaacgcggtggcttagacgcgcgagatccggccagggtcagagtactgtaagattgatgttaaaggcatggtgttcaccccacttcatcagcgtacataagttatctcttcttttggacccktattttatgccataatgcaacaagctttagaactagctttggatcgtgcagagtatgtcattgaaagtgcccgacagagacctcctaaaaggaaatacctatcaagtggaagaaaatctgtatttcaaaaactttatgacttgtatattgaagaatgtgaaaaagaacctgaagttaagcagaaattaagaagaaatgtgaacttgttagagaagcttgttatgcaagagactttgtcatgtttagtggtcaatctatacccaggaaatgagggatattctctgatgctcaggggaaaaaacggatcagattccgagaccattcgactgccctatgaagaaggagagttgcttgaatatttggatgcagaagaattacctcctattttggttgatctcctagaaaaatctcaggttaatatttttcattgcggatgtgtcatagcagaaatacgtgactacaggcagtccagtaacrtgaaatctcctggttaccaaagtcggcacattctcttacgtccaacaatgcagactttaatttgtgatgtacattcaataacaagtgataaccacaaatggacccaggaagacaaacttttgcttgagagccagctcatcctagctacagctgaaccactctgtcttgatccttctatagcagtcacctgcactgcaaacagactgctctataacaagcaaaagatgaacactcgcccaatgaaacggtgtttcaagaggtattccagatcctctctgaatcggcagcaagatctatctcattgtccacctcctcctcagctgaggttacttgatttcttacaaaaaagaaaggaaagaaaagcaggtcagcattatgacctcaaaatttctaaggcaggaaattgtgtagatatgtggaaacggagtccctgtaatttggccataccttctgaagtagatgtggagaaatatgctaaagtggaaaagtctatcaaatctgatgactcacagccaacagtctggccagcccatgatgtaaaagatgattatgtatttgaatgtgaagctggtactcagtatcagaaaacaaagctgaccatcttgcagtcgcttggagatccactttactatggtaaaatacagccatgtaaagcagatgaagaaagtgacagccagatgtctccatcacactcgtccacagatgatcattcaaattggttcattattggatcaaagaccgatgctgagagggtagtcaatcagtaccaagaattagtccagaatgaagccaaatgtccggtcaagatgtcacacagctccagtggctcagccagtctgagtcaggtttctccagggaaagaaacagatcaaactgaaaccgtgtcagttcagtcttcggtattggggaagggtgtaaaacatcgacccccaccaatcaaacttccctcaagctcaggaaatagttcctcaggtaactattttacaccacaacagacaagcagctttctcaaatctccaactcctcctccttcttctaagccatcaagtattcctcggaaatcatctgtggatctcaatcaagttagcatgctttctccagctgccctatcacctgccagctcatcacaaagaaccacggccacccaggtcatggcaaactctgctggacttaacttcatcaatgtagtgggctctgtttgtggggcccaggctttgatgagtggttcaaaccccatgctgggctgtaacactggtgccataactcctgcaggaataaacctgagcggccttctaccctcaggaggtctgctaccaaatgcactgcccagtgcaatgcaggcagcttctcaagcaggtgttccatttggtttaaaaaatacttcaagtctcaggcccttaaatctactccagcttccaggtggttcacttatttttaacactctgcagcagcagcaacagcagctctcccagtttacaccacaacaacctcagcagcccacaacttgtagtcctcaacagccaggggagcagggttctgagcaaggttcaaccagtcaagaacaggccttatctgctcagcaagctgctgttattaaccttactggagtaggaagttttatgcagtcacaggcagctgcagttgcgattcttgcagcatcaaatggctatggcagcagcagcagcacaaacagctcagctacatcatcatcggcatacaggcagccagtcaaaaagtaaaatgaagagaggcaygccaaccactccaaaattttgagtcttgcattactttttgttccttttttaaaaacacaagagcactgaatcaaaagaattgagtttctactttttgttttttttaatgtgtcagtattttacattgctagatgtacaaactttatacagaagcacaaccttatcatttttaaataaaaacagggaaatggtttaacaaactagggttggtttgcctaagtcattgctttttaaaaatggtttcactatacataatatatatggaagygacctaagaaataatagaaacatctttcagaagaatgtagtttgatatttatttagtataaaacgtttgtgcacagtgttaacaaatacaatttttacaaatctgttttgaaaatgtggtggctgtttatttgggtttcatastcttaattacttcatccatcagttttttaacttctttgtgtcttgtaactgctcggctcatacagtcctgaagtttagctccagttagcccacttccacctg

SEQ ID NO: 5941 - DNA, 3016 bp, Homo sapiens
gccgccggaactggctgttggtgggggtgcagcactgagccgccgacggggcgggtgggctttgctgccgagcaggcggcgccgtcttggggcctagcggcgaggcgacccgcacaggtgggcggtggcggtaggtgggtggccagcgactggcaacgcggtggcttagacgcgcgagatccggccagggtcagagtactgtaagattgatgttaaaggcatggtgttcaccccacttcatcagcgtacataagttatctcttcttttggacccktattttatgccataatgcaacaagctttagaactagctttggatcgtgcagagtatgtcattgaaagtgcccgacagagacctcctaaaaggaaatacctatcaagtggaagaaaatctgtatttcaaaaactttatgacttgtatattgaagaatgtgaaaaagaacctgaagttaagaaattaagaagaaatgtgaacttgttagagaagcttgttatgcaagagactttgtcatgtttagtggtcaatctatacccaggaaatgagggatattctctgatgctcaggggaaaaaacggatcagattccgagaccattcgactgccctatgaagaaggagagttgcttgaatatttggatgcagaagaattacctcctattttggttgatctcctagaaaaatctcaggttaatatttttcattgcggatgtgtcatagcagaaatacgtgactacaggcagtccagtaacrtgaaatctcctggttaccaaagtcggcacattctcttacgtccaacaatgcagactttaatttgtgatgtacattcaataacaagtgataaccacaaatggacccaggaagacaaacttttgcttgagagccagctcatcctagctacagctgaaccactctgtcttgatccttctatagcagtcacctgcactgcaaacagactgctctataacaagcaaaagatgaacactcgcccaatgaaacggtgtttcaagaggtattccagatcctctctgaatcggcagcaagatctatctcattgtccacctcctcctcagctgaggttacttgatttcttacaaaaaagaaaggaaagaaaagcaggtcagcattatgacctcaaaatttctaaggcaggaaattgtgtagatatgtggaaacggagtccctgtaatttggccataccttctgaagtagatgtggagaaatatgctaaagtggaaaagtctatcaaatctgatgactcacagccaacagtctggccagcccatgatgtaaaagatgattatgtatttgaatgtgaagctggtactcagtatcagaaaacaaagctgaccatcttgcagtcgcttggagatccactttactatggtaaaatacagccatgtaaagcagatgaagaaagtgacagccagatgtctccatcacactcgtccacagatgatcattcaaattggttcattattggatcaaagaccgatgctgagagggtagtcaatcagtaccaagaattagtccagaatgaagccaaatgtccggtcaagatgtcacacagctccagtggctcagccagtctgagtcaggtttctccagggaaagaaacagatcaaactgaaaccgtgtcagttcagtcttcggtattggggaagggtgtaaaacatcgacccccaccaatcaaacttccctcaagctcaggaaatagttcctcaggtaactattttacaccacaacagacaagcagctttctcaaatctccaactcctcctccttcttctaagccatcaagtattcctcggaaatcatctgtggatctcaatcaagttagcatgctttctccagctgccctatcacctgccagctcatcacaaagaaccacggccacccaggtcatggcaaactctgctggacttaacttcatcaatgtagtgggctctgtttgtggggcccaggctttgatgagtggttcaaaccccatgctgggctgtaacactggtgccataactcctgcaggaataaacctgagcggccttctaccctcaggaggtctgctaccaaatgcactgcccagtgcaatgcaggcagcttctcaagcaggtgttccatttggtttaaaaaatacttcaagtctcaggcccttaaatctactccagcttccaggtggttcacttatttttaacactctgcagcagcagcaacagcagctctcccagtttacaccacaacaacctcagcagcccacaacttgtagtcctcaacagccaggggagcagggttctgagcaaggttcaaccagtcaagaacaggccttatctgctcagcaagctgctgttattaaccttactggagtaggaagttttatgcagtcacaggcagctgcagttgcgattcttgcagcatcaaatggctatggcagcagcagcagcacaaacagctcagctacatcatcatcggcatacaggcagccagtcaaaaagtaaaatgaagagaggcaygccaaccactccaaaattttgagtcttgcattactttttgttccttttttaaaaacacaagagcactgaatcaaaagaattgagtttctactttttgttttttttaatgtgtcagtattttacattgctagatgtacaaactttatacagaagcacaaccttatcatttttaaataaaaacagggaaatggtttaacaaactagggttggtttgcctaagtcattgctttttaaaaatggtttcactatacataatatatatggaagygacctaagaaataatagaaacatctttcagaagaatgtagtttgatatttatttagtataaaacgtttgtgcacagtgttaacaaatacaatttttacaaatctgttttgaaaatgtggtggctgtttatttgggtttcatastcttaattacttcatccatcagttttttaacttctttgtgtcttgtaactgctcggctcatacagtcctgaagtttagctccagttagcccacttccacctg

SEQ ID NO: 5942 - DNA, 2368 bp, Homo sapiens
gtcccgggaatcgcacaggacccggctcccctcgcctaagctgctggggggcgccatgggccgctaccgcatccgcgtggccaccggggcctggctcttctccgggtcgtacaaccgcgtgcagctttggctggtcgggacgcgcggggaggcggagctggagctgcagctgcggccsgcgcggggcgaggaggaggagtttgatcatgacgttgcagaggacttggggctcctgcagttcgtgaggctgcgcaagcaccactggctggtggacgacgcgtggttctgcgaccgcatcacggtgcagggccctggagcctgcgcggaggtggccttcccgtgctaccgctgggtgcagggcgaggacatcctgagcctgcccgagggcaccgcccgcctgccaggagacaatgctttggacatgttccagaagcatcgagagaaggaactgaaagacagacagcagatctactgctgggccacctggaaggaagggttacccctgaccatcgctgcagaccgtaaggatgatctacctccaaatatgagattccatgaggagaagaggctggactttgaatggacactgaaggcaggggctctggagatggccctcaaacrtgtttacaccctcctgagctcctggaactgcctagaagactttgatcagatcttctggggccagaagagtgccctggctgagaaggttcgccagtgctggcaggatgatgagttgttcagctaccagttcctcaatggtgccaaccccatgctgttgagacgctcgacctctctgccctccaggctagtgctgccctcrgggatggaagagcttcrggctcaactggagaaagaacttcagaatggttccctgtttgaagctgacttcatccttctggatggaattccagccaacgtgatccgaggagagaagcaatacctggctgcccccctcgttatgctgaagatggagcccaatgggaagctgcagcccatggtcatccagattcagcctcccarccccagctctccaaccccaacactgttcctgccctcagaccccccacttgcctggctcctggcaaagtcctgggtccgaaattcagatttccaactgcacgagatccagtatcacttgctgaacackcacctggtggctgaggtcatcgctgtcgccaccatgcggtgcctcccaggactgcaccccatcttcaagttcctgatcccccatatccgctacaccatggaaatcaacacccgggcccggacccaactcatctcagatggaggaatttttgataaggcagtgagcacaggtggagggggccatgtacagttgctccgtcgggcggcagctcagctgacctactgctccctctgtcctcctgacgacctggctgaccggggcctgctgggactcccaggtgctctctatgcccatgatgctttacggctctgggagatcattgccaggtatgtggaggggatcgtccacctcttctaccaragggatgacatagtgaagggggaccctgagctgcaggcctggtgtcgggagatcacggaggtggggctgtgccaggcccaggaccgaggtttccctgtctccttccagtcccagagtcaactctgccatttcctcaccatgtgcgtcttcacgtgcactgcccagcatgccgccatcaaccagggccagctggactggtatgcctgggtccctaatgctccatgcacaatgcggatgcccccacccaccaccaaggaagatgtgacgatggccacagtgatggggtcactacctgatgtccggcaggcctgtcttcaaatggccatctcatggcatytgagtcgccgccagccagacatggtgcctctggggcaccacaaagaaaaatatttctcaggccccaagcccaaagctgtgctaaaccaattccgaacagatttggaaaagctrgaaaaggagattacagcccggaatgagcaacttgactggccctatgaatatctgaagcccagctgyatagagaacagtgtcaccatctgagccctagagtgactctacctgcaagatttcacatcagctttaggactgacatttctatcttgaatttcatgctttcctaaagtctctgctgctaaggctctatttcctcccccagttaaaccccctacattagtatcccactagcccaggggagcagtaaactttctctgcaaagactagatccttttttacgctttgcagaccgcatagtcactgtctcaactactcagctctcctgctgcagcatgaaggcagccacagacaacatggaaatgagtgtgactatgttccaataaaactttatggacactgagatatgaa

SEQ ID NO: 5943 - DNA, 2867 bp, Homo sapiens
gagatagagtctgatctggaggctggaaggcggggctaaaactcccactcacttacctcyaccaacaactaggccaccaagtcatttctgaggactggctcaagaaagcagatttaacttacactggcctagcccaggccaccagatgcatccacggagatccaaatgcatataatcacttgaatcaagatctagacagggacgcgtgcagcaggcttcatctgactgattcctgacacgggagagaaagcctaagctccgaatcatccttcaatgtttacaaaggccctaaatagcagtgggctaattgctgttcctggatttccaggagacctgagacccatgaaggagcaggaaagagcttggggataaaaaattaatctggaacctactggagcggaaggggctgcactcacctggaaaagacaaagttcttgggaactggccacgtaggccaggtccctaagcaattccatcccgcaccctaacaccccgactggtcccgggaatcgcacaggacccggctcccctcgcctaagctgctggggggcgccatgggccgctaccgcatccgcgtggccaccggggcctggctcttctccgggtcgtacaaccgcgtgcagctttggctggtcgggacgcgcggggaggcggagctggagctgcagctgcggccsgcgcggggcgaggaggaggagtttgatcatgacgttgcagaggacttggggctcctgcagttcgtgaggctgcgcaagcaccactggctggtggacgacgcgtggttctgcgaccgcatcacggtgcagggccctggagcctgcgcggaggtggccttcccgtgctaccgctgggtgcagggcgaggacatcctgagcctgcccgagggcaccgcccgcctgccaggagacaatgctttggacatgttccagaagcatcgagagaaggaactgaaagacagacagcagatctactgctgggccacctggaaggaagggttacccctgaccatcgctgcagaccgtaaggatgatctacctccaaatatgagattccatgaggagaagaggctggactttgaatggacactgaaggcaggggctctggagatggccctcaaacrtgtttacaccctcctgagctcctggaactgcctagaagactttgatcagatcttctggggccagaagagtgccctggctgagaaggttcgccagtgctggcaggatgatgagttgttcagctaccagttcctcaatggtgccaaccccatgctgttgagacgctcgacctctctgccctccaggctagtgctgccctcrgggatggaagagcttcrggctcaactggagaaagaacttcagaatggttccctgtttgaagctgacttcatccttctggatggaattccagccaacgtgatccgaggagagaagcaatacctggctgcccccctcgttatgctgaagatggagcccaatgggaagctgcagcccatggtcatccagattcagcctcccarccccagctctccaaccccaacactgttcctgccctcagaccccccacttgcctggctcctggcaaagtcctgggtccgaaattcagatttccaactgcacgagatccagtatcacttgctgaacackcacctggtggctgaggtcatcgctgtcgccaccatgcggtgcctcccaggactgcaccccatcttcaagttcctgatcccccatatccgctacaccatggaaatcaacacccgggcccggacccaactcatctcagatggaggaatttttgataaggcagtgagcacaggtggagggggccatgtacagttgctccgtcgggcggcagctcagctgacctactgctccctctgtcctcctgacgacctggctgaccggggcctgctgggactcccaggtgctctctatgcccatgatgctttacggctctgggagatcattgccaggtatgtggaggggatcgtccacctcttctaccaragggatgacatagtgaagggggaccctgagctgcaggcctggtgtcgggagatcacggaggtggggctgtgccaggcccaggaccgaggtttccctgtctccttccagtcccagagtcaactctgccatttcctcaccatgtgcgtcttcacgtgcactgcccagcatgccgccatcaaccagggccagctggactggtatgcctgggtccctaatgctccatgcacaatgcggatgcccccacccaccaccaaggaagatgtgacgatggccacagtgatggggtcactacctgatgtccggcaggcctgtcttcaaatggccatctcatggcatytgagtcgccgccagccagacatggtgcctctggggcaccacaaagaaaaatatttctcaggccccaagcccaaagctgtgctaaaccaattccgaacagatttggaaaagctrgaaaaggagattacagcccggaatgagcaacttgactggccctatgaatatctgaagcccagctgyatagagaacagtgtcaccatctgagccctagagtgactctacctgcaagatttcacatcagctttaggactgacatttctatcttgaatttcatgctttcctaaagtctctgctgctaaggctctatttcctcccccagttaaaccccctacattagtatcccactagcccaggggagcagtaaactttctctgcaaagactagatccttttttacgctttgcagaccgcatagtcactgtctcaactactcagctctcctgctgcagcatgaaggcagccacagacaacatggaaatgagtgtgactatgttccaataaaactttatggacactgagatatgaa

SEQ ID NO: 5944 - DNA, 1801 bp, Homo sapiens
tttcttaatggcgccaacccccgtggtgctgaggcgctctgctcaccttccctgctcgcctagtgttccctccaggcatggaggaactgcaggcccagctggagaaggagctggagggaggcacactgttcgaagctgacttctccctgctggatgggatcaaggccaacgtcattctctgtagccagcagcacctggctgcccctctagtcatgctgaaattgcagcctgatgggaaactcttgcccatggtcatccagctccagctgccccgcacaggatccccaccacctccccttttcttgcctacggatcccccaatggcctggcttctggccaaatgctgggtgcgmagctctgacttccagctccatgagctgcagtctcatcttctgaggggacacttgatggctgaggtcattgttgtggccaccatgaggtgcctgccgtcgatacatcctatcttcaagcttataattccccacctgcgatacaccctggaaattaacgtccgggccaggactgggctggtctctgacatgggaattttcgaccagataatgagcactggtgggggaggccacgtgcagctgctcaagcaagctggagccttcctaacctacagctccttctgtccccctgatgacttggccgaccgggggctcctgggagtgaagtcttccttctatgcccaagatgcgctgcggctctgggaaatcatctatcggtatgtggaaggaatcgtgagtctccactataagacrgacgtggctgtgaaagacgacccagagctgcagacctggtgtcgagagatcactgaaatcgggctgcaaggggcccaggaccgagggtttcctgtctctttacaggctcgggaccaggtttgccactttgtcaccatgtgtatcttcacctgcaccggccaacacgcctctgtgcacctgggccagctggactggtactcttgggtgcctaatgcaccctgcacgatgcggctgcccccgccaaccaccaaggatgcaacgctggagacagtgatggcgacactgcccaacttccaccaggcttctctccagatgtccatcacttggcagctgggcagacgccagcccgttatggtggctgtgggccagcatgaggaggagtatttttcgggccctgagcctaaggctgtgctgaagaagttcagggaggagctggctgccctggataaggaaattgagatccggaatgcaaagctggacatgccctacgagtacctgcggcccagcgtggtggaaaacagtgtggccatctaagcgtcgccaccctttggttatttcagcccccatcacccaagccacaagctgaccccttcgyggttatagccctgccctcccaagtcccaccctcttcccatgtcccaccctccctagaggggcaccttttcatggtctctgcacccagtgaacacattttactctagaggcatcacctgggaccttactcctctttccttccttcctcctttcctatcttccttsctctctctcttcctctttcttcattcagatctatatggcaaatagccacaattatataaatcatttcaagactagaatagggggatataatacatattactccacaccttttatgaatcaaatatgatttttttgttgttgttaagacagagtctcatatgttgcctaggctggaaataggattttgaacccaaattgagtttaacaataataaaaagttgttttacgctaaagatggaaaagaactaggactgaactattttaaataaaatattggc

SEQ ID NO: 5945 - DNA, 2410 bp, Homo sapiens
tttcttaatggcgccaacccccgtggtgctgaggcgctctgctcaccttccctgctcgcctagtgttccctccaggcatggaggaactgcaggcccagctggagaaggagctggagggaggcacactgttcgaagctgacttctccctgctggatgggatcaaggccaacgtcattctctgtagccagcagcacctggctgcccctctagtcatgctgaaattgcagcctgatgggaaactcttgcccatggtcatccagctccagctgccccgcacaggatccccaccacctccccttttcttgcctacggatcccccaatggcctggcttctggccaaatgctgggtgcgmagctctgacttccagctccatgagctgcagtctcatcttctgaggggacacttgatggctgaggtcattgttgtggccaccatgaggtgcctgccgtcgatacatcctatcttcaagcttataattccccacctgcgatacaccctggaaattaacgtccgggccaggactgggctggtctctgacatgggaattttcgaccagataatgagcactggtgggggaggccacgtgcagctgctcaagcaagctggagccttcctaacctacagctccttctgtccccctgatgacttggccgaccgggggctcctgggagtgaagtcttccttctatgcccaagatgcgctgcggctctgggaaatcatctatcggtatgtggaaggaatcgtgagtctccactataagacrgacgtggctgtgaaagacgacccagagctgcagacctggtgtcgagagatcactgaaatcgggctgcaaggggcccaggaccgagggtttcctgtctctttacaggctcgggaccaggtttgccactttgtcaccatgtgtatcttcacctgcaccggccaacacgcctctgtgcacctgggccagctggactggtactcttgggtgcctaatgcaccctgcacgatgcggctgcccccgccaaccaccaaggatgcaacgctggagacagtgatggcgacactgcccaacttccaccaggcttctctccagatgtccatcacttggcagctgggcagacgccagcccgttatggtggctgtgggccagcatgaggaggagtatttttcgggccctgagcctaaggctgtgctgaagaagttcagggaggagctggctgccctggataaggaaattgagatccggaatgcaaagctggacatgccctacgagtacctgcggcccagcgtggtggaaaacagtgtggccatctaagcgtcgccaccctttggttatttcagcccccatcacccaagccacaagctgaccccttcgyggttatagccctgccctcccaagtcccaccctcttcccatgtcccaccctccctagaggggcaccttttcatggtctctgcacccagtgaacacattttactctagaggcatcacctgggaccttactcctctttccttccttcctcctttcctatcttccttsctctctctcttcctctttcttcattcagatctatatggcaaatagccacaattatataaatcatttcaagactagaatagggggatataatacatattactccacaccttttatgaatcaaatatgatttttttgttgttgttaagacagagtctcactttgacacccaggctggagtgcagtggtgccatcaccacggctcactgcagcctcagcgtcctgggctcaaatgatcctcccacctcagcctcctgagtagctgggactacaggctcatgccatcatgcccagctaatatttttttattttcgtggagacggggcctcactatgttgcctaggctggaaataggattttgaacccaaattgagtttaacaataataaaaagttgttttacgctaaagatggaaaagaactaggactgaactattttaaataaaatattggcaaaagaatatagagcatcaaaaaatttttctgggttcatatgcttgatgtggtaaagaattaaaaattttttatttttattgagacagaatcttgctcttgctgcccaggctggagtgcaatggcgcgatcttggctcgctgcaaccttcgcctcccaggttcaaacaattctcctgcctcagccgcccaagtagctgggattacaggcgcctgccaccacgcccaactaatattttgtatttttagtagagatggggtttcgccatgttggccaggctggtttcgaactcctgacctcaggtgatccacccgcctcggcctcccaaagtgctgggattacaggtgtgagccgccctgcccggcctaaaaatttttaaaaattaaaaaaaaattgtcttctaactggataggatttaatttgtgtcctgaaaccagac

SEQ ID NO: 5946 - DNA, 3556 bp, Homo sapiens
atggcaggggccggaggccagcaccaccctccgggcgccgctggaggagcggccgccggagccggcgccgcggtcacctccgccgctgcctcggcggggccgggagaggattcgtctgacagcgaagcggagcaagagggaccccagaaactgatccgcaaagtgtctacctcggggcagatccggaccaagmccagtattaaagagggacagctattgaagcaaaccagttctttccaaaggtggaaaaagcgatacttcaaacttcgaggccgcaccctttactatgcaaaggactcaaagtctctgatatttgatgaagttgacctctcagatgctagtgtagctgaagcaagcacgaaaaatgctaacaacagcttcacgatcatcactccattyagaaggctaatgctgtgtgctgagaacagaaaggagatggaggattggatcagctcactgaagtctgtacagaccagagaaccctacgaggtggcccagtttaatgtggaacatttctcagggatgcacaactggtacgcctgctcccacgcccgacccaccttctgtaacgtgtgcagagagagtctttctggagtcacctcccatggcctgtcctgcgaagtgkgtaaattcaaggctcacaaaagatgtgcagtgagagcaacaaataactgtaaatggactaccctggcctccatcgggaaggacattatagaagatgaagatggcgtcgcgatgcctcaccagtggcttgagggcaacctgcctgtaagtgccaagtgtgctgtctgcgacaaaacatgtggcagtgttctccgtctacaggattggaaatgcctttggtgtaagacaatggtacacactgcctgcaaagatttataccatccaatatgtccacttggtcaatgtaaagtatctatcatacctccaattgcactaaacagcaccgattccgatggtttctgtagagcaacattttcgttctgtgttagtcctctattggtttttgtcaattctaagagtggagataatcagggagtaaagttcctccgtcgctttaaacagttgctaaatccggctcaggtgtttgatttaatgaatggaggtcctcatttaggtttaagattatttcagaagtttgacaatttccggattcttgtttgtggaggcgatggaagtgtaggttgggttttgtcagaaatcgataagctcaacttgaataaacaggcaatgtcagctgggagtgttgcctttgggtacaggaaatgaccttgcccgagttcttggctggggaggttcatatgacgatgacacccaacttcctcagatcctagagaaactggaacgagccagtaccaaaatgttggacaggtggagtataatgacatatgaactcaaattgccaccaaaagcttccctacttccaggacctccagaagcatctgaagaattttatatgacgatttatgaagaytcagttgcaacgcatcttacaaaaatcctcaattctgatgaacatgcagtggtcatatcttctgccaagacgctatgtgaaactgtaaaggacttcgttgccaaagtagaaaagacgtatgacaaaaccttggaaaatgccgttgtagctgatgccgtggccagtaaatgttcagtcctaaacgagaagctcgaacaactgctgcaggctttgcacacagattcccaggctgcgcctgttctccctggcctcagccctctcattgtggaagaagatgctgtggaatcgtccagtgaagagtccctgggtgaaagcaaagagcagcttggggatgacgttacaaaaycttcctcccagaaagccgtcaaaccaagggaaatcatgttgcgggcaaatagtttaaagaaagcagtgaggcaagtcattgaggaagccggaaaagttatggatgacccgacagttcacccstgtgaaccagctaatcagtcctctgattatgacagcacagaaacagatgaatctaaggaggaagctaaagatgatgttaaaactgcacctcggtctccagatgcccgggcaagttatggccattcccaaactgattctgtccctggtccagctgtggcagccagcaaagaaaacctccctgtgctcaataccagaataatctgcccaggtttaagagcaggactggctgcctcaattgctgggagttcgattatcaacaaaatgttactggcaaacattgatccttttggtgccacgccgtttattgaccckgatctagattccgtagatggatattcagaaaaatgtgtcatgaacaattactttgggattggattagatgcaaaaatttcattagaatttaataataaaagagaggagcaccctgaaaaatgcaggagccgaactaaaaacttgatgtggtatggagtccttggaacccgggagttattacagagatcgtacaagaatttagaacaaagggttcaacttgagtgtgatgggcagtatattcctcttcccagcttgcaaggcatagccgtgttgaacattcccagctatgctggaggcactaacttttggggtggaactaaagaggatgatatatttgctgcaccatcctttgatgacaagatcctggaagttgtagcaatatttgatagcatgcaaatggcagtttcaagggtcattaaactgcagcatcatcgaatagcccagtgccgtacagtgaaaatcactatatttggtgacgaaggagtcccagtgcaagtggatggtgaagcgtgggttcagcctccagggattatcaaaattgtgcacaaaaacagagcacaaatgctaacaagggacagagcctttgagagcactctgaaatcttgggaagataagcagaagtgtgattctggtaaaccagttctccgaacccatttgtacatccatcacgccattgacttggcaacagaagaggtgtcgcagatgcagctatgctcccaggctgcagaggagctcattactaggatatgtgacgcagccacaattcactgtcttttggagcaagaactggcccatgctgtgaatgcctgctcccatgccctgaataaagccaacccaaggtgcccggagagtcttacaagagacactgccactgaaatagccatcaatgtgaaggcgctgtataatgaaacagaatctttgctagttggcagggttcctttgcagctggaatcgccacatgaagagcgagtatccaatgccttacactctgtggaggtggaattacagaaactgacagagattccttggctttattatatcttacacccaaatgargatgaggaacctcctatggattgcaccaaaaggaacaacagaagcaccgtatttcgaatagtgccaaagtttaaaaaggaaaaggttcagaagcagaagacaagttcacagcctgttcagaaatggggcacagaggaagttgctgcttggctggatctgctcaatttgggagagtacaaagatatcttcatccgtcatgacatcagaggggctgaacttttgcatctggaaaggcgagatcttaag

SEQ ID NO: 5947 - DNA, 4054 bp, Homo sapiens
atggcaggggccggaggccagcaccaccctccgggcgccgctggaggagcggccgccggagccggcgccgcggtcacctccgccgctgcctcggcggggccgggagaggattcgtctgacagcgaagcggagcaagagggaccccagaaactgatccgcaaagtgtctacctcggggcagatccggaccaagmccagtattaaagagggacagctattgaagcaaaccagttctttccaaaggtggaaaaagcgatacttcaaacttcgaggccgcaccctttactatgcaaaggactcaaagtctctgatatttgatgaagttgacctctcagatgctagtgtagctgaagcaagcacgaaaaatgctaacaacagcttcacgatcatcactccattyagaaggctaatgctgtgtgctgagaacagaaaggagatggaggattggatcagctcactgaagtctgtacagaccagagaaccctacgaggtggcccagtttaatgtggaacatttctcagggatgcacaactggtacgcctgctcccacgcccgacccaccttctgtaacgtgtgcagagagagtctttctggagtcacctcccatggcctgtcctgcgaagtgkgtaaattcaaggctcacaaaagatgtgcagtgagagcaacaaataactgtaaatggactaccctggcctccatcgggaaggacattatagaagatgaagatggcgtcgcgatgcctcaccagtggcttgagggcaacctgcctgtaagtgccaagtgtgctgtctgcgacaaaacatgtggcagtgttctccgtctacaggattggaaatgcctttggtgtaagacaatggtacacactgcctgcaaagatttataccatccaatatgtccacttggtcaatgtaaagtatctatcatacctccaattgcactaaacagcaccgattccgatggtttctgtagagcaacattttcgttctgtgttagtcctctattggtttttgtcaattctaagagtggagataatcagggagtaaagttcctccgtcgctttaaacagttgctaaatccggctcaggtgtttgatttaatgaatggaggtcctcatttaggtttaagattatttcagaagtttgacaatttccggattcttgtttgtggaggcgatggaagtgtaggttgggttttgtcagaaatcgataagctcaacttgaataaacaggcaactgggagtgttgcctttgggtacaggaaatgaccttgcccgagttcttggctggggaggttcatatgacgatgacacccaacttcctcagatcctagagaaactggaacgagccagtaccaaaatgttggacaggtggagtataatgacatatgaactcaaattgccaccaaaagcttccctacttccaggacctccagaagcatctgaagaattttatatgacgatttatgaagaytcagttgcaacgcatcttacaaaaatcctcaattctgatgaacatgcagtggtcatatcttctgccaagacgctatgtgaaactgtaaaggacttcgttgccaaagtagaaaagacgtatgacaaaaccttggaaaatgccgttgtagctgatgccgtggccagtaaagctgcgcctgttctccctggcctcagccctctcattgtggaagaagatgctgtggaatcgtccagtgaagagtccctgggtgaaagcaaagagcagcttggggatgacgttacaaaaycttcctcccagaaagccgtcaaaccaagggaaatcatgttgcgggcaaatagtttaaagaaagcagtgaggcaagtcattgaggaagccggaaaaggcctggatggactggttctttctgtgttttttcttaacatgcgatcccatatgtgtttgcttttctttccaggtttaagagcaggactggctgcctcaattgctgggagttcgattatcaacaaaatgttactggcaaacattgatccttttggtgccacgccgtttattgaccckgatctagattccgtagatggatattcagaaaaatgtgtcatgaacaattactttgggattggattagatgcaaaaatttcattagaatttaataataaaagagaggagcaccctgaaaaatgcaggagccgaactaaaaacttgatgtggtatggagtccttggaacccgggagttattacagagatcgtacaagaatttagaacaaagggttcaacttgagtgtgatgggcagtatattcctcttcccagcttgcaaggcatagccgtgttgaacattcccagctatgctggaggcactaacttttggggtggaactaaagaggatgatatatttgctgcaccatcctttgatgacaagatcctggaagttgtagcaatatttgatagcatgcaaatggcagtttcaagggtcattaaactgcagcatcatcgaatagcccagtgccgtacagtgaaaatcactatatttggtgacgaaggagtcccagtgcaagtggatggtgaagcgtgggttcagcctccagggattatcaaaattgtgcacaaaaacagagcacaaatgctaacaagggacagagcctttgagagcactctgaaatcttgggaagataagcagaagtgtgattctggtaaaccagttctccgaacccatttgtacatccatcacgccattgacttggcaacagaagaggtgtcgcagatgcagctatgctcccaggctgcagaggagctcattactaggatatgtgacgcagccacaattcactgtcttttggagcaagaactggcccatgctgtgaatgcctgctcccatgccctgaataaagccaacccaaggtgcccggagagtcttacaagagacactgccactgaaatagccatcaatgtgaaggcgctgtataatgaaacagaatctttgctagttggcagggttcctttgcagctggaatcgccacatgaagagcgagtatccaatgccttacactctgtggaggtggaattacagaaactgacagagattccttggctttattatatcttacacccaaatgargatgaggaacctcctatggattgcaccaaaaggaacaacagaagcaccgtatttcgaatagtgccaaagtttaaaaaggaaaaggttcagaagcagaagacaagttcacagcctgttcagaaatggggcacagaggaagttgctgcttggctggatctgctcaatttgggagagtacaaagatatcttcatccgtcatgacatcagaggggctgaacttttgcatctggaaaggcgagatcttaagagactgatagagaaggttgctgcaaaattggctgcacgtacaggcttgccttttgtcactrctccaaataaatktgaagctctggctgctcatgacgctctggttgagctcagtggagccatgaacactactgcctgtagtctgatgacgatagcaaataatattcgttttctgggttctggcccttggtcaggtctgggagaactgatcttgcctgaaaatsaaccaggaagtagtatcatgccaggcaaggtgaaccctactcagtgtgaagcaatgaccatggttgtagcccaagtcatggggaatcatgttgctgtaacagttggaggcagcagtggacattttgagttgaatgttttcaagccaatgatgattaaaaatgtgttacactcagccaggctgctggcggwtgcttcagtttcctttacagaaaactgygtggtgggaatccaggccaatacagaaaggatcaacaagctgatgaatgagtctcaaatgttggtgacagctctcaatcctcgtatagcgtatgacaaggcagcaaagattgctaagacagcacacaaaaatggatcaaccttaaaggaaactgttattgaacttggctatctcacaccagaacagtttgatgaacaggtaaaaactaaggacatgctgagtccaaagtgatttaagtaaatttataatgaaaataaacgtgtatataattttttaaaaaactga

SEQ ID NO: 5948 - DNA, 3700 bp, Homo sapiens
atggcaggggccggaggccagcaccaccctccgggcgccgctggaggagcggccgccggagccggcgccgcggtcacctccgccgctgcctcggcggggccgggagaggattcgtctgacagcgaagcggagcaagagggaccccagaaactgatccgcaaagtgtctacctcggggcagatccggaccaagmccagtattaaagagggacagctattgaagcaaaccagttctttccaaaggtggaaaaagcgatacttcaaacttcgaggccgcaccctttactatgcaaaggactcaaagtctctgatatttgatgaagttgacctctcagatgctagtgtagctgaagcaagcacgaaaaatgctaacaacagcttcacgatcatcactccattyagaaggctaatgctgtgtgctgagaacagaaaggagatggaggattggatcagctcactgaagtctgtacagaccagagaaccctacgaggtggcccagtttaatgtggaacatttctcagggatgcacaactggtacgcctgctcccacgcccgacccaccttctgtaacgtgtgcagagagagtctttctggagtcacctcccatggcctgtcctgcgaagtgkgtaaattcaaggctcacaaaagatgtgcagtgagagcaacaaataactgtaaatggactaccctggcctccatcgggaaggacattatagaagatgaagatggcgtcgcgatgcctcaccagtggcttgagggcaacctgcctgtaagtgccaagtgtgctgtctgcgacaaaacatgtggcagtgttctccgtctacaggattggaaatgcctttggtgtaagacaatggtacacactgcctgcaaagatttataccatccaatatgtccacttggtcaatgtaaagtatctatcatacctccaattgcactaaacagcaccgattccgatggtttctgtagagcaacattttcgttctgtgttagtcctctattggtttttgtcaattctaagagtggagataatcagggagtaaagttcctccgtcgctttaaacagttgctaaatccggctcaggtgtttgatttaatgaatggaggtcctcatttaggtttaagattatttcagaagtttgacaatttccggattcttgtttgtggaggcgatggaagtgtaggttgggttttgtcagaaatcgataagctcaacttgaataaacaggcaactgggagtgttgcctttgggtacaggaaatgaccttgcccgagttcttggctggggaggttcatatgacgatgacacccaacttcctcagatcctagagaaactggaacgagccagtaccaaaatgttggacaggtggagtataatgacatatgaactcaaattgccaccaaaagcttccctacttccaggacctccagaagcatctgaagaattttatatgacgatttatgaagaytcagttgcaacgcatcttacaaaaatcctcaattctgatgaacatgcagtggtcatatcttctgccaagacgctatgtgaaactgtaaaggacttcgttgccaaagtagaaaagacgtatgacaaaaccttggaaaatgccgttgtagctgatgccgtggccagtaaatgttcagtcctaaacgagaagctcgaacaactgctgcaggctttgcacacagattcccaggctgcgcctgttctccctggcctcagccctctcattgtggaagaagatgctgtggaatcgtccagtgaagagtccctgggtgaaagcaaagagcagcttggggatgacgttacaaaaycttcctcccagaaagccgtcaaaccaagggaaatcatgttgcgggcaaatagtttaaagaaagcagtgaggcaagtcattgaggaagccggaaaagttatggatgacccgacagttcacccstgtgaaccagctaatcagtcctctgattatgacagcacagaaacagatgaatctaaggaggaagctaaagatgatgttaaaactgcacctcggtctccagatgcccgggcaagttatggccattcccaaactgattctgtccctggtccagctgtggcagccagcaaagaaaacctccctgtgctcaataccagaataatctgcccaggtttaagagcaggactggctgcctcaattgctgggagttcgattatcaacaaaatgttactggcaaacattgatccttttggtgccacgccgtttattgaccckgatctagattccgtagatggatattcagaaaaatgtgtcatgaacaattactttgggattggattagatgcaaaaatttcattagaatttaataataaaagagaggagcaccctgaaaaatgcaggagccgaactaaaaacttgatgtggtatggagtccttggaacccgggagttattacagagatcgtacaagaatttagaacaaagggttcaacttgagtgtgatgggcagtatattcctcttcccagcttgcaaggcatagccgtgttgaacattcccagctatgctggaggcactaacttttggggtggaactaaagaggatgatatatttgctgcaccatcctttgatgacaagatcctggaagttgtagcaatatttgatagcatgcaaatggcagtttcaagggtcattaaactgcagcatcatcgaatagcccagtgccgtacagtgaaaatcactatatttggtgacgaaggagtcccagtgcaagtggatggtgaagcgtgggttcagcctccagggattatcaaaattgtgcacaaaaacagagcacaaatgctaacaagggacagagcctttgagagcactctgaaatcttgggaagataagcagaagtgtgattctggtaaaccagttctccgaacccatttgtacatccatcacgccattgacttggcaacagaagaggtgtcgcagatgcagctatgctcccaggctgcagaggagctcattactaggatatgtgacgcagccacaattcactgtcttttggagcaagaactggcccatgctgtgaatgcctgctcccatgccctgaataaagccaacccaaggtgcccggagagtcttacaagagacactgccactgaaatagccatcaatgtgaaggcgctgtataatgaaacagaatctttgctagttggcagggttcctttgcagctggaatcgccacatgaagagcgagtatccaatgccttacactctgtggaggtggaattacagaaactgacagagattccttggctttattatatcttacacccaaatgargatgaggaacctcctatggattgcaccaaaaggaacaacagaagcaccgtatttcgaatagtgccaaagtttaaaaaggaaaaggttcagaagcagaagacaagttcacagcctggatctggggataccgaaagtgggtcatgygaagcgaattctccagggaattaaagagcttggaaggagcactccacagtcggaggtgtaatcatattggtgctattycttggaagagaagttattgccacttaatacaaagtccttggaagcaagtggctgttcttgtagttttctgcatagataagtaagcaccactgaagcacctctgtggcttgatattttgctgtgggtgaaattttgatttgaggtattagaaaatatttttgtgccgaacaatac

SEQ ID NO: 5949 - DNA, 2471 bp, Homo sapiens
gagagagggtctcactttgtcacgcaggctggagtgcagaggcactatctcagctcattgcagcctccacctcctgggctcaagtgatcctcccaccttagctgaactacaagtgcatgccaccatgcccagctaatttctttgtgtgtttttggtagagacagggtttcaccatgttgcccaggcttttctcgaattccttggctcaagcaatcctcccacctcagcctcccaaagcctcccaaagtgttgggattacaggtgtgaaccaccacgcctggcccactgtgagactttttttttttttttgagatggggtcttgctttgttgcccaagttagagtgcagtggtgcaatcatggctcactgcaacctctgcctcccgggctcaagccaccctctcaccttagccacttgagtagctgggactacaggtgcatgccaccacacccagctaatttttttgtatttttggtggagatggggtttcaccatgttgcccagctggtctcaaactcctgagctcaagcgatccgcctgcctcagcctcccaaaatgctgggattacaggtgcgagtcaccgcacccagtcaagagattcttgagtgattgttgcttattttattctcattrgtaggccatgttaaagtcgtgaaacaaatagtctgcaaggatgttctatatccataactttgtacagaagtttcctgcattcctgtttgtccttggataaaccatttgcccccttttgatcattgttcaatcaagacccctttcccaactaaacaatacaaccattaaagggtcagctctttagctgtagcaccagagtgaataatactaaagctaaggctggctgtttttaactgaaaaacataaatagtgccaaatgctcattatttgttaaggaatctatagtctactagtctcatatctactatcttagctctcattaccatgatttaaaagagggagtattacattttaaaaaatgagaaaactgaagtttatcacacagctaattggatggcaaggcagaaactcaaatctgtgaatttatttcataatctcatggtttcttcagtatatctaggtcaatatgaacattatctcaagcaagttattaaaaacctgtgtgtaataaacattgtttactcagaacttatttaaaaacgaatgctgtgcaattgtagagtgtaagtatagcttgtcaagtcctaaaagcttagtgtaagcctttgtaattctgaaagggtaaagtttggaagtactcttttatattaggtaatacaaatgatttagaaaatcccttggatgaattaatggataactggtccataagtggcaaaagagatttaagatatttggggcttcttgaaatgtacttgtggtactaatgtttgtttgactgttggatggatgatgcatttgctgaattgaatagcagtatcttttttttttaatagcagttaccgaggagacactttgtgttggcttagccagggttggagccgacgaccagaaaattgcagcaggcactttaaggcaaatgtgcactgtggacttgggagaaccattgcattccttgatcatcacaggaggcagcatacatccaatggagatggagatgctaagtctgttttccataccagaaaatagctcagaatctcaaagcatcaatggactttgaacatagatatttaccattgtctgatgtaaatttcagccatatatggattgatatggtttggatgtatccccacccaagtctcatcttgaattttaatcctcataattcccaggtgttgtggtaggtaattgaatcatgggggcagtttccctcatgctattctcatgatagtgagctttcatgagatctgatggttttataagtgcctggcatttcccctactggctctcattctcactcttgccgccctgtgaagaggtgccttccaccgtgattgttaagtttcctgaggccttcccagccatgtggaactgtgagtcgaaaattaaacctcttttataattacccagtctcgggtatttcttcatagcagtgtgagaatggattaatacctggatgcatgcatgtttgtgtaacaaacaggtcttttggcttatctagtaagtataaaacaagtgaccaaaaagaagttgactcaacaatgcttggtttcttgtggcagtgagttttttccctatgatatcatcagttgttgctgctattttggcaaattttcaggatgtacacataaagcagaccaggctggaaagcttgtggatagacatccactgacagaatcatttaagagcagtttttatttatgaaaccaatttatacaaggtggttgttaacagaatataacttagaggtaactggaatttgaatcacttgaatctgttttaaagggtaaaaaatgttatgagtgccaagaaaagcaaataaaagattagtaaatgttcac

SEQ ID NO: 5950 - DNA, 1783 bp, Homo sapiens
tagttaagaatttgtaaaggccasagaactacctacgattctctcagcgggtaattggctgctcctaggtttgtgtaacaagaggcaaaactggtagggttgtttaaaacctcttatcccagttcttaagcgtgacataaggttcccaaacccctccttgtgacttgcctcttctcttgtkctactttggttgtcatcgtgttcatcactagattttagatgtcctcggtgttactgacggtttttctgtccacttcgtcttgcagtctctcttctcctcaagtttgaaatgctttatctcatcgggttgggcctgggagatgccaaggacatcacagtcaagggcctggaagttgttagacgctgcagtcgagtgtatctggaagcctacacctcagtcctaactgtagggaaggaagccttggaagagttttatggaagaaaattggttgttgctgatagagaagaagtggaacaagaagcagataatattttaaaggatgctgatatcagtgatgttgcattccttgtggttggtgatccatttggacacttggagaccagaaagcttctttgacaaagtgaagaagaacagacaaaatggcatgcacacattatgtttactagacatcaaagtaaaggagcagtctttggaaaatctaatcaagggaaggaagatctatgaacctccacggtatatgagtgtaaaccaagcagcccagcagcttctggagattgttcaaaatcaaagaatacgaggagaagaaccagcagttaccgaggagacactttgtgttggcttagccagggttggagccgacgaccagaaaattgcagcaggcactttaaggcaaatgtgcactgtggacttgggagaaccattgcattccttgatcatcacaggaggcagcatacatccaatggagatggagatgctaagtctgttttccataccagaaaatagctcagaatctcaaagcatcaatggactttgaacatagatatttaccattgtctgatgtaaatttcagccatatatggattgatatggtttggatgtatccccacccaagtctcatcttgaattttaatcctcataattcccaggtgttgtggtaggtaattgaatcatgggggcagtttccctcatgctattctcatgatagtgagctttcatgagatctgatggttttataagtgcctggcatttcccctactggctctcattctcactcttgccgccctgtgaagaggtgccttccaccgtgattgttaagtttcctgaggccttcccagccatgtggaactgtgagtcgaaaattaaacctcttttataattacccagtctcgggtatttcttcatagcagtgtgagaatggattaatacctggatgcatgcatgtttgtgtaacaaacaggtcttttggcttatctagtaagtataaaacaagtgaccaaaaagaagttgactcaacaatgcttggtttcttgtggcagtgagttttttccctatgatatcatcagttgttgctgctattttggcaaattttcaggatgtacacataaagcagaccaggctggaaagcttgtggatagacatccactgacagaatcatttaagagcagtttttatttatgaaaccaatttatacaaggtggttgttaacagaatataacttagaggtaactggaatttgaatcacttgaatctgttttaaagggtaaaaaatgttatgagtgccaagaaaagcaaataaaagattagtaaatgttcacaaaatat

SEQ ID NO: 5951 - DNA, 1796 bp, Homo sapiens
cgtaggtgaggccggcggcgtgggccttttctctgcacggagccggcgcttttgcagttgcttctgcggaaaggtggtagttaagaatttgtaaaggccasagaactacctacgattctctcagcggtctctcttctcctcaagtttgaaatgctttatctcatcgggttgggcctgggagatgccaaggacatcacagtcaagggcctggaagttgttagacgctgcagtcgagtgtatctggaagcctacacctcagtcctaactgtagggaaggaagccttggaagagttttatggaagaaaattggttgttgctgatagagaagaagtggaacaagaagcagataatattttaaaggatgctgatatcagtgatgttgcattccttgtggttggtgatccatttggggccacaacacacagtgatcttgttctaagagcaacaaagctgggaattccttatagagttattcacaatgcctccataatgaatgctgtaggctgctgtggtttacagttrtataagtttggagagacagtttctattgttttttggacagacacttggagaccagaaagcttctttgacaaagtgaagaagaacagacaaaatggcatgcacacattatgtttactagacatcaaagtaaaggagcagtctttggaaaatctaatcaagggaaggaagatctatgaacctccacggtatatgagtgtaaaccaagcagcccagcagcttctggagattgttcaaaatcaaagaatacgaggagaagaaccagcagttaccgaggagacactttgtgttggcttagccagggttggagccgacgaccagaaaattgcagcaggcactttaaggcaaatgtgcactgtggacttgggagaaccattgcattccttgatcatcacaggaggcagcatacatccaatggagatggagatgctaagtctgttttccataccagaaaatagctcagaatctcaaagcatcaatggactttgaacatagatatttaccattgtctgatgtaaatttcagccatatatggattgatatggtttggatgtatccccacccaagtctcatcttgaattttaatcctcataattcccaggtgttgtggtaggtaattgaatcatgggggcagtttccctcatgctattctcatgatagtgagctttcatgagatctgatggttttataagtgcctggcatttcccctactggctctcattctcactcttgccgccctgtgaagaggtgccttccaccgtgattgttaagtttcctgaggccttcccagccatgtggaactgtgagtcgaaaattaaacctcttttataattacccagtctcgggtatttcttcatagcagtgtgagaatggattaatacctggatgcatgcatgtttgtgtaacaaacaggtcttttggcttatctagtaagtataaaacaagtgaccaaaaagaagttgactcaacaatgcttggtttcttgtggcagtgagttttttccctatgatatcatcagttgttgctgctattttggcaaattttcaggatgtacacataaagcagaccaggctggaaagcttgtggatagacatccactgacagaatcatttaagagcagtttttatttatgaaaccaatttatacaaggtggttgttaacagaatataacttagaggtaactggaatttgaatcacttgaatctgttttaaagggtaaaaaatgttatgagtgccaagaaaagcaaataaaagattagtaaatgttcacaaaatat

SEQ ID NO: 5952 - DNA, 1518 bp, Homo sapiens
ggtgaggccggcggcgtgggccttttctctgcacggagccggcgcttttgcagttgcttctgcggaaaggtggtagttaagaatttgtaaaggccasagaactacctacgattctctcagcgggaagagttttatggaagaaaattggttgttgctgatagagaagaagtggaacaagaagcagataatattttaaaggatgctgatatcagtgatgttgcattccttgtggttggtgatccatttggggccacaacacacagtgatcttgttctaagagcaacaaagctgggaattccttatagagttattcacaatgcctccataatgaatgctgtaggctgctgtggtttacagttrtataagtttggagagacagtttctattgacacttggagaccagaaagcttctttgacaaagtgaagaagaacagacaaaatggcatgcacacattatgtttactagacatcaaagtaaaggagcagtctttggaaaatctaatcaacagttaccgaggagacactttgtgttggcttagccagggttggagccgacgaccagaaaattgcagcaggcactttaaggcaaatgtgcactgtggacttgggagaaccattgcattccttgatcatcacaggaggcagcatacatccaatggagatggagatgctaagtctgttttccataccagaaaatagctcagaatctcaaagcatcaatggactttgaacatagatatttaccattgtctgatgtaaatttcagccatatatggattgatatggtttggatgtatccccacccaagtctcatcttgaattttaatcctcataattcccaggtgttgtggtaggtaattgaatcatgggggcagtttccctcatgctattctcatgatagtgagctttcatgagatctgatggttttataagtgcctggcatttcccctactggctctcattctcactcttgccgccctgtgaagaggtgccttccaccgtgattgttaagtttcctgaggccttcccagccatgtggaactgtgagtcgaaaattaaacctcttttataattacccagtctcgggtatttcttcatagcagtgtgagaatggattaatacctggatgcatgcatgtttgtgtaacaaacaggtcttttggcttatctagtaagtataaaacaagtgaccaaaaagaagttgactcaacaatgcttggtttcttgtggcagtgagttttttccctatgatatcatcagttgttgctgctattttggcaaattttcaggatgtacacataaagcagaccaggctggaaagcttgtggatagacatccactgacagaatcatttaagagcagtttttatttatgaaaccaatttatacaaggtggttgttaacagaatataacttagaggtaactggaatttgaatcacttgaatctgttttaaagggtaaaaaatgttatgagtgccaagaaaagcaaataaaagattagtaaatgttcacaaaatat

SEQ ID NO: 5953 - DNA, 1784 bp, Homo sapiens
cgtaggtgaggccggcggcgtgggccttttctctgcacggagccggcgcttttgcagttgcttctgcggaaaggtggtagttaagaatttgtaaaggccasagaactacctacgattctctcagcggtctctcttctcctcaagtttgaaatgctttatctcatcgggttgggcctgggagatgccaaggacatcacagtcaagggcctggaagttgttagacgctgcagtcgagtgtatctggaagcctacacctcagtcctaactgtagggaaggaagccttggaagagttttatggaagaaaattggttgttgctgatagagaagaagtggaacaagaagcagataatattttaaaggatgctgatatcagtgatgttgcattccttgtggttggtgatccatttggggccacaacacacagtgatcttgttctaagagcaacaaagctgggaattccttatagagttattcacaatgcctccataatgaatgctgtaggctgctgtggtttacagttrtataagtttggagagacagtttctattgacacttggagaccagaaagcttctttgacaaagtgaagaagaacagacaaaatggcatgcacacattatgtttactagacatcaaagtaaaggagcagtctttggaaaatctaatcaagggaaggaagatctatgaacctccacggtatatgagtgtaaaccaagcagcccagcagcttctggagattgttcaaaatcaaagaatacgaggagaagaaccagcagttaccgaggagacactttgtgttggcttagccagggttggagccgacgaccagaaaattgcagcaggcactttaaggcaaatgtgcactgtggacttgggagaaccattgcattccttgatcatcacaggaggcagcatacatccaatggagatggagatgctaagtctgttttccataccagaaaatagctcagaatctcaaagcatcaatggactttgaacatagatatttaccattgtctgatgtaaatttcagccatatatggattgatatggtttggatgtatccccacccaagtctcatcttgaattttaatcctcataattcccaggtgttgtggtaggtaattgaatcatgggggcagtttccctcatgctattctcatgatagtgagctttcatgagatctgatggttttataagtgcctggcatttcccctactggctctcattctcactcttgccgccctgtgaagaggtgccttccaccgtgattgttaagtttcctgaggccttcccagccatgtggaactgtgagtcgaaaattaaacctcttttataattacccagtctcgggtatttcttcatagcagtgtgagaatggattaatacctggatgcatgcatgtttgtgtaacaaacaggtcttttggcttatctagtaagtataaaacaagtgaccaaaaagaagttgactcaacaatgcttggtttcttgtggcagtgagttttttccctatgatatcatcagttgttgctgctattttggcaaattttcaggatgtacacataaagcagaccaggctggaaagcttgtggatagacatccactgacagaatcatttaagagcagtttttatttatgaaaccaatttatacaaggtggttgttaacagaatataacttagaggtaactggaatttgaatcacttgaatctgttttaaagggtaaaaaatgttatgagtgccaagaaaagcaaataaaagattagtaaatgttcacaaaatat

SEQ ID NO: 5954 - DNA, 1935 bp, Homo sapiens
tagttaagaatttgtaaaggccasagaactacctacgattctctcagcgggtaattggctgctcctaggtttgtgtaacaagaggcaaaactggtagggttgtttaaaacctcttatcccagttcttaagcgtgacataaggttcccaaacccctccttgtgacttgcctcttctcttgtkctactttggttgtcatcgtgttcatcactagattttagatgtcctcggtgttactgacggtttttctgtccacttcgtcttgcagtctctcttctcctcaagtttgaaatgctttatctcatcgggttgggcctgggagatgccaaggacatcacagtcaagggcctggaagttgttagacgctgcagtcgagtgtatctggaagcctacacctcagtcctaactgtagggaaggaagccttggaagagttttatggaagaaaattggttgttgctgatagagaagaagtggaacaagaagcagataatattttaaaggatgctgatatcagtgatgttgcattccttgtggttggtgatccatttggggccacaacacacagtgatcttgttctaagagcaacaaagctgggaattccttatagagttattcacaatgcctccataatgaatgctgtaggctgctgtggtttacagttrtataagtttggagagacagtttctattgttttttggacagacacttggagaccagaaagcttctttgacaaagtgaagaagaacagacaaaatggcatgcacacattatgtttactagacatcaaagtaaaggagcagtctttggaaaatctaatcaagggaaggaagatctatgaacctccacggtatatgagtgtaaaccaagcagcccagcagcttctggagattgttcaaaatcaaagaatacgaggagaagaaccagcagttaccgaggagacactttgtgttggcttagccagggttggagccgacgaccagaaaattgcagcaggcactttaaggcaaatgtgcactgtggacttgggagaaccattgcattccttgatcatcacaggaggcagcatacatccaatggagatggagatgctaagtctgttttccataccagaaaatagctcagaatctcaaagcatcaatggactttgaacatagatatttaccattgtctgatgtaaatttcagccatatatggattgatatggtttggatgtatccccacccaagtctcatcttgaattttaatcctcataattcccaggtgttgtggtaggtaattgaatcatgggggcagtttccctcatgctattctcatgatagtgagctttcatgagatctgatggttttataagtgcctggcatttcccctactggctctcattctcactcttgccgccctgtgaagaggtgccttccaccgtgattgttaagtttcctgaggccttcccagccatgtggaactgtgagtcgaaaattaaacctcttttataattacccagtctcgggtatttcttcatagcagtgtgagaatggattaatacctggatgcatgcatgtttgtgtaacaaacaggtcttttggcttatctagtaagtataaaacaagtgaccaaaaagaagttgactcaacaatgcttggtttcttgtggcagtgagttttttccctatgatatcatcagttgttgctgctattttggcaaattttcaggatgtacacataaagcagaccaggctggaaagcttgtggatagacatccactgacagaatcatttaagagcagtttttatttatgaaaccaatttatacaaggtggttgttaacagaatataacttagaggtaactggaatttgaatcacttgaatctgttttaaagggtaaaaaatgttatgagtgccaagaaaagcaaataaaagattagtaaatgttcacaaaatat

SEQ ID NO: 5955 - DNA, 1644 bp, Homo sapiens
cgtaggtgaggccggcggcgtgggccttttctctgcacggagccggcgcttttgcagttgcttctgcggaaaggtggtagttaagaatttgtaaaggccasagaactacctacgattctctcagcggtctctcttctcctcaagtttgaaatgctttatctcatcgggttgggcctgggagatgccaaggacatcacagtcaagggcctggaagttgttagacgctgcagtcgagtgtatctggaagcctacacctcagtcctaactgtagggaaggaagccttggaagagttttatggaagaaaattggttgttgctgatagagaagaagtggaacaagaagcagataatattttaaaggatgctgatatcagtgatgttgcattccttgtggttggtgatccatttggacacttggagaccagaaagcttctttgacaaagtgaagaagaacagacaaaatggcatgcacacattatgtttactagacatcaaagtaaaggagcagtctttggaaaatctaatcaagggaaggaagatctatgaacctccacggtatatgagtgtaaaccaagcagcccagcagcttctggagattgttcaaaatcaaagaatacgaggagaagaaccagcagttaccgaggagacactttgtgttggcttagccagggttggagccgacgaccagaaaattgcagcaggcactttaaggcaaatgtgcactgtggacttgggagaaccattgcattccttgatcatcacaggaggcagcatacatccaatggagatggagatgctaagtctgttttccataccagaaaatagctcagaatctcaaagcatcaatggactttgaacatagatatttaccattgtctgatgtaaatttcagccatatatggattgatatggtttggatgtatccccacccaagtctcatcttgaattttaatcctcataattcccaggtgttgtggtaggtaattgaatcatgggggcagtttccctcatgctattctcatgatagtgagctttcatgagatctgatggttttataagtgcctggcatttcccctactggctctcattctcactcttgccgccctgtgaagaggtgccttccaccgtgattgttaagtttcctgaggccttcccagccatgtggaactgtgagtcgaaaattaaacctcttttataattacccagtctcgggtatttcttcatagcagtgtgagaatggattaatacctggatgcatgcatgtttgtgtaacaaacaggtcttttggcttatctagtaagtataaaacaagtgaccaaaaagaagttgactcaacaatgcttggtttcttgtggcagtgagttttttccctatgatatcatcagttgttgctgctattttggcaaattttcaggatgtacacataaagcagaccaggctggaaagcttgtggatagacatccactgacagaatcatttaagagcagtttttatttatgaaaccaatttatacaaggtggttgttaacagaatataacttagaggtaactggaatttgaatcacttgaatctgttttaaagggtaaaaaatgttatgagtgccaagaaaagcaaataaaagattagtaaatgttcacaaaatat

SEQ ID NO: 5956 - DNA, 4351 bp, Homo sapiens
cgcggagtcgtgaaagtggagggggctgagggagggcggggaggaaggtctgggggcggacccagggggaggaggaggaggaagagtaactgctgaaaggaggtggcgaaggaggatccggagcagctgctgccagcccgcgggcactgaagtcctcccggctgccgctcgagtagccacgggcgcgatcgggaccagaagtctcctcctccatgatcactttggaagccgggggaasactttgccctgccctgagagctggtctgcgtttcccaggcgcggcggcggcggagcagcagctgcagcagccgagtccaaataggagcggccacagccaggggcgtgwgcgccccgcgcggagcgagctcgggttcccctcggaatgtccccggggcgcccggcgcgctgaccccgaagccgcctccgccttcggcgcctgctgcctccctcggccaggcttgttgttcgggactgtgagcttcctggctcctgggcagtggggaagcccccgggggcgagtgacytcagctggccacgacccagccctcccccgtgcgtatctcgcttaagatggcagcggagtcaggggaactaatcggggcttgtgagttcatgaaagatcggttatattttgctactttaaggaatagaccaaaaagcacagtaaatacccactatttctccatcgatgaggagctggtctatgaaaatttctatgcagattttggaccgctgaacttggcaatggtgtacagatattgctgcaaactaaacaagaaactaaaatcatacagtttgtcaagaaagaaaatagtgcactacacctgttttgaccaacggaaaagagcaaatgcagcatttttgataggtgcctatgcmgtaatctatttaaagaagacaccagaagaagcctacagagcactcctgtctggctcaaaccccccctatcttccattcagggatgcttcctttggaaattgcacttacaatctcaccattctcgactgtttgcagggaatcagaaagggattacaacatggattttttgactttgagacatttgatgtggatgaatatgaacattatgagcgagttgaaaatggtgacttcaactgkattgttccaggaaaatttttagcatttagtggaccacatcctaaaagcaaaattgagaatggttatcctcttcacgcccctgaagcctactttccttatttcaaaaagcataatgtgactgcagttgtgaggctaaacaaaaagatttatgaggcaaagcgcttcacagacgctggcttcgagcactatgacctcttcttcatagatggcagcacacccagtgacaacatcgtgcgaaggttcctgaacatctgtgagaacaccgaaggggccatcgccgttcactgcaaagctggtcttggaagaacagggacattgatagcctgttatgtaatgaaacactacaggtttacacaygctgaaataattgcttggattagaatatgccggccaggctctattataggaccccagcagcacttcctggaagaaaaacaagcatcrttgtgggtccaaggagacattttccgatccaaactgaaaaatcgaccatccagtgaaggaagtattaataaaattctttctggcctagatgatatgtctattggtggaaatctttcaaaaacacaaaacatggaacgatttggagaggataacttagaagatgatgatgtggaaatgaaaaatggtataacccagggagacaaactacgtgccttaaaaagtcagagacagccacgtacctcaccatcctgtgcatttaggtcagatgatacaaaaggacatccaagagcagtgtcccagcctttcagattaagttcatccctgcaaggatctgcagttactttgaagacatcaaaaatggcactgtccccttcagcaacggccaagaggatcaacagaacttctttgtcttcgggtgccactgtaagaagcttttccataaactcccggctagccagttctctagggaacttgaatgctgcaacagatgatccagagaacaaaaagacctcctcatcctctaaggcaggcttcacagccagcccgtttaccaacctcttgaatggcagctcccagccaactaccagaaattaccctgagctcaacaataatcagtacaacagaagcagcaacagcaacgggggcaacctgaacagycccccaggcccccacagcgccaagacagaggagcacaccaccatcctccgaccctcctacaccgggctttcttcttcttcagcgagattcctgagccgttctatcccttcccttcagtctgaatatgttcattactaaggccttgccactccagtgaaagctgttcttctcttagacacaatttcttcatctggacgagcagtggagagggaaagcaacttcttgctggaagaatatctctgccttcttaccttaaattaaaaagagcactaagataacaccttcaagagacttgaaaacagaaaactggttaatgactactataaatgcactgaaactatgtttatggagatttccatacttttaaagacagttttaatgttgaatttggtattttgaagggttatttttaatgtattttggtaatacatttattattatatttacatgtacagtgttacattatatatgtattgtgaactttaaaagactattttgataaatttataaatatataaaattatgtaaaaactacactatattttgatttagattttcctgctgtttgctaccaaaaatttgtattttaaatctgtttagttttagtatggttttgtctctaatgaataaataattccttcttattaagaagaagtaagggagaaagtttttagaaagtgatttttatgctcgcactataaatatggcaggtcagttcattcttttgggaagtcagtttarttacactgagtttatccaagtttatctctaccaagagtataatggcatgggatggcttatttaggacaattccctttcccattgtttttgttgctgagccaatttgagttagttttgcatcctggggggctttaaaatacagcatgcagtgaaagatcagaattcactgaatatttcttctgagagcatggtttcatggtttttctctatgaaatgactcaatattccaaatgtttttttttccttcctcctttcaaaagagttcttaacccaattaggatatcctgctttgggtatgaggttgttgttgcctgtaatcacacatggtttgacatcagttttaaatcaatggagagaaaaaactgaaaaagatgctgctaagtagttctctgtattaaaggagatatttttaaaacagggtacaaccccctgctgcacacgctagcatatctggaacctactatgaaaatgaaaggacccttataggtactcacagccctttcatgtaagtatgatctgatatttaggtcttcagaagcctgtaggtttcatttctatgaggaatcgaggagcgttacatcctgatatccttccaggctgcttaagaatggactgcttcgacactgaaagtgctagttaaatggattcatatgaagtgctttactcccaaccattgagttatttataatgtatttattaggggagggtaccttgagtctattatatatgcttcatcaaaacatcttgttcatgttttatgtttttaaaaaaggcatttgaatgaatgtttgactcaggtttgttaaattaaccttcagtaactgcagtaccaaaaattacactcaactgatgaaaaaaacgaattgtatgatttaggaatcaaaaactaaaataagtggaattatgtatcttttctaaagttaaaaaagtaaaatattttattatgagttattataaaaattggttaattgtataggaagatgacagtatttttttcaagttatcataaaaagtaattcagatgacatttgagaagtaggggaaagggaatcatgttgacagttttagttctgtgaacactaatttgtgtgaagctattaaaatgattgtaaagttgactactgtaaatttcccataattatgtgtgtatatgtgtcatatgtatgtacatgtatatgtctaaaaattactttacacatgtgcctacatagacacaccaagaagtggatgtatataatatagaaagtatatagcaaagtaattttactctgataataaaaattgtttgacatgtattttgttatgaatagtttatcttccaaaagatattttgctctattttaaagtgtagaagaatacactgctaataaataataaaagttttattcaattt

SEQ ID NO: 5957 - DNA, 2524 bp, Homo sapiens
cgcggagtcgtgaaagtggagggggctgagggagggcggggaggaaggtctgggggcggacccagggggaggaggaggaggaagagtaactgctgaaaggaggtggcgaaggaggatccggagcagctgctgccagcccgcgggcactgaagtcctcccggctgccgctcgagtagccacgggcgcgatcgggaccagaagtctcctcctccatgatcactttggaagccgggggaasactttgccctgccctgagagctggtctgcgtttcccaggcgcggcggcggcggagcagcagctgcagcagccgagtccaaataggagcggccacagccaggggcgtgwgcgccccgcgcggagcgagctcgggttcccctcggaatgtccccggggcgcccggcgcgctgaccccgaagccgcctccgccttcggcgcctgctgcctccctcggccaggcttgttgttcgggactgtgagcttcctggctcctgggcagtggggaagcccccgggggcgagtgacytcagctggccacgacccagccctcccccgtgcgtatctcgcttaagatggcagcggagtcaggggaactaatcggggcttgtgagttcatgaaagatcggttatattttgctactttaaggaatagaccaaaaagcacagtaaatacccactatttctccatcgatgaggagctggtctatgaaaatttctatgcagattttggaccgctgaacttggcaatggtgtacagatattgctgcaaactaaacaagaaactaaaatcatacagtttgtcaagaaagaaaatagtgcactacacctgttttgaccaacggaaaagagcaaatgcagcatttttgataggtgcctatgcmgtaatctatttaaagaagacaccagaagaagcctacagagcactcctgtctggctcaaaccccccctatcttccattcagggatgcttcctttggaaattgcacttacaatctcaccattctcgactgtttgcagggaatcagaaagggattacaacatggattttttgactttgagacatttgatgtggatgaatatgaacattatgagcgagttgaaaatggtgacttcaactgkattgttccaggaaaatttttagcatttagtggaccacatcctaaaagcaaaattgagaatggttatcctcttcacgcccctgaagcctactttccttatttcaaaaagcataatgtgactgcagttgtgaggctaaacaaaaagatttatgaggcaaagcgcttcacagacgctggcttcgagcactatgacctcttcttcatagatggcagcacacccagtgacaacatcgtgcgaaggttcctgaacatctgtgagaacaccgaaggggccatcgccgttcactgcaaagctggtcttggaagaacagggacattgatagcctgttatgtaatgaaacactacaggtttacacaygctgaaataattgcttggattagaatatgccggccaggctctattataggaccccagcagcacttcctggaagaaaaacaagcatcrttgtgggtccaaggagacattttccgatccaaactgaaaaatcgaccatccagtgaaggaagtattaataaaattctttctggcctagatgatatgtctattggtggaaatctttcaaaaacacaaaacatggaacgatttggagaggataacttagaagatgatgatgtggaaatgaaaaatggtataacccagggagacaaactacgtgccttaaaaagtcagagacagccacgtacctcaccatcctgtgcatttaggtcagatgatacaaaaggacatccaagagcagtgtcccagcctttcagattaagttcatccctgcaaggatctgcagttactttgaagacatcaaaaatggcactgtccccttcagcaacggccaagaggatcaacagaacttctttgtcttcgggtgccactgtaagaagcttttccataaactcccggctagccagttctctagggaacttgaatgctgcaacagatgatccagagaacaaaaagacctcctcatcctctaaggcaggcttcacagccagcccgtttaccaacctcttgaatggcagctcccagccaactaccagaaattaccctgagctcaacaataatcagtacaacagaagcagcaacagcaacgggggcaacctgaacagycccccaggcccccacagcgccaagacagaggagcacaccaccatcctccgaccctcctacaccgggctttcttcttcttcagcgagattcctgagccgttctatccctgtaagtgcgcagacaccacctcctggtcctcagaaccctgaatgcaacttctgtgccttgccttcccagccgaggctgccaccaaagaaatttaatagtgccaaggaagccttctgagcgatgccttccctctgtgctgtgaaactgtctatgcactacattctgctagctcctcttcaagtaaacgccaagtcacaac

SEQ ID NO: 5958 - DNA, 2625 bp, Homo sapiens
cgcggagtcgtgaaagtggagggggctgagggagggcggggaggaaggtctgggggcggacccagggggaggaggaggaggaagagtaactgctgaaaggaggtggcgaaggaggatccggagcagctgctgccagcccgcgggcactgaagtcctcccggctgccgctcgagtagccacgggcgcgatcgggaccagaagtctcctcctccatgatcactttggaagccgggggaasactttgccctgccctgagagctggtctgcgtttcccaggcgcggcggcggcggagcagcagctgcagcagccgagtccaaataggagcggccacagccaggggcgtgwgcgccccgcgcggagcgagctcgggttcccctcggaatgtccccggggcgcccggcgcgctgaccccgaagccgcctccgccttcggcgcctgctgcctccctcggccaggcttgttgttcgggactgtgagcttcctggctcctgggcagtggggaagcccccgggggcgagtgacytcagctggccacgacccagccctcccccgtgcgtatctcgcttaagatggcagcggagtcaggggaactaatcggggcttgtgagttcatgaaagatcggttatattttgctactttaaggaatagaccaaaaagcacagtaaatacccactatttctccatcgatgaggagctggtctatgaaaatttctatgcagattttggaccgctgaacttggcaatggtgtacagatattgctgcaaactaaacaagaaactaaaatcatacagtttgtcaagaaagaaaatagtgcactacacctgttttgaccaacggaaaagagcaaatgcagcatttttgataggtgcctatgcmgtaatctatttaaagaagacaccagaagaagcctacagagcactcctgtctggctcaaaccccccctatcttccattcagggatgcttcctttggaaattgcacttacaatctcaccattctcgactgtttgcagggaatcagaaagggattacaacatggattttttgactttgagacatttgatgtggatgaatatgaacattatgagcgagttgaaaatggtgacttcaactgkattgttccaggaaaatttttagcatttagtggaccacatcctaaaagcaaaattgagaatggttatcctcttcacgcccctgaagcctactttccttatttcaaaaagcataatgtgactgcagttgtgaggctaaacaaaaagatttatgaggcaaagcgcttcacagacgctggcttcgagcactatgacctcttcttcatagatggcagcacacccagtgacaacatcgtgcgaaggttcctgaacatctgtgagaacaccgaaggggccatcgccgttcactgcaaagctggtcttggaagaacagggacattgatagcctgttatgtaatgaaacactacaggtttacacaygctgaaataattgcttggattagaatatgccggccaggctctattataggaccccagcagcacttcctggaagaaaaacaagcatcrttgtgggtccaaggagacattttccgatccaaactgaaaaatcgaccatccagtgaaggaagtattaataaaattctttctggcctagatgatatgtctattggtggaaatctttcaaaaacacaaaacatggaacgatttggagaggtaagttttccctaggagattctatcttcttaaaactgatgttctgcatttgtttctcagttggacctatataacatagcagtgtcttttctctggatgccacgagtaccaagtttttagaagtagagccatccgtctatatagcaagaagcagaggaaagaaaccaattgcccttaaaaaaaaaaaagctataatttaaggagtaaattataaaggaggctactctggtaaggggtaatatttatagaaaggaaacagaaaagcaaactttctatttgaaaattaaaataaatatcaagaagaaaaattttaatgtgacaattgaggaaataatacataccacaagtggtgctttgaaagcctcaaattcatgctgatttctaaagtaagtgccaacttgaaaacatgattagggcacttttttaaaaaaaaattaaggctctactgtaaacaaaccackgtaaatagttgatatatattgtctgattaatattcataactacctggtgagttaggtaatactatctctattttataggaaggaaattgcatatcagagatgttctaacctcagtgtcaaacatggttcaatccatgtctgtctgagtccaagcttgtgtttttttatatcacaccctgttacctctgaataaaaatagaagtgatttactaagaattaggattatgagcatttttggaactagaaacaacgttgaaacaccatttgtttggttccactattgtagagacaagaaactggggtcccagaaaatttgtgatttgtgtaaagttccagggttgtttagtagtggggccactttgasaactgggcattcaattcctagtttaggtctttctaccacgttatacctgaggtgaagctaagtatctggtttatacttttatatctytaaagg

SEQ ID NO: 5959 - DNA, 2655 bp, Homo sapiens
cgcggagtcgtgaaagtggagggggctgagggagggcggggaggaaggtctgggggcggacccagggggaggaggaggaggaagagtaactgctgaaaggaggtggcgaaggaggatccggagcagctgctgccagcccgcgggcactgaagtcctcccggctgccgctcgagtagccacgggcgcgatcgggaccagaagtctcctcctccatgatcactttggaagccgggggaasactttgccctgccctgagagctggtctgcgtttcccaggcgcggcggcggcggagcagcagctgcagcagccgagtccaaataggagcggccacagccaggggcgtgwgcgccccgcgcggagcgagctcgggttcccctcggaatgtccccggggcgcccggcgcgctgaccccgaagccgcctccgccttcggcgcctgctgcctccctcggccaggcttgttgttcgggactgtgagcttcctggctcctgggcagtggggaagcccccgggggcgagtgacytcagctggccacgacccagccctcccccgtgcgtatctcgcttaagatggcagcggagtcaggggaactaatcggggcttgtgagttcatgaaagatcggttatattttgctactttaaggaatagaccaaaaagcacagtaaatacccactatttctccatcgatgaggagctggtctatgaaaatttctatgcagattttggaccgctgaacttggcaatggtgtacagatattgctgcaaactaaacaagaaactaaaatcatacagtttgtcaagaaagaaaatagtgcactacacctgttttgaccaacggaaaagagcaaatgcagcatttttgataggtgcctatgcmgtgaaaaaaattccttagaagggatcttccaattccaagtttgaacatcatgtggggcaggtatctttctgtctcccagggccaaccattagatggtcccgactatattgggatgcttcctttggaaattgcacttacaatctcaccattctcgactgtttgcagggaatcagaaagggattacaacatggattttttgactttgagacatttgatgtggatgaatatgaacattatgagcgagttgaaaatggtgacttcaactgkattgttccaggaaaatttttagcatttagtggaccacatcctaaaagcaaaattgagaatggttatcctcttcacgcccctgaagcctactttccttatttcaaaaagcataatgtgactgcagttgtgaggctaaacaaaaagatttatgaggcaaagcgcttcacagacgctggcttcgagcactatgacctcttcttcatagatggcagcacacccagtgacaacatcgtgcgaaggttcctgaacatctgtgagaacaccgaaggggccatcgccgttcactgcaaagctggtcttggaagaacagggacattgatagcctgttatgtaatgaaacactacaggtttacacaygctgaaataattgcttggattagaatatgccggccaggctctattataggaccccagcagcacttcctggaagaaaaacaagcatcrttgtgggtccaaggagacattttccgatccaaactgaaaaatcgaccatccagtgaaggaagtattaataaaattctttctggcctagatgatatgtctattggtggaaatctttcaaaaacacaaaacatggaacgatttggagaggtaagttttccctaggagattctatcttcttaaaactgatgttctgcatttgtttctcagttggacctatataacatagcagtgtcttttctctggatgccacgagtaccaagtttttagaagtagagccatccgtctatatagcaagaagcagaggaaagaaaccaattgcccttaaaaaaaaaaaagctataatttaaggagtaaattataaaggaggctactctggtaaggggtaatatttatagaaaggaaacagaaaagcaaactttctatttgaaaattaaaataaatatcaagaagaaaaattttaatgtgacaattgaggaaataatacataccacaagtggtgctttgaaagcctcaaattcatgctgatttctaaagtaagtgccaacttgaaaacatgattagggcacttttttaaaaaaaaattaaggctctactgtaaacaaaccackgtaaatagttgatatatattgtctgattaatattcataactacctggtgagttaggtaatactatctctattttataggaaggaaattgcatatcagagatgttctaacctcagtgtcaaacatggttcaatccatgtctgtctgagtccaagcttgtgtttttttatatcacaccctgttacctctgaataaaaatagaagtgatttactaagaattaggattatgagcatttttggaactagaaacaacgttgaaacaccatttgtttggttccactattgtagagacaagaaactggggtcccagaaaatttgtgatttgtgtaaagttccagggttgtttagtagtggggccactttgasaactgggcattcaattcctagtttaggtctttctaccacgttatacctgaggtgaagctaagtatctggtttatacttttatatctytaaagg

SEQ ID NO: 5960 - DNA, 3255 bp, Homo sapiens
ccccggttccgctgtcttttctgtctacagtttgcgatccccgcgtccaggatggagcagctgaacgaactggagctgctgatggagaagagtttttgggaggaggcggagctgccggcggagctatttcagaagaaagtggtagcttcctttccaagaacagttctgagcacaggaatggataaccggtacctggtgttggcagtcaatactgtacagaacaaagagggaaactgtgaaaagcgcctggtcatcactgcttcacagtcactagaaaataaagaactatgcatccttaggaatgactggtgttctgttccagtagagccaggagatatcattcatttggagggagactgcacatctgacacttggataatagataaagattttggatatttgattctgtatccagacatgctgatttctggcaccagcatagccagtagtattcgatgtatgagaagagctgtcctgagtgaaacttttaggagctctgatccagccacacgccaaatgmtaattggtacggttctccatgrggtgtttcaaaaagcmataaataatagctttgccccagaaaagctacaagaacttgcttttcaaacaattcaagaaataagacatttgaaggaaatgtaccgcttaaatctaagtcaagatgaaataaaacaagaagtagaggactatcttccttcgttttgtaaatgggcaggagatttcatgcataaaaacacttcgactgacttccctcagatgcagctctctctgccaagtgataatagtaaggataattcaacatgtaacattgaagtcgtgaaaccaatggatattgaagaaagcatttggtcccctaggtttggattgaaaggcaaaatagatgttacagttggtgtgaaaatacatcgagggtataaaacaaaatacaagataatgccgctggaacttaaaactggcaaagaatcaaattctattgaacaccgtagtcaggttgttctgtacactctactaagccaagagagaagagctgatccagaggctggcttgcttctctacctcaagactggtcagatgtaccctgtgcctgccaaccatctagataaaagagaattattaaagctaagaaaccagatggcattctcattgtttcaccgtattagcaaatctgctactagacagaagacacagcttgcttctttgccacaaataattgaggaagagaaaacttgtaaatattgttcacaaattggcaattgtgctctttatagcagagcagttgaacaacagatggattgtagttcagtcccaattgtgatgctgcccaaaatagaagaagaaacccagcatctgaagcaaacacacttagaatatttcagcctttggtgtctaatgttaaccctggagtcacaatcraaggataataaaaagaatcaccaaaatatctggctaatgcctgcttcggaaatggagaagagtggcagttgcattggaaacctgattagaatggaacatgtaaagatagtttgtgatgggcaatatttacataatttccaatgtaaacatggtgccatacctgtcacaaatctaatggcaggtgacagagttattgtaagtggagaagaaaggtcactgtttgctttgtctagaggatatgtgaaggagattaacatgacaacagtaacttgtttattagacagaarcttgtcggtccttccagaatcaactttgttcagattagaccaagaagaaaaaaattgtgatatagataccccattaggaaatctttccaaattgatggaaaacacgtttgtcagcaaaaaacttcgagatttaattattgactttcgtgaacctcagtttatatcctaccttagttctgttcttccacatgatgcaaaggatacagttgcctgcattctaaagggtttgaataagcctcagaggcaagcratgaaaaaggtacttctttcaaaagactacacactcatcgtgggtatgcctgggacaggaaaaacaactacratatgtactctcgtaagaattctctacgcctgtggttttagcgttttgttgaccagctatacacactctgctgttgacaatattcttttgaagttagccaagtttaaaataggatttttgcgtttgggtcagattcagaaggttcatccagctatccagcaatttacagagcaagaaatttgcagatcaaagtccattaaatccttagctcttctagaagaactctacaatagtcaacttatagttgcaacaacatgtatgggaataaaccatccaatattttcccgtaaaatttttgatttttgtattgtggatgaagcctctcaaattagccaaccaatttgtctgggccccctttttttttcacggagatttgtgttagtgggggaccatcagcagcttcctcccctggtgctaaaccgtgaagcaagagctcttggcatgagtgaaagcttattcaagaggctggagcagaataagagtgctgttgtacagttaaccgtgcagtacagaatgaacagtaaaattatgtccttaagtaataagctgacctatgagggcaagctggagtgtggatcagacaaagtggccaatgcagtgataaacctacgtcactttaaagatgtgaagctggaactggaattttatgctgactattctgataatccttggttgatgggagtatttgaacccaacaatcctgtttgtttccttaatacagacaaggttccagcgccagaacaagttgaaaaaggtggtgtgagcaatgtaacagaagccaaactcatagttttcctaacctccatttttrttaaggctggatgcagtccctctgatattggtattattgcaccgtacaggcagcaattaaagatcatcaatgatttattggcacgttctattgggatggtcgaagttaatacagtagacaaataccaaggaagggacaaaagtattgtcctagtatcttttgttagaagtaataaggatggaactgttggtgaactcttgaaagattggcgacgtcttaatgttgctataaccagagccaaacataaactgattcttctggggtgtgtgccctcactaaattgctatcctcctttggagaagctgcttaatcatttaaactcagaaaaattaatatcctttttcttctgtatatggtcacatttgattgcactgttagaacatgaaagtctttgccacatattgggtgactttcaaagagaa

SEQ ID NO: 5961 - DNA, 1322 bp, Homo sapiens
cggcggccgttcagtcccttgttccccgccgccgccgtcgctgacccagcccgccaggcgctcctgaccgtcgcttcctccaggtcccaggtccccaggccctcgcctcagccccggcccctggtcccgccatgtccaaggaggagcgccccggtcgggaggagatcctggagtgccaggtgatgtgggagcctgacagtaagaagaacacgcagatggaccgcttccgggcggctgtgggcgccgcctgcggcctggcgctggagagttatgatgacttgtaccattggtccgttgagtcatattcagacttctgggcagagttctggaaattcagtggaattgtcttctcacgtgtgtatgatgaggttgtggacacatcgaaaggaatcgcagatgtccccgagtggttcaaaggcagtcggctcaactatgcagaaaacctcctgcggcacaaagagaatgacagagttgccctttacrttgcaagggaaggcaaagaggaaattgtgaaggtgacttttgaagagctgaggcaagaagtggctttgtttgcagcagcaatgaggaaaatgggtgtgaagaaaggagatcgggttgttggttatttacccaacagtgagcacgctgtcgaggcgatgctggctgcggcaagcattggtgccatctggagctccacgtccccggacttcggtgtgaatggtgtgctggaccggttttctcaaattcagccaaagctcatcttctctgtggargctgttgtctataatggcaaagagcacaaccacatggaaaagctgcagcaggtggttaaaggcctaccagacttgaagaaagtggtggtgattccttatgtgtcctccagagagaacatagacctttcaaagattccaaacagtgtgtttctggatgactttcttgccaccggcaccagtgagcaggccccgcagctggagttcgagcagctgcccttcagccacccactgttcatcatgttctcatcgggcaccacgggcgcacccaagtgcatggtgcattccgctgggggcaccctcatccagcatctgaaggagcacctgctgcacggcaacatgaccagcagtgacatcctcctgtgctacaccacggtcggctggatgatgtggaactggatggtgtcccttctggccacaggagcggccatggtcttgtacgatggctcccccctggtgcccacgcccaatgtgctctgggacctggttgacaggatagggtatctgggctcatggcgactactgcagaatcaaccccaagaccgggggcatcgtcatgcttggccggag

SEQ ID NO: 5962 - DNA, 3570 bp, Homo sapiens
gcggcagaggtgccacggtggtccccacaccagcctcagccggctcagcagctgggtcctcgtccagctccgactcctcctccagctccgattccgactcctcctcctcctggggagctggggccaaggctcgtgagcgcccctcacccccacgccccccggccgcgggcgctggagccggcggctgcgagcactcctttgaacggcgctgcactcagcggagggttacaggcgggagggcggggcctggaagggggcggggattcgaggcggggcctgcggggcggggcctgggccaagcggcccgcaggaggcggcggcggccgttcagtcccttgttccccgccgccgccgtcgctgacccagcccgccaggcgctcctgaccgtcgcttcctccaggtcccaggtccccaggccctcgcctcagccccggcccctggtcccgccatgtccaaggaggagcgccccggtcgggaggagatcctggagtgccaggtgatgtgggagcctgacagtaagaagaacacgcagatggaccgcttccgggcggctgtgggcgccgcctgcggcctggcgctggagagttatgatgacttgtaccattggtccgttgagtcatattcagacttctgggcagagttctggaaattcagtggaattgtcttctcacgtgtgtatgatgaggttgtggacacatcgaaaggaatcgcagatgtccccgagtggttcaaaggcagtcggctcaactatgcagaaaacctcctgcggcacaaagagaatgacagagttgccctttacrttgcaagggaaggcaaagaggaaattgtgaaggtgacttttgaagagctgaggcaagaagtggctttgtttgcagcagcaatgaggaaaatgggtgtgaagaaaggagatcgggttgttggttatttacccaacagtgagcacgctgtcgaggcgatgctggctgcggcaagcattggtgccatctggagctccacgtccccggacttcggtgtgaatggtgtgctggaccggttttctcaaattcagccaaagctcatcttctctgtggargctgttgtctataatggcaaagagcacaaccacatggaaaagctgcagcaggtggttaaaggcctaccagacttgaagaaagtggtggtgattccttatgtgtcctccagagagaacatagacctttcaaagattccaaacagtgtgtttctggatgactttcttgccaccggcaccagtgagcaggccccgcagctggagttcgagcagctgcccttcagccacccactgttcatcatgttctcatcgggcaccacgggcgcacccaagtgcatggtgcattccgctgggggcaccctcatccagcatctgaaggagcacctgctgcacggcaacatgaccagcagtgacatcctcctgtgctacaccacggtcggctggatgatgtggaactggatggtgtcccttctggccacaggagcggccatggtcttgtacgatggctcccccctggtgcccacgcccaatgtgctctgggacctggttgacaggataggcatcactgtcctggtaactggggccaagtggctgtcagtgctggaagagaaggccatgaagccggtggaaacccacagtctccagatgctccacacgatcctgtccactggctccccactgaaagcccagagctacgagtatgtctacaggtgcatcaagagcagcatcctcctgggctccatctcaggaggcaccgacatcatctcctgcttcatgggccacaatttttctcttcctgtgtataaaggggagattcaggcccggaacctgggcatggccgtggaagcgtggaacgaggaaggaaaggcggtctggggagagagcggcgagctggtgtgtactaagccgatcccttgccagcccacacacttctggaacgatgagaacggcaacaagtacaggaaggcgtatttctccaaattcccaggtatctgggctcatggcgactactgcagaatcaaccccaagaccgggggcatcgtcatgcttggccggagtgacggcaccctcaaccccaacggggtgcggttcggcagctcggaaatctataacattgtggaatccttcgaggaggtggaggacagcctgtgtgtcccccagtataacaagtacagggaggagagggtgatcctcttcctgaagatggcctccgggcacgccttccagcctgacttggttaagaggatccgtgacgccatccgcatgggcttgtctgcgcgacacgtgcccagcctcatcctggaaaccaagggcatcccgtatacgctcaacggcaagaaagtggaagttgccgtcaaacagatcatygctggaaaagccgtggagcaaggaggtgctttctcgaaccccgagaccctggatctgtaccgggacatccctgagctgcagggcttctgagtcagactgsctggcgtgtcactcagccgcacccgtgtgcactgtaacttttgtgtgctcaagaaattatacagaaacctacagctgttgtaaaaggatgctcgcaccaagtgttctgtaggcttggggagggatcgtttctctgttttgttaaatctggtgggtacctggatcttccacacgagtgggattctggccttcagagaccaggagggagtgtctgggccgcaggtgtggcactgtggtgagagtgtgtgtctttgcacacacagtgcagcgggaacggtggggctggctggtgctgaagacagacacactcctgagccaaggtcttgtcttcaacctccccgtcccgttgtcccattttgctctgtgaaggtgcaaatccctttcttcccttcccatctcaggctctcctgttttccctcagggtccagtatgcctttgagctttagctgttagaaaggaacccccgtgacttgacacagctttcacagctggctgctaggaccggcgggctgggtgttcacgtgtgtctgtgtcatggatgcaatgcaggccctggaggactgtgcgtcacccgtcaaccagagcgtgcctccgggccagcttccctccaaggaatgagtggatttcatacaggatctctttattgcacagactgaatggctttacatgtttctaatgtgaattaggcatgtgaagcagtgggtgtccacccgtgtccctcatgggtgagccctccagctgtgagcccaggcagtgtggtcaccgagtgaggaccctcctcaccaggaaccgcatccctgtgctgcctccacctgagagttgctagggggttcttgtcgagatcatgtcatcagcacccctaagtcaagtcacgggtttccatagccaggcagttggtatgtacaattcagttcagcgtatgaacttgtatctctaatmtgatgtccatttttatattttttgaaactgagcacaatgaaatcctttcttgaatcattttccttttggattataaaaatatgggggaaagtgctatgatgaattttatgcaataaatgtatacatgtgtgcacatgcacccatgctgtgtgtgc

SEQ ID NO: 5963 - DNA, 3459 bp, Homo sapiens
ggggagctggggccaaggctcgtgagcgcccctcacccccacgccccccggccgcgggcgctggagccggcggctgcgagcactcctttgaacggcgctgcactcagcggagggttacaggcgggagggcggggcctggaagggggcggggattcgaggcggggcctgcggggcggggcctgggccaagcggcccgcaggaggcggcggcggccgttcagtcccttgttccccgccgccgccgtcgctgacccagcccgccaggcgctcctgaccgtcgcttcctccaggtcccaggtccccaggccctcgcctcagccccggcccctggtcccgccatgtccaaggaggagcgccccggtcgggaggagatcctggagtgccaggtgatgtgggagcctgacagtaagaagaacacgcagatggaccgcttccgggcggctgtgggcgccgcctgcggcctggcgctggagagttatgatgacttgtaccattggtccgttgagtcatattcagacttctgggcagagttctggaaattcagtggaattgtcttctcacgtgtgtatgatgaggttgtggacacatcgaaaggaatcgcagatgtccccgagtggttcaaaggcagtcggctcaactatgcagaaaacctcctgcggcacaaagagaatgacagagttgccctttacrttgcaagggaaggcaaagaggaaattgtgaaggtgacttttgaagagctgaggcaagaagtggctttgtttgcagcagcaatgaggaaaatgggtgtgaagaaaggagatcgggttgttggttatttacccaacagtgagcacgctgtcgaggcgatgctggctgcggcaagcattggtgccatctggagctccacgtccccggacttcggtgtgaatggtgtgctggaccggttttctcaaattcagccaaagctcatcttctctgtggargctgttgtctataatggcaaagagcacaaccacatggaaaagctgcagcaggtggttaaaggcctaccagacttgaagaaagtggtggtgattccttatgtgtcctccagagagaacatagacctttcaaagattccaaacagtgtgtttctggatgactttcttgccaccggcaccagtgagcaggccccgcagctggagttcgagcagctgcccttcagccacccactgttcatcatgttctcatcgggcaccacgggcgcacccaagtgcatggtgcattccgctgggggcaccctcatccagcatctgaaggagcacctgctgcacggcaacatgaccagcagtgacatcctcctgtgctacaccacggtcggctggatgatgtggaactggatggtgtcccttctggccacaggagcggccatggtcttgtacgatggctcccccctggtgcccacgcccaatgtgctctgggacctggttgacaggataggcatcactgtcctggtaactggggccaagtggctgtcagtgctggaagagaaggccatgaagccggtggaaacccacagtctccagatgctccacacgatcctgtccactggctccccactgaaagcccagagctacgagtatgtctacaggtgcatcaagagcagcatcctcctgggctccatctcaggaggcaccgacatcatctcctgcttcatgggccacaatttttctcttcctgtgtataaaggggagattcaggcccggaacctgggcatggccgtggaagcgtggaacgaggaaggaaaggcggtctggggagagagcggcgagctggtgtgtactaagccgatcccttgccagcccacacacttctggaacgatgagaacggcaacaagtacaggaaggcgtatttctccaaattcccaggtatctgggctcatggcgactactgcagaatcaaccccaagaccgggggcatcgtcatgcttggccggagtgacggcaccctcaaccccaacggggtgcggttcggcagctcggaaatctataacattgtggaatccttcgaggaggtggaggacagcctgtgtgtcccccagtataacaagtacagggaggagagggtgatcctcttcctgaagatggcctccgggcacgccttccagcctgacttggttaagaggatccgtgacgccatccgcatgggcttgtctgcgcgacacgtgcccagcctcatcctggaaaccaagggcatcccgtatacgctcaacggcaagaaagtggaagttgccgtcaaacagatcatygctggaaaagccgtggagcaaggaggtgctttctcgaaccccgagaccctggatctgtaccgggacatccctgagctgcagggcttctgagtcagactgsctggcgtgtcactcagccgcacccgtgtgcactgtaacttttgtgtgctcaagaaattatacagaaacctacagctgttgtaaaaggatgctcgcaccaagtgttctgtaggcttggggagggatcgtttctctgttttgttaaatctggtgggtacctggatcttccacacgagtgggattctggccttcagagaccaggagggagtgtctgggccgcaggtgtggcactgtggtgagagtgtgtgtctttgcacacacagtgcagcgggaacggtggggctggctggtgctgaagacagacacactcctgagccaaggtcttgtcttcaacctccccgtcccgttgtcccattttgctctgtgaaggtgcaaatccctttcttcccttcccatctcaggctctcctgttttccctcagggtccagtatgcctttgagctttagctgttagaaaggaacccccgtgacttgacacagctttcacagctggctgctaggaccggcgggctgggtgttcacgtgtgtctgtgtcatggatgcaatgcaggccctggaggactgtgcgtcacccgtcaaccagagcgtgcctccgggccagcttccctccaaggaatgagtggatttcatacaggatctctttattgcacagactgaatggctttacatgtttctaatgtgaattaggcatgtgaagcagtgggtgtccacccgtgtccctcatgggtgagccctccagctgtgagcccaggcagtgtggtcaccgagtgaggaccctcctcaccaggaaccgcatccctgtgctgcctccacctgagagttgctagggggttcttgtcgagatcatgtcatcagcacccctaagtcaagtcacgggtttccatagccaggcagttggtatgtacaattcagttcagcgtatgaacttgtatctctaatmtgatgtccatttttatattttttgaaactgagcacaatgaaatcctttcttgaatcattttccttttggattataaaaatatgggggaaagtgctatgatgaattttatgcaataaatgtatacatgtgtgcacatgcacccatgctgtgtgtgc

SEQ ID NO: 5964 - DNA, 3081 bp, Homo sapiens
cggcggccgttcagtcccttgttccccgccgccgccgtcgctgacccagcccgccaggcgctcctgaccgtcgcttcctccaggtcccaggtccccaggccctcgcctcagccccggcccctggtcccgccatgtccaaggaggagcgccccggtcgggaggagatcctggagtgccaggtgatgtgggagcctgacagtaagaagaacacgcagatggaccgcttccgggcggctgtgggcgccgcctgcggcctggcgctggagagttatgatgacttgtaccattggtccgttgagtcatattcagacttctgggcagagttctggaaattcagtggaattgtcttctcacgtgtgtatgatgaggttgtggacacatcgaaaggaatcgcagatgtccccgagtggttcaaaggcagtcggctcaactatgcagaaaacctcctgcggcacaaagagaatgacagagttgccctttacrttgcaagggaaggcaaagaggaaattgtgaaggtgacttttgaagagctgaggcaagaagtggctttgtttgcagcagcaatgaggaaaatgggtgtgaagaaaggagatcgggttgttggttatttacccaacagtgagcacgctgtcgaggcgatgctggctgcggcaagcattggtgccatctggagctccacgtccccggacttcggtgtgaatggtgtgctggaccggttttctcaaattcagccaaagctcatcttctctgtggargctgttgtctataatggcaaagagcacaaccacatggaaaagctgcagcaggtggttaaaggcctaccagacttgaagaaagtggtggtgattccttatgtgtcctccagagagaacatagacctttcaaagattccaaacagtgtgtttctggatgactttcttgccaccggcaccagtgagcaggccccgcagctggagttcgagcagctgcccttcagccacccactgttcatcatgttctcatcgggcaccacgggcgcacccaagtgcatggtgcattccgctgggggcaccctcatccagcatctgaaggagcacctgctgcacggcaacatgaccagcagtgacatcctcctgtgctacaccacggtcggctggatgatgtggaactggatggtgtcccttctggccacaggagcggccatggtcttgtacgatggctcccccctggtgcccacgcccaatgtgctctgggacctggttgacaggataggcatcactgtcctggtaactggggccaagtggctgtcagtgctggaagagaaggccatgaagccggtggaaacccacagtctccagatgctccacacgatcctgtccactggctccccactgaaagcccagagctacgagtatgtctacaggtgcatcaagagcagcatcctcctgggctccatctcaggaggcaccgacatcatctcctgcttcatgggccacaatttttctcttcctgtgtataaaggggagattcaggcccggaacctgggcatggccgtggaagcgtggaacgaggaaggaaaggcggtctggggagagagcggcgagctggtgtgtactaagccgatcccttgccagcccacacacttctggaacgatgagaacggcaacaagtacaggaaggcgtatttctccaaattcccaggtatctgggctcatggcgactactgcagaatcaaccccaagaccgggggcatcgtcatgcttggccggagtgacggcaccctcaaccccaacggggtgcggttcggcagctcggaaatctataacattgtggaatccttcgaggaggtggaggacagcctgtgtgtcccccagtataacaagtacagggaggagagggtgatcctcttcctgaagatggcctccgggcacgccttccagcctgacttggttaagaggatccgtgacgccatccgcatgggcttgtctgcgcgacacgtgcccagcctcatcctggaaaccaagggcatcccgtatacgctcaacggcaagaaagtggaagttgccgtcaaacagatcatygctggaaaagccgtggagcaaggaggtgctttctcgaaccccgagaccctggatctgtaccgggacatccctgagctgcagggcttctgagtcagactgsctggcgtgtcactcagccgcacccgtgtgcactgtaacttttgtgtgctcaagaaattatacagaaacctacagctgttgtaaaaggatgctcgcaccaagtgttctgtaggcttggggagggatcgtttctctgttttgttaaatctggtgggtacctggatcttccacacgagtgggattctggccttcagagaccaggagggagtgtctgggccgcaggtgtggcactgtggtgagagtgtgtgtctttgcacacacagtgcagcgggaacggtggggctggctggtgctgaagacagacacactcctgagccaaggtcttgtcttcaacctccccgtcccgttgtcccattttgctctgtgaaggtgcaaatccctttcttcccttcccatctcaggctctcctgttttccctcagggtccagtatgcctttgagctttagctgttagaaaggaatgagtggatttcatacaggatctctttattgcacagactgaatggctttacatgtttctaatgtgaattaggcatgtgaagcagtgggtgtccacccgtgtccctcatgggtgagccctccagctgtgagcccaggcagtgtggtcaccgagtgaggaccctcctcaccaggaaccgcatccctgtgctgcctccacctgagagttgctagggggttcttgtcgagatcatgtcatcagcacccctaagtcaagtcacgggtttccatagccaggcagttggtatgtacaattcagttcagcgtatgaacttgtatctctaatmtgatgtccatttttatattttttgaaactgagcacaatgaaatcctttcttgaatcattttccttttggattataaaaatatgggggaaagtgctatgatgaattttatgcaataaatgtatacatgtgtgcacatgc

SEQ ID NO: 5965 - DNA, 427 bp, Homo sapiens
gcagacactttttagctcagggcctggtggctakgttggttctctcctttccaatcagagacctctgccgcaaacmtgctctgccagatcctcggtcaggccaagaagcatccgagcttgggacagaaataaccyagagccctggaacaaactgggtcccaatgatcaatacaagttctgctcagtgaatgtggattacagcaagctgaagaaggaatgtccagatttctaaatgaaatgtttcactataacactgctttagaatgaaggttttccagaagccacatcygcacaatttttcacttaaccaggaaatatttcttctctaaatgcatgaaatcatgttggagatctctattgtaatctctattggagattacactgattaaatcaataaataactgaaacttgaaaaataaaataaaat

SEQ ID NO: 5966 - DNA, 524 bp, Homo sapiens
gcagacactttttagctcagggcctggtggctakgttggttctctcctttccaatcagagacctctgccgcaaacmtgctctgccagatcctcggtcaggccaagaagcatccgagcttgatccccctctttgtatttattggaactggagcttctggagcaacactgtatctcttgcatctggcattgttcaatccagatgtttgttgggacagaaataaccyagagccctggaacaaactgggtcccaatgatcaatacaagttctgctcagtgaatgtggattacagcaagctgaagaaggaatgtccagatttctaaatgaaatgtttcactataacactgctttagaatgaaggttttccagaagccacatcygcacaatttttcacttaaccaggaaatatttcttctctaaatgcatgaaatcatgttggagatctctattgtaatctctattggagattacactgattaaatcaataaataactgaaacttgaaaaataaaataaaataaaattct

SEQ ID NO: 5967 - DNA, 2375 bp, Homo sapiens
ggctcacataaattcagaaagtatgatagcagtgtaggtggttagcagcacctcataaggtccttcctagcaagggatgctaatgactagccaatgctctaggaagacattgagaccagccaacttcttgccttgataactactgaagagacattgggtggctggattttgaaagcagacttctggttataggtgatgcaacttgaaaaacaatcctgaaacatgaaacaagaataataatatttaaatgtaacttaatcattatacctctttatccatcaaagtgaattcattccattccctttcatctgtgctcatactttgcatcagatattgggtaaaccaaagtgtgtaggaagaaataaatgttttcatagtcattactctttacaatgggagtrctaaaattcaagcacatctttttcagaagctttgttaaatcaagtggagtatcccagatagttttcaccttccttctgattccatgttgcttgactctgaatttcagagcacctcctgttattccaaatgygcctttcctctgggcctggaatgccccaagtgaattttgtcttggaaaatttgatgagccactagatatgagcctcttctctttcataggaagcccccgaataaacgccaccgggcaaggtgttacaatattttatgttgatagacttggctactatccttacatagattcaatcacaggagtaactgtgaatggaggaatcccccagaagatttccttacaagaccatctggacaaagctaagaaagacattacattttatatgccagtagacaatttgggaatggctgttattgactgggaagaatggagacccacttgggcaagaaactggaaacctaaagatgtttacaagaataggtctattgaattggttcagcaacaaaatgtacaacttagtctcacagaggccactgagaaagcaaaacaagaatttgaaaargcagggaaggatttcctggtagagactataaaattgggaaaattacttcggccaaatcacttgtggggttattatctttttccggattgttacaaccatcactataagaaacccggttacaatggaagttgcttcaatgtagaaataaaaagaaatgatgatctcagctggttgtggaatgaaagcactgctctttacccatccatttatttgaacactcagcagtctcctgtagctgctacactctatgtgcgcaatcgagttcgggaagccatcagagtttccaaaatacctgatgcaaaaagtccacttccggtttttgcatatacccgcatagtttttactgatcaagttttgaaattcctttctcaagatgaacttgtgtatacatttggcgaaactgttgcyctgggtgcttctggaattgtaatatggggaaccctcartataatgcgaagtatgaaatcttgcttgctcctagacaattacatggagactatactgaatccttacataatcaacgtcacactagcagccaaaatgtgtagccaagtgctttgccaggagcaaggagtgtgtataaggaaaaactggaattcaagtgactatcttcacctcaacccagataattttgctattcaacttgagaaaggtggaaagttcacagtacgtggaaaaccgacacttgaagacctggagcaattttctgaaaaattttattgcagctgttatagcaccttgagttgtaaggagaaagctratgtaaaagacactgatgctgttgatgtgtgtattgctgatggtgtctgtatagatgcttttctaaaacctcccatggagacagaagaacctcaaattttctacaatgcttcaccctccacactatctgccacaatgttcatttggaggctggaagtctgggatcaaggtattagcagaattggtttcttctgagagtcatgagggaaaaatgtgtttcaggcctcttcccttggcttataggaaatgaaaaaaccatgactatcatcaccaacatccttgggtattaagtgcagtcactctcctagatgctgtggggagaaggcaagttacaaagatagaccttccctcaagataatcagattttcatggtattatccttaacctttttgacatcatggaggctttgggaatctgatgaagcctatcaattttcttccagaagatatttatataagattataagaaaaattatgtacacagcttattttattgcattggatcaaaatgccatttataaagaattatgccttttccatcaattttagcatggaaaaataatttcaggcaatatgcttaaaaattgggggaagacaaaagaaatccatatcgwgtaaataaaaataaattttggttttgctc

SEQ ID NO: 5968 - DNA, 2005 bp, Homo sapiens
ggctcacataaattcagaaagtatgatagcagtgtaggtggttagcagcacctcataaggtccttcctagcaagggatgctaatgactagccaatgctctaggaagacattgagaccagccaacttcttgccttgataactactgaagagacattgggtggctggattttgaaagcagacttctggttataggtgatgcaacttgaaaaacaatcctgaaacatgaaacaagaataataatatttaaatgtaacttaatcattatacctctttatccatcaaagtgaattcattccattccctttcatctgtgctcatactttgcatcagatattgggtaaaccaaagtgtgtaggaagaaataaatgttttcatagtcattactctttacaatgggagtrctaaaattcaagcacatctttttcagaagctttgttaaatcaagtggagtatcccagatagttttcaccttccttctgattccatgttgcttgactctgaatttcagagcacctcctgttattccaaatgygcctttcctctgggcctggaatgccccaagtgaattttgtcttggaaaatttgatgagccactagatatgagcctcttctctttcataggaagcccccgaataaacgccaccgggcaaggtgttacaatattttatgttgatagacttggctactatccttacatagattcaatcacaggagtaactgtgaatggaggaatcccccagaagatttccttacaagaccatctggacaaagctaagaaagacattacattttatatgccagtagacaatttgggaatggctgttattgactgggaagaatggagacccacttgggcaagaaactggaaacctaaagatgtttacaagaataggtctattgaattggttcagcaacaaaatgtacaacttagtctcacagaggccactgagaaagcaaaacaagaatttgaaaargcagggaaggatttcctggtagagactataaaattgggaaaattacttcggccaaatcacttgtggggttattatctttttccggattgttacaaccatcactataagaaacccggttacaatggaagttgcttcaatgtagaaataaaaagaaatgatgatctcagctggttgtggaatgaaagcactgctctttacccatccatttatttgaacactcagcagtctcctgtagctgctacactctatgtgcgcaatcgagttcgggaagccatcagagtttccaaaatacctgatgcaaaaagtccacttccggtttttgcatatacccgcatagtttttactgatcaagttttgaaattcctttctcaagatgaacttgtgtatacatttggcgaaactgttgcyctgggtgcttctggaattgtaatatggggaaccctcartataatgcgaagtatgaaatcttgcttgctcctagacaattacatggagactatactgaatccttacataatcaacgtcacactagcagccaaaatgtgtagccaagtgctttgccaggagcaaggagtgtgtataaggaaaaactggaattcaagtgactatcttcacctcaacccagataattttgctattcaacttgagaaaggtggaaagttcacagtacgtggaaaaccgacacttgaagacctggagcaattttctgaaaaattttattgcagctgttatagcaccttgagttgtaaggagaaagctratgtaaaagacactgatgctgttgatgtgtgtattgctgatggtgtctgtatagatgcttttctaaaacctcccatggagacagaagaacctcaaattttctacaatgcttcaccctccacactatctgccacaatgttcattgttagtattttgtttcttatcatttcttctgtagcgagtttgtaattgcgcaggttagctgaaatgaacaatatgtccatcttaaagtgtgctttttcgactaattaaatctttgaaaagaacagctc

SEQ ID NO: 5969 - DNA, 1922 bp, Homo sapiens
ggctcacataaattcagaaagtatgatagcagtgtaggtggttagcagcacctcataaggtccttcctagcaagggatgctaatgactagccaatgctctaggaagacattgagaccagccaacttcttgccttgataactactgaagagacattgggtggctggattttgaaagcagacttctggttataggtgatgcaacttgaaaaacaatcctgaaacatgaaacaagaataataatatttaaatgtaacttaatcattatacctctttatccatcaaagtgaattcattccattccctttcatctgtgctcatactttgcatcagatattgggtaaaccaaagtgtgtaggaagaaataaatgttttcatagtcattactctttacaatgggagtrctaaaattcaagcacatctttttcagaagctttgttaaatcaagtggagtatcccagatagttttcaccttccttctgattccatgttgcttgactctgaatttcagagcacctcctgttattccaaatgygcctttcctctgggcctggaatgccccaagtgaattttgtcttggaaaatttgatgagccactagatatgagcctcttctctttcataggaagcccccgaataaacgccaccgggcaaggtgttacaatattttatgttgatagacttggctactatccttacatagattcaatcacaggagtaactgtgaatggaggaatcccccagaagatttccttacaagaccatctggacaaagctaagaaagacattacattttatatgccagtagacaatttgggaatggctgttattgactgggaagaatggagacccacttgggcaagaaactggaaacctaaagatgtttacaagaataggtctattgaattggttcagcaacaaaatgtacaacttagtctcacagaggccactgagaaagcaaaacaagaatttgaaaargcagggaaggatttcctggtagagactataaaattgggaaaattacttcggccaaatcacttgtggggttattatctttttccggattgttacaaccatcactataagaaacccggttacaatggaagttgcttcaatgtagaaataaaaagaaatgatgatctcagctggttgtggaatgaaagcactgctctttacccatccatttatttgaacactcagcagtctcctgtagctgctacactctatgtgcgcaatcgagttcgggaagccatcagagtttccaaaatacctgatgcaaaaagtccacttccggtttttgcatatacccgcatagtttttactgatcaagttttgaaattcctttctcaagatgaacttgtgtatacatttggcgaaactgttgcyctgggtgcttctggaattgtaatatggggaaccctcartataatgcgaagtatgaaatcttgcttgctcctagacaattacatggagactatactgaatccttacataatcaacgtcacactagcagccaaaatgtgtagccaagtgctttgccaggagcaaggagtgtgtataaggaaaaactggaattcaagtgactatcttcacctcaacccagataattttgctattcaacttgagaaaggtggaaagttcacagtacgtggaaaaccgacacttgaagacctggagcaattttctgaaaaattttattgcagctgttatagcaccttgagttgtaaggagaaagctratgtaaaagacactgatgctgttgatgtgtgtattgctgatggtgtctgtatagatgcttttctaaaacctcccatggagacagaagaacctcaaattttctacaatgcttcaccctccacactatctgccacaatgttcattgatctttgtgacctgtatcttgtgccaacctcctatctcatcctg

SEQ ID NO: 5970 - DNA, 1068 bp, Homo sapiens
cgaggctagggggaaggagaagggatcagaagcgggagctgaggggrgagagaggccggtcctggtctggccgctgcggctgctagcccgaggtctccaagccgggctgcggctccatcctcggctcctgggcaccgtctgcgaggctccgccgaccagagtgagaaagccgcgggcggcgaccgccgcatcatgtcagccaaggacgagcgggccagggagatcctgaggggcttcaaactaaattggatgaaccttcgggatgctgagacagggaagatactctggcaaggaacagaagacctgtctgtccctggtgtggagcatgaagcccgtgttcccaagaaaatcctcaagtgcaaggcagtgtctcgagaacttaatttttcttcgacagaacaaatggaaaaattccgcctggaacaaaaagtttacttcaaagggcaatgcctagaagtgggaacgttatcatagaaacaaagttttttgacgacgatcttcttgtaagcacatccagagtgagacttttctatgtttgaaagaagaatgtgtgtacatttcaagaatttgggttttttggagggaggaggaaactgtttacttttttcctccacacgtttgatttttgacacatacacccctaattccctcaacagcagaacctacctgcagccaccaggggaccagctctgtgtaggtaaccagatggctctttttcccaagccrccatcttccagctgaccagactaaactcccaaccccagaccagggcaggggacaggtctcaagtccttcccagcatacacacagggaacaaacacataccacaaaccggtaactgtacctgtcaccctccttgtctcctccttgggccctacaggctacacatctacctttggcccctggttttggaaaaattccgtgttcctgacccatgtttagttttttcctaccatttctatttcatacattctcatacatttaacttgtaaaatagactgtgatattattacataatgtaattaaaaatatgaattaaaatattcctacagtctttagcatggcact

SEQ ID NO: 5971 - DNA, 1174 bp, Homo sapiens
cgaggctagggggaaggagaagggatcagaagcgggagctgaggggrgagagaggccggtcctggtctggccgctgcggctgctagcccgaggtctccaagccgggctgcggctccatcctcggctcctgggcaccgtctgcgaggctccgccgaccagagtgagaaagccgcgggcggcgaccgccgcatcatgtcagccaaggacgagcgggccagggagatcctgaggggcttcaaactaaattggatgaaccttcgggatgctgagacagggaagatactctggcaaggaacagaagacctgtctgtccctggtgtggagcatgaagcccgtgttcccaagaaaatcctcaagtgcaaggcagtgtctcgagaacttaatttttcttcgacagaacaaatggaaaaattccgcctggaacaaaaagtttacttcaaagggcaatgcctagaagaatggttcttcgagtttggctttgtgatccctaactccacaaatacctggcagtccttgatagaggcagcacccgagtcccagatgatgccagcaagcgtcttaactgggaacgttatcatagaaacaaagttttttgacgacgatcttcttgtaagcacatccagagtgagacttttctatgtttgaaagaagaatgtgtgtacatttcaagaatttgggttttttggagggaggaggaaactgtttacttttttcctccacacgtttgatttttgacacatacacccctaattccctcaacagcagaacctacctgcagccaccaggggaccagctctgtgtaggtaaccagatggctctttttcccaagccrccatcttccagctgaccagactaaactcccaaccccagaccagggcaggggacaggtctcaagtccttcccagcatacacacagggaacaaacacataccacaaaccggtaactgtacctgtcaccctccttgtctcctccttgggccctacaggctacacatctacctttggcccctggttttggaaaaattccgtgttcctgacccatgtttagttttttcctaccatttctatttcatacattctcatacatttaacttgtaaaatagactgtgatattattacataatgtaattaaaaatatgaattaaaatattcctacagtctttagcatggcact

SEQ ID NO: 5972 - DNA, 2652 bp, Homo sapiens
gggatctgcacrtygtgttagacatggctaaagtagctgataccatcctgttcctccttgatccactagaaggctgggacagcaccggtgattactgtctttcctgcctctttgctcagggccttccgacctatacactagctgtccaggggatttctggcctcccactgaagaaacaaatagataccaggaagaagctaagtaaagcagtggagaagcgctttccgcatgacaaactcctcttgttagacactcaacaggaggcagggatgctgcttaggcagttggctaaccagaagcaacagcatcttgcttttcgagatcggcgggcctacctatttgcccatgctgttgattttgttcctagtgaagagaataacttggtgggcaccttgaaaatttcaggctatgttcgagggcagactctgaatgtcaataggttgctgcatatcgttggatatggtgatttccagatgaaacagatagatgcccccggagaccctttccctttaaatcctagaggaattaaaccccaaaaggacccagacatggcaatggagatttgtgctacggatgctgtagatgatatggaagaaggtcttaaagtcctaatgaaggcagaccctggtagacaggaatccttgcaagcagaggttatcccagatccaatggagggagagcaaacctggcccactgaggaggagctgagcgaggcaaaggatttcttgaaggaargttctaaggtggtaaagaaggtccccaaaggaacatccagttaccaagctgaatggattttggatggtggcagccaaagtggtggggaaggagatgaatatgaatatgatgatatggaacatgaggattttatggaggaggaatctcaggatgagagtagtgaagaagaggaagaatatgaaactatgactattggggagtctgtgcatgatgatctgtatgataagaaagtagatgaagaagctgaggcaaaaatgttggagaaatataaacaagaaagactggaagagatgtttccagatgaagtggacacgccccgtgatgtggctgctcgaattcgatttcagaaatacagaggccttaagagcttccggacatctccatgggatcctaaggaaaaccttcctcaagattatgctcgaatatttcagtttcagaactttactaacactaggaaaagcatctttaaagaggttgaagaaaaagaggttgaaggagctgaggttggctggtatgtcacacttcatgtctctgaagtccccgtctcagtggtcgagtgcttcaggcaaggaacacccttgattgcattttctttactacctcatgaacagaagatgtcagtattgaatatggtggtgaggcgtgaccctggcaacactgaacctgtgaaagccaaggaagagctcatatttcactgtggattcaggcgcttccgagcctcacctttattctctcagcacactgcagcggacaaacataaattgcagagattcctgactgctgacatggccctggtggcgacagtctatgcgccaatcacttttcctcctgcatctgtgctgcttttcaagcaaaaaagcaatggaatgcacagcctcattgctacaggccatcttatgtcagtagatccagacagaatggtcatcaagagagttgttctgagtggtcatcctttcaaaatttttactaagatggcagtagtacgttacatgttcttcarcagagaggatgtgctgtggtttmaaccagtggaactgagaacgaagtggggccggagaggacatatcaaggaacctttaggtacccatggccamatgaaatgcagctttgatgggaagctaaaatctcaagacacagtactgatgaacctgtataaacgagtcttccccaaatggacttatgatccatatgtaccagaaccagtaccctggctgaaaagtgagatttcttcaacagtgcctcaagggggcatggagtaatggattcaaagagattctgtcttaccggtgccagtcagtactccagggatgggaggcacaagttgtgattgggcaaagtttattttctatgtcagcctgtcagtccactgccccattttgcaagacttttttttagccttgacaaaatgtctcagttaagtataaaagttttyccactacttagtccaaaaaaaactattaaatcttaatgaaatagccactctccattaagaatctgataactaagagttgacaatactaggaaacaaaatgtcttcagtatctaaagacactgaattcccaccatttccttttctgtaaattaaacagaaacagactgataagaagctggcctttcagcctgcttcacccaagttatggaggaggttaagtctacatttccaccactgagcacaatacaaatgttctttacttctggggaaacagtttgaaaatgttgagacagcacagcagccactccaacaccagctgtaggttcaatgagtagtttcatcctctcccacaccagctgggttgcacactgttgatatggaagggagtaggaattagtgaaaggggagtctagttggtttacctataaagttcagatgagaatacgtgtccagtttgaattttcttatcactgtgtacacacgct

SEQ ID NO: 5973 - DNA, 2960 bp, Homo sapiens
caccgccccggcccgctcaagcagcagaataaagctcataaaggcggacggcatcggggtcggggatctgcacagcgggacggcaagggttctggcagagaagagacagctgggtggcaaggatggccctcctcatcaggtactggtggtgcccctgcacagcagaatttccctgccagaggccatgcagctgcttcaagatagggacactggaacagtacacttgaatgaattgggaaacacccagaactttatgctgctgtgcccccgcttgaaacatcggtggtttttcacctcagcaaggccaggggatctgcacrtygtgttagacatggctaaagtagctgataccatcctgttcctccttgatccactagaaggctgggacagcaccggtgattactgtctttcctgcctctttgctcagggccttccgacctatacactagctgtccaggggatttctggcctcccactgaagaaacaaatagataccaggaagaagctaagtaaagcagtggagaagcgctttccgcatgacaaactcctcttgttagacactcaacaggaggcagggatgctgcttaggcagttggctaaccagaagcaacagcatcttgcttttcgagatcggcgggcctacctatttgcccatgctgttgattttgttcctagtgaagagaataacttggtgggcaccttgaaaatttcaggctatgttcgagggcagactctgaatgtcaataggttgctgcatatcgttggatatggtgatttccagatgaaacagatagatgcccccggagaccctttccctttaaatcctagaggaattaaaccccaaaaggacccagacatggcaatggagatttgtgctacggatgctgtagatgatatggaagaaggtcttaaagtcctaatgaaggcagaccctggtagacaggaatccttgcaagcagaggttatcccagatccaatggagggagagcaaacctggcccactgaggaggagctgagcgaggcaaaggatttcttgaaggaargttctaaggtggtaaagaaggtccccaaaggaacatccagttaccaagctgaatggattttggatggtggcagccaaagtggtggggaaggagatgaatatgaatatgatgatatggaacatgaggattttatggaggaggaatctcaggatgagagtagtgaagaagaggaagaatatgaaactatgactattggggagtctgtgcatgatgatctgtatgataagaaagtagatgaagaagctgaggcaaaaatgttggagaaatataaacaagaaagactggaagagatgtttccagatgaagtggacacgccccgtgatgtggctgctcgaattcgatttcagaaatacagaggccttaagagcttccggacatctccatgggatcctaaggaaaaccttcctcaagattatgctcgaatatttcagtttcagaactttactaacactaggaaaagcatctttaaagaggttgaagaaaaagaggttgaaggagctgaggttggctggtatgtcacacttcatgtctctgaagtccccgtctcagtggtcgagtgcttcaggcaaggaacacccttgattgcattttctttactacctcatgaacagaagatgtcagtattgaatatggtggtgaggcgtgaccctggcaacactgaacctgtgaaagccaaggaagagctcatatttcactgtggattcaggcgcttccgagcctcacctttattctctcagcacactgcagcggacaaacataaattgcagagattcctgactgctgacatggccctggtggcgacagtctatgcgccaatcacttttcctcctgcatctgtgctgcttttcaagcaaaaaagcaatggaatgcacagcctcattgctacaggccatcttatgtcagtagatccagacagaatggtcatcaagagagttgttctgagtggtcatcctttcaaaatttttactaagatggcagtagtacgttacatgttcttcarcagagaggatgtgctgtggtttmaaccagtggaactgagaacgaagtggggccggagaggacatatcaaggaacctttaggtacccatggccamatgaaatgcagctttgatgggaagctaaaatctcaagacacagtactgatgaacctgtataaacgagtcttccccaaatggacttatgatccatatgtaccagaaccagtaccctggctgaaaagtgagatttcttcaacagtgcctcaagggggcatggagtaatggattcaaagagattctgtcttaccggtgccagtcagtactccagggatgggaggcacaagttgtgattgggcaaagtttattttctatgtcagcctgtcagtccactgccccattttgcaagacttttttttagccttgacaaaatgtctcagttaagtataaaagttttyccactacttagtccaaaaaaaactattaaatcttaatgaaatagccactctccattaagaatctgataactaagagttgacaatactaggaaacaaaatgtcttcagtatctaaagacactgaattcccaccatttccttttctgtaaattaaacagaaacagactgataagaagctggcctttcagcctgcttcacccaagttatggaggaggttaagtctacatttccaccactgagcacaatacaaatgttctttacttctggggaaacagtttgaaaatgttgagacagcacagcagccactccaacaccagctgtaggttcaatgagtagtttcatcctctcccacaccagctgggttgcacactgttgatatggaagggagtaggaattagtgaaaggggagtctagttggtttacctataaagttcagatgagaatacgtgtccagtttgaattttcttatcactgtgtacacacgct

SEQ ID NO: 5974 - DNA, 4030 bp, Homo sapiens
cgccacgggggtcgctgtcatggcaacgcacccgctcccgcatggagggcgcgaagccgcattgtgagcgctggccctggagcccgcggccccgcggctgagagcgagcctcggtcccgctgaagctcccctgacttctgcctgctccctctcccgacgggacggaaagggccggggctcgggcatggggtcccctgcggtccgagcctgcccacggcgaagccggtgcagcctggccccgtgacccctctgaatccccgtccggccgtcgccgtgcagttgtcaagtttctgggaagattagtgggagcgcagccgcccgagcccgacggccggagggtcgcggccagtcccccttgccgggtcgccacgtcccacaaggtccttcccggccgctccgtgggaggcggggcgcaggttggagtaacagggacgggcttgagctggtacggaaccgggcaaggtgagagaagtgtcttccacgcgattcccaagcctcgctagggaatcgagggagaagaaaggttgctcagagtgataaagaacatgccgttgcaaacggaagagcaacgtgcccgaatctaggtgacaggaagggcttaggccttttcggcacgaatggagccttccagtcaacatgcttctacgtgatgcagctttatagcgcaaaaaaatgacaatgcaaggggtacaaacagccctgctagaccaacagcccgagcctcgacagtctacatccggcgccttcaagcccccaaccacacactgcgaagtgggaaaagttcccagcgcggcttggcgaacccgctaacacggcgctctcacgagctgctggaaaagaccttcgcgagagggcgcagggagtcccgctccctggagggcccgcccccttggaggggaccggaagcgcttgtcctggcccggaagcagtgctgactccgtacacgcgcgctgcggcatggcggcccaccgccccggcccgctcaagcagcagaataaagctcataaaggcggacggcatcggggtcggggatctgcacagcgggacggcaagggccgtctggcactgaaaaccctaagcaagaaggtgagaaaagaactcagcagagtcgaccagaggcatcgcgccagccagctccgaaagcagaagaaggaggcggttctggcagagaagagacagctgggtggcaaggatggccctcctcatcaggtactggtggtgcccctgcacagcagaatttccctgccagaggccatgcagctgcttcaagatagggacactggaacagtacacttgaatgaattgggaaacacccagaactttatgctgctgtgcccccgcttgaaacatcggtggtttttcacctcagcaaggccaggggatctgcacrtygtgttagacatggctaaagtagctgataccatcctgttcctccttgatccactagaaggctgggacagcaccggtgattactgtctttcctgcctctttgctcagggccttccgacctatacactagctgtccaggggatttctggcctcccactgaagaaacaaatagataccaggaagaagctaagtaaagcagtggagaagcgctttccgcatgacaaactcctcttgttagacactcaacaggaggcagggatgctgcttaggcagttggctaaccagaagcaacagcatcttgcttttcgagatcggcgggcctacctatttgcccatgctgttgattttgttcctagtgaagagaataacttggtgggcaccttgaaaatttcaggctatgttcgagggcagactctgaatgtcaataggttgctgcatatcgttggatatggtgatttccagatgaaacagatagatgcccccggagaccctttccctttaaatcctagaggaattaaaccccaaaaggacccagacatggcaatggagatttgtgctacggatgctgtagatgatatggaagaaggtcttaaagtcctaatgaaggcagaccctggtagacaggaatccttgcaagcagaggttatcccagatccaatggagggagagcaaacctggcccactgaggaggagctgagcgaggcaaaggatttcttgaaggaargttctaaggtggtaaagaaggtccccaaaggaacatccagttaccaagctgaatggattttggatggtggcagccaaagtggtggggaaggagatgaatatgaatatgatgatatggaacatgaggattttatggaggaggaatctcaggatgagagtagtgaagaagaggaagaatatgaaactatgactattggggagtctgtgcatgatgatctgtatgataagaaagtagatgaagaagctgaggcaaaaatgttggagaaatataaacaagaaagactggaagagatgtttccagatgaagtggacacgccccgtgatgtggctgctcgaattcgatttcagaaatacagaggccttaagagcttccggacatctccatgggatcctaaggaaaaccttcctcaagattatgctcgaatatttcagtttcagaactttactaacactaggaaaagcatctttaaagaggttgaagaaaaagaggttgaaggagctgaggttggctggtatgtcacacttcatgtctctgaagtccccgtctcagtggtcgagtgcttcaggcaaggaacacccttgattgcattttctttactacctcatgaacagaagatgtcagtattgaatatggtggtgaggcgtgaccctggcaacactgaacctgtgaaagccaaggaagagctcatatttcactgtggattcaggcgcttccgagcctcacctttattctctcagcacactgcagcggacaaacataaattgcagagattcctgactgctgacatggccctggtggcgacagtctatgcgccaatcacttttcctcctgcatctgtgctgcttttcaagcaaaaaagcaatggaatgcacagcctcattgctacaggccatcttatgtcagtagatccagacagaatggtcatcaagagagttgttctgagtggtcatcctttcaaaatttttactaagatggcagtagtacgttacatgttcttcarcagagaggatgtgctgtggtttmaaccagtggaactgagaacgaagtggggccggagaggacatatcaaggaacctttaggtacccatggccamatgaaatgcagctttgatgggaagctaaaatctcaagacacagtactgatgaacctgtataaacgagtcttccccaaatggacttatgatccatatgtaccagaaccagtaccctggctgaaaagtgagatttcttcaacagtgcctcaagggggcatggagtaatggattcaaagagattctgtcttaccggtgccagtcagtactccagggatgggaggcacaagttgtgattgggcaaagtttattttctatgtcagcctgtcagtccactgccccattttgcaagacttttttttagccttgacaaaatgtctcagttaagtataaaagttttyccactacttagtccaaaaaaaactattaaatcttaatgaaatagccactctccattaagaatctgataactaagagttgacaatactaggaaacaaaatgtcttcagtatctaaagacactgaattcccaccatttccttttctgtaaattaaacagaaacagactgataagaagctggcctttcagcctgcttcacccaagttatggaggaggttaagtctacatttccaccactgagcacaatacaaatgttctttacttctggggaaacagtttgaaaatgttgagacagcacagcagccactccaacaccagctgtaggttcaatgagtagtttcatcctctcccacaccagctgggttgcacactgttgatatggaagggagtaggaattagtgaaaggggagtctagttggtttacctataaagttcagatgagaatacgtgtccagtttgaattttcttatcactgtgtacacacgct

SEQ ID NO: 5975 - DNA, 2027 bp, Homo sapiens
cgacgcggagatccgcacacgctccagcccttccgccatcttcgcggctgctgctacagccgtagcggctccgccaccgccgcgcgcagccaggaaaccaccacagacgggcggcgcgcgcgctcgcccacctcccggcctttccccgccccctgccgccctccctttccgaacgacggtggccgcgctgggaggaaaagcgcccgccgccggttccagaggggcgggaccggagcgagagcctgggtggggcgggcgggsgctgcgcgtgcgcagaggtgcggccggggaggcgcgcggaggctggagctggaggcgcggcgccggtgagctgagaaccatgtgtgctcagtattgcatctcctttgctgatgttgaaaaagctcatatcaacattcgagattctatccacctcacaccagtgctaacaagctccattttgaatcaactaacagggcgcaatcttttcttcaaatgtgaactcttccagaaaacaggatcttttaagattcgtggtgctctcaatgccgtcagaagcttggttcctgatgctttagaaaggaagccgaaagctgttgttactcacagcagtggaaaccatggccaggctctcacctatgctgccaaattggaaggaattcctgcttatattgtggtgccccagacagctccagactgtaaaaaacttgcaatacaagcctacggagcgtcaattgtatactgtgaacctagtgatgagtccagagaaaatgttgcaaaaagagttacagaagaaacagaaggcatcatggtacatcccaaccaggagcctgcagtgatagctggacaagggacaattgccctggaagtgctgaaccaggttcctttggtggatgcactggtggtacctgtaggtggaggaggaatgcttgctggaatagcaattacagttaaggctctgaaacctagtgtgaaggtatatgctgctgaaccctcaaatgcagatgactgctaccagtccaagctgaaggggaaactgatgcccaatctttatcctccagaaaccatagcagatggtgtcaaatccagcattggcttgaacacctggcctattatcagggaccttgtggatgatatcttcactgtcacagaggatgaaattaagtgtgcaacccagctggtgtgggagaggatgaaactactcattgaacctacagctggtgttggagtggctgctgtgctgtctcaacattttcaaactgtttccccagaagtaaagaacatttgtattgtgctcagtggtggaaatgtagacttaacctcctccataacttgggtgaagcaggctgaaaggccagcttcttatcagtctgtttctgtttaatttacagaaaaggaaatggtgggaattcagtgtctttagatactgaagacattttgtttcctagtattgtcaactcttagttatcagattcttaatggagagtggctatttcattaagatttaatagttttttttggactaagtagtggraaaacttttatacttaactgagacattttgtcaaggctaaaaaaaagtcttgcaaaatggggcagtggactgacaggctgacatagaaaataaactttgcccaatcacaacttgtgcctcccatccctggagtactgactggcaccggtaagacagaatctctttgaatccattactccatgcccccttgaggcactgttgaagaaatctcacttttcagccagggtactggttctggtacatatggatcataagtccatttggggaagactcgtttatacaggttcatcagtactgtgtcttgagattttagcttcccatcaaagctgcatttcatktggccatgggtacctagttccttgatatgtcctctccggccccacttcgttctcagttccactggttkaaaccacagcacatcctctctgytgaagaacatgtaacgtactactgccatcttagtaaaaattttgaaaggatgaccactcagaacaactctcttgatgaccattct

SEQ ID NO: 5976 - DNA, 2749 bp, Homo sapiens
cgacgcggagatccgcacacgctccagcccttccgccatcttcgcggctgctgctacagccgtagcggctccgccaccgccgcgcgcagccaggaaaccaccacagacgggcggcgcgcgcgctcgcccacctcccggcctttccccgccccctgccgccctccctttccgaacgacggtggccgcgctgggaggaaaagcgcccgccgccggttccagaggggcgggaccggagcgagagcctgggtggggcgggcgggsgctgcgcgtgcgcagaggtgcggccggggaggcgcgcggaggctggagctggaggcgcggcgccggtgagctgagaaccatgtgtgctcagtattgcatctcctttgctgatgttgaaaaagctcatatcaacattcgagattctatccacctcacaccagtgctaacaagctccattttgaatcaactaacagggcgcaatcttttcttcaaatgtgaactcttccagaaaacaggatcttttaagattcgtggtgctctcaatgccgtcagaagcttggttcctgatgctttagaaaggaagccgaaagctgttgttactcacagcagtggaaaccatggccaggctctcacctatgctgccaaattggaaggaattcctgcttatattgtggtgccccagacagctccagactgtaaaaaacttgcaatacaagcctacggagcgtcaattgtatactgtgaacctagtgatgagtccagagaaaatgttgcaaaaagagttacagaagaaacagaaggcatcatggtacatcccaaccaggagcctgcagtgatagctggacaagggacaattgccctggaagtgctgaaccaggttcctttggtggatgcactggtggtacctgtaggtggaggaggaatgcttgctggaatagcaattacagttaaggctctgaaacctagtgtgaaggtatatgctgctgaaccctcaaatgcagatgactgctaccagtccaagctgaaggggaaactgatgcccaatctttatcctccagaaaccatagcagatggtgtcaaatccagcattggcttgaacacctggcctattatcagggaccttgtggatgatatcttcactgtcacagaggatgaaattaagtgtgcaacccagctggtgtgggagaggatgaaactactcattgaacctacagctggtgttggagtggctgctgtgctgtctcaacattttcaaactgtttccccagaagtaaagaacatttgtattgtgctcagtggtggaaatgtagacttaacctcctccataacttgggtgaagcaggctgaaaggccagcttcttatcagtctgtttctgtttaatttacagaaaaggaaatggtgggaattcagtgtctttagatactgaagacattttgtttcctagtattgtcaactcttagttatcagattcttaatggagagtggctatttcattaagatttaatagttttttttggactaagtagtggraaaacttttatacttaactgagacattttgtcaaggctaaaaaaaagtcttgcaaaatggggcagtggactgacaggctgacatagaaaataaactttgcccaatcacaacttgtgcctcccatccctggagtactgactggcaccggtaagacagaatctctttgaatccattactccatgcccccttgaggcactgttgaagaaatctcacttttcagccagggtactggttctggtacatatggatcataagtccatttggggaagactcgtttatacaggttcatcagtactgtgtcttgagattttagcttcccatcaaagctgcatttcatktggccatgggtacctagaaagacatcagaacaagtcggtcaaattaaaagtagaaaattttaaagcaatgacttccaacccaacagtcatttagcaacactgcagaaatgcagacatggtctcaaatcccgtgtttccttacctaaaggttccttgatatgtcctctccggccccacttcgttctcagttccactggttkaaaccacagcacatcctcttagaatcaaacacattaaagaccaagatgaaacatttacccacaaaatgtaaacccaacctttataccacaaaggcaatcagatcccatcctcctccttcatacccacctctgytgaagaacatgtaacgtactactgccatcttagtaaaaattttgaaaggatgaccactcagaacaactctcttgatgaccattctgtctggatctactgacataagatggcctgtagcaatgaggctgtgcattcctaaaggacaaaagcaaagaagctatttaggaatttacaggccaaagtcttcatttattgcccagtccatttaaagacccatgcaagagcctggtttgtcatccctgccctagcccaatctgaggctaagattggtaaactgtaagcccacacttaaccttgtcaataggttcttgaaaacttgtacttcaagagaaatgatgtataacaaaaccatactttttctcatcagttgttacaaggaaaggatgttgaacaaaaggcagttatttgaggactggctatacactgtttcacgtaaaagttggagttttcattgttctattaacaatgttaaatgaagacttactgtattttgaaaaccatcattaccttctccataccatttggctcccaaatttaaataaacaagagaaaacggtgttcatct

SEQ ID NO: 5977 - DNA, 1745 bp, Homo sapiens
cggggaggcgcgcggaggctggagctggaggcgcggcgccgtcctgggtttcagaaccatgtgtgctcagtattgcatctcctttgctgatgttgaaaaagctcatatcaacattcgagattctatccacctcacaccagtgctaacaagctccattttgaatcaactaacagggcgcaatcttttcttcaaatgtgaactcttccagaaaacaggatcttttaagattcgtggtgctctcaatgccgtcagaagcttggttcctgatgctttagaaaggaagccgaaagctgttgttactcacagcagtggaaaccatggccaggctctcacctatgctgccaaattggaaggaattcctgcttatattgtggtgccccagacagctccagactgtaaaaaacttgcaatacaagcctacggagcgtcaattgtatactgtgaacctagtgatgagtccagagaaaatgttgcaaaaagagttacagaagaaacagaaggcatcatggtacatcccaaccaggagcctgcagtgatagctggacaagggacaattgccctggaagtgctgaaccaggttcctttggtggatgcactggtggtacctgtaggtggaggaggaatgcttgctggaatagcaattacagttaaggctctgaaacctagtgtgaaggtatatgctgctgaaccctcaaatgcagatgactgctaccagtccaagctgaaggggaaactgatgcccaatctttatcctccagaaaccatagcagatggtgtcaaatccagcattggcttgaacacctggcctattatcagggaccttgtggatgatatcttcactgtcacagaggatgaaattaagtgtgcaacccagctggtgtgggagaggatgaaactactcattgaacctacagctggtgttggagtggctgctgtgctgtctcaacattttcaaactgtttccccagaagtaaagaacatttgtattgtgctcagtggtggaaatgtagacttaacctcctccataacttgggtgaagcaggctgaaaggccagcttcttatcagtctgtttctgtttaatttacagaaaaggaaatggtgggaattcagtgtctttagatactgaagacattttgtttcctagtattgtcaactcttagttatcagattcttaatggagagtggctatttcattaagatttaatagttttttttggactaagtagtggraaaacttttatacttaactgagacattttgtcaaggctaaaaaaaagtcttgcaaaatggggcagtggactgacaggctgacatagaaaataaactttgcccaatcacaacttgtgcctcccatccctggagtactgactggcaccggtaagacagaatctctttgaatccattactccatgcccccttgaggcactgttgaagaaatctcacttttcagccagggtactggttctggtacatatggatcataagtccatttggggaagactcgtttatacaggttcatcagtactgtgtcttgagattttagcttcccatcaaagctgcatttcatktggccatgggtacctagttccttgatatgtcctctccggccccacttcgttctcagttccactggttkaaaccacagcacatcctctctgytgaagaacatgtaacgtactactgccatcttagtaaaaattttgaaaggatgaccactcagaacaactctcttgatgaccattct

SEQ ID NO: 5978 - DNA, 727 bp, Homo sapiens
gtgaaggtgaaggccagagtcaacgaatttggctatactgggtgcctggtcactagggctgcttttaactctggtaaagtggatattgttgccatcaatgaccccttcattgacctcaactacctggcctacatgctccagtatgattccacccatggcaagttccatggcaccatcaaggctgagaatgggaagcttgtcatcaatggaaatcccattaccatcttccaggacatcttcaccgccatggagaaggttggggctcatttgcagaggggagccaaaagggtcatgatctttgccccctctactgaagccatcatgttcatgatgaaagtgaattatgagaagtatgacaacagccttaagatcatcagcaatgcctcctgtaccaccaactgcttagcgcccctggccaaggtcatccatgacaactctggtgttggtcgtggacccgacctgccatctggaaaacctgccaaatatgatgacatcaagaagatgatgaagcaggcttcagaggatcctatcaagggcatcctgggctacaytgagcaccagattgtctcctccgacttcaacagtgacacacagtcttccacctttgatgctggggctggcattaccctcaacgaccactttgtcaagctcatttcctggtatgacaatgaatttggctacagcaacagggtggtggacctcatggcccacatggcttccaaggaat

SEQ ID NO: 5979 - DNA, 4245 bp, Homo sapiens
cttttcctgcccccagactagaggcgggatgtagtctcttaggctaagagtgattggtcacaaggagactcggaagtgtctgatcagagccccagaggaggccttgagagcctgttggcgtaccgttccacacttggatccaggaatcgggcgtgttccaggctgctctctatggtagctttgggcggatagagggggcgcgcaaagtattaagggacaataatggccgctttcaaggtgtggattttggctccttgagcctgtctgagcgaggggtggcagcgccggcgccccagaatccgggacagaagggtcccaagagtcgcgcttggtgagagaaatcccagatcctgtgatgggggacaccagtgaggatgcctcgatccatcgattggaaggcastgatctggactgtcaggttggyggtcttatttgcaartccaaaagtgcggccagcgagcagcatgtcttcaaggctcctgctccccgcccttcattactsggactggacttgctggcttccctgaaacggagagagcgagaggagaaggacgatggggaggacaagaagaagtccaaagtctcctcctacaaggactgggaagagagcaaggatgaccagaaggatgctgaggaagagggcggtgaccaggctggccaaaatatccggaaagacagacattatcggtctgctcgggtagagactccatcccatccgggtggtgtgagcgaagagttttgggaacgcagtcggcagagagagcgggagcggmgggaacatggtgtctatgcctcgtccaaagaagaaaaggattggaagaaggagaaatcgcgggatcgagactatgaccgcaagagggacagagatgcagccaccccttcaaggtctacctgggaggaagaggacagtggctatggctcctcaaggcgctcacagtgggaatcgccctccccgacgccttcctatcgggattctgagcggagccatcggctgtccactcgagatcgagacaggtctgtgaggggcaagtactcggatgacacgcctctgccaactccctcctacaaatataacgagtgggccgatgacagaagacacttggggtccaccccgcgtctgtccaggggccgaggaagacgtgaggagggcgaagaaggaatttcatttgacacggaggaggagcggcagcagtgggaagatgaccagaggcaagccgatcgggattggtacatgatggacgagggctatgacgagttccacaacccgctggcctactcctccgaggactacgtgaggaggcgggagcagcacctgcataaacagaagcagaagcgcatttcagctcagcggagacagatcaatgaggataacgagcgctgggagacaaaccgcatgctcaccagtggggtggtccatcggctggaggtggatgaggactttgaagaggacaacgcggccaaggtgcatctgatggtgcacaatctggtgcctccctttctggatgggcgcattgtcttcaccaagcagccrgagccggtgattccagtgaaggatgcyacttctgacctggccatcattgctcggaaaggcagccagacagtgcggaagcacagggagcagaaggagcgcaagaaggctcagcacaaacactgggaactggcggggaccaaactgggagatataatgggcgtcaagaaggaggaagagccagataaagctgtgayggaggatgggaaggtggactacaggacagagcagaagtttgcagatcacatgaagagaaagagcgaagccagcagtgaatttgcaaagaagaagtccatcctggagcagaggcagtacctgcccatctttgcagtgcagcaggagctgctcactattatcagagacaacagcatcgtgatcgtggttggggagacggggagtggtaagaccactcagctgacrcagtacctgcatgaagatggttacacggactatgggatgattgggtgtacccagccccggcgtgtagctgccatgtcagtggccaagagagtcagtgaagagatggggggaaaccttggcgaggaggtgggctatgccatccgctttgaagactgcacttcagagaacaccttgatcaaatacatgactgacgggatcctgctccgagagtccctccgggaagccgacctggatcactacagtgccatcatcatggacgaggcccacgagcgctccctcaacactgacgtgctctttgggctgctccgggaggtagtggctcggcgctcagacctgaagctcatcgtcacatcagccacgatggatgcggagaagtttgctgccttttttgggaatgtccccatcttccacatccctggccgtaccttccctgttgacatcctcttcagcaagaccccacaggaggattacgtggaggctgcagtgaagcagtccttgcaggtgcacctgtcgggggcccctggagacatccttatcttcatgcctggccaagaggacattgaggtgacctcagaccagattgtggagcatctggaggaactggagaacgcgcctgcmctggctgtgctgcccatctactctcagctgccttctgacctccaggccaaaatcttccagaaggctccagatggcgttcggaagtgcatcgttgccaccaatattgccgagacgtctctcactgttgacggcatcatgtttgttatcgattctggttattgcaaattaaaggtcttcaaccccaggattggcatggatgctctgcagatctatcccattagccaggccaatgccaaccagcggtcagggcgagccggcaggacgggcccaggtcagtgtttcaggctctacacccagagcgcctacaagaatgagctcctgaccaccacagtgcccgagatccagaggactaacctggccaacgtggtgctgctgctcaagtccctcggggtgcaggacctgctgcagttccacttcatggacccgcccccggaggacaacatgctcaactctatgtatcagctctggatcctcggggccctggacaacacaggtggtctgacctctaccgggcggctgatggtggagttcccgctggaccctgccctgtccaagatgctcatcgtgtcctgtgacatgggctgcagctccgagatcctgctcatcgtttccatgctctcggtcccagccrtcttctacaggcccaagggtcgagaggaggagagtgatcaaatccgggagaagttcgctgttcctgagagcgatcatttgacctacctgaatgtttacctgcagtggaagaacaataattactccaccatctggtgtaacgatcatttcatccatgctaaggccatgcggaaggtccgggaggtgcgagctcaactcaaggacatcatggtgcagcagcggatgagcctggcctcgtgtggcactgactgggacatcgtcaggaagtgcatctgtgctgcctatttccaccaagcagccaagctcaagggaatcggggagtacgtgaacatccgcacagggatgccctgccacttgcaccccaccagctccctttttggaatgggctacaccccagattacatagtgtatcacgagttggtcatgaccaccaaggagtatatgcagtgtgtgaccgctgtggacggggagtggctggcggagctgggccccatgttctatagcgtgaaacaggcgggcaagtcacggcaggagaaccgtcgtcgggccaaagaggaagcctctgccatggaggaggagatggcgctggccgaggagcagctgcgagcccggcggcaggagcaggagaagcgcagccccctgggcagtgtcaggtctacgaagatctacactccaggccggaaagagcaaggggagcccatgacccctcgccgcacgccagcccgctttggtctgtgagctgaggctgtccccagagaggatggcagcagggcagttcctgctggaccagactctctggcagaggaggtggagttcytccatgcaggagcacggcatggcgggagcggggctgcagagtatccgaggtgctgccggggcagcggraggtggctggacccatcgcatctaaaactggcccaggacacttggtgtatgcgtgacttggctgtggctgtcttttttaatccttgtgtaaagcagcaaaaaagacctaaagggaattgtaatttggttataattcaggatttggaaataaatttattatttgt

SEQ ID NO: 5980 - DNA, 4350 bp, Homo sapiens
cttttcctgcccccagactagaggcgggatgtagtctcttaggctaagagtgattggtcacaaggagactcggaagtgtctgatcagagccccagaggaggccttgagagcctgttggcgtaccgttccacacttggatccaggaatcgggcgtgttccaggctgctctctatggtagctttgggcggatagagggggcgcgcaaagtattaagggacaataatggccgctttcaaggtgtggattttggctccttgagcctgtctgagcgaggggtggcagcgccggcgccccagaatccgggacagaagggtcccaagagtcgcgcttggtgagagaaatcccagatcctgtgatgggggacaccagtgaggatgcctcgatccatcgattggaaggcastgatctggactgtcaggttggyggtcttatttgcaartccaaaagtgcggccagcgagcagcatgtcttcaaggctcctgctccccgcccttcattactsggactggacttgctggcttccctgaaacggagagagcgagaggagaaggacgatggggaggacaagaagaagtccaaagtctcctcctacaaggactgggaagagagcaaggatgaccagaaggatgctgaggaagagggcggtgaccaggctggccaaaatatccggaaagacagacattatcggtctgctcgggtagagactccatcccatccgggtggtgtgagcgaagagttttgggaacgcagtcggcagagagagcgggagcggmgggaacatggtgtctatgcctcgtccaaagaagaaaaggattggaagaaggagaaatcgcgggatcgagactatgaccgcaagagggacagagatgagcgggatagaagtaggcacagcagcagatcagagcgagatggagggtcagagcgtagcagcagaagaaatgaacccgagagcccacgacatcgacctaaagatgcagccaccccttcaaggtctacctgggaggaagaggacagtggctatggctcctcaaggcgctcacagtgggaatcgccctccccgacgccttcctatcgggattctgagcggagccatcggctgtccactcgagatcgagacaggtctgtgaggggcaagtactcggatgacacgcctctgccaactccctcctacaaatataacgagtgggccgatgacagaagacacttggggtccaccccgcgtctgtccaggggccgaggaagacgtgaggagggcgaagaaggaatttcatttgacacggaggaggagcggcagcagtgggaagatgaccagaggcaagccgatcgggattggtacatgatggacgagggctatgacgagttccacaacccgctggcctactcctccgaggactacgtgaggaggcgggagcagcacctgcataaacagaagcagaagcgcatttcagctcagcggagacagatcaatgaggataacgagcgctgggagacaaaccgcatgctcaccagtggggtggtccatcggctggaggtggatgaggactttgaagaggacaacgcggccaaggtgcatctgatggtgcacaatctggtgcctccctttctggatgggcgcattgtcttcaccaagcagccrgagccggtgattccagtgaaggatgcyacttctgacctggccatcattgctcggaaaggcagccagacagtgcggaagcacagggagcagaaggagcgcaagaaggctcagcacaaacactgggaactggcggggaccaaactgggagatataatgggcgtcaagaaggaggaagagccagataaagctgtgayggaggatgggaaggtggactacaggacagagcagaagtttgcagatcacatgaagagaaagagcgaagccagcagtgaatttgcaaagaagaagtccatcctggagcagaggcagtacctgcccatctttgcagtgcagcaggagctgctcactattatcagagacaacagcatcgtgatcgtggttggggagacggggagtggtaagaccactcagctgacrcagtacctgcatgaagatggttacacggactatgggatgattgggtgtacccagccccggcgtgtagctgccatgtcagtggccaagagagtcagtgaagagatggggggaaaccttggcgaggaggtgggctatgccatccgctttgaagactgcacttcagagaacaccttgatcaaatacatgactgacgggatcctgctccgagagtccctccgggaagccgacctggatcactacagtgccatcatcatggacgaggcccacgagcgctccctcaacactgacgtgctctttgggctgctccgggaggtagtggctcggcgctcagacctgaagctcatcgtcacatcagccacgatggatgcggagaagtttgctgccttttttgggaatgtccccatcttccacatccctggccgtaccttccctgttgacatcctcttcagcaagaccccacaggaggattacgtggaggctgcagtgaagcagtccttgcaggtgcacctgtcgggggcccctggagacatccttatcttcatgcctggccaagaggacattgaggtgacctcagaccagattgtggagcatctggaggaactggagaacgcgcctgcmctggctgtgctgcccatctactctcagctgccttctgacctccaggccaaaatcttccagaaggctccagatggcgttcggaagtgcatcgttgccaccaatattgccgagacgtctctcactgttgacggcatcatgtttgttatcgattctggttattgcaaattaaaggtcttcaaccccaggattggcatggatgctctgcagatctatcccattagccaggccaatgccaaccagcggtcagggcgagccggcaggacgggcccaggtcagtgtttcaggctctacacccagagcgcctacaagaatgagctcctgaccaccacagtgcccgagatccagaggactaacctggccaacgtggtgctgctgctcaagtccctcggggtgcaggacctgctgcagttccacttcatggacccgcccccggaggacaacatgctcaactctatgtatcagctctggatcctcggggccctggacaacacaggtggtctgacctctaccgggcggctgatggtggagttcccgctggaccctgccctgtccaagatgctcatcgtgtcctgtgacatgggctgcagctccgagatcctgctcatcgtttccatgctctcggtcccagccrtcttctacaggcccaagggtcgagaggaggagagtgatcaaatccgggagaagttcgctgttcctgagagcgatcatttgacctacctgaatgtttacctgcagtggaagaacaataattactccaccatctggtgtaacgatcatttcatccatgctaaggccatgcggaaggtccgggaggtgcgagctcaactcaaggacatcatggtgcagcagcggatgagcctggcctcgtgtggcactgactgggacatcgtcaggaagtgcatctgtgctgcctatttccaccaagcagccaagctcaagggaatcggggagtacgtgaacatccgcacagggatgccctgccacttgcaccccaccagctccctttttggaatgggctacaccccagattacatagtgtatcacgagttggtcatgaccaccaaggagtatatgcagtgtgtgaccgctgtggacggggagtggctggcggagctgggccccatgttctatagcgtgaaacaggcgggcaagtcacggcaggagaaccgtcgtcgggccaaagaggaagcctctgccatggaggaggagatggcgctggccgaggagcagctgcgagcccggcggcaggagcaggagaagcgcagccccctgggcagtgtcaggtctacgaagatctacactccaggccggaaagagcaaggggagcccatgacccctcgccgcacgccagcccgctttggtctgtgagctgaggctgtccccagagaggatggcagcagggcagttcctgctggaccagactctctggcagaggaggtggagttcytccatgcaggagcacggcatggcgggagcggggctgcagagtatccgaggtgctgccggggcagcggraggtggctggacccatcgcatctaaaactggcccaggacacttggtgtatgcgtgacttggctgtggctgtcttttttaatccttgtgtaaagcagcaaaaaagacctaaagggaattgtaatttggttataattcaggatttggaaataaatttattatttgt

SEQ ID NO: 5981 - DNA, 4453 bp, Homo sapiens
cttttcctgcccccagactagaggcgggatgtagtctcttaggctaagagtgattggtcacaaggagactcggaagtgtctgatcagagccccagaggaggccttgagagcctgttggcgtaccgttccacacttggatccaggaatcgggcgtgttccaggctgctctctatggtagctttgggcggatagagggggcgcgcaaagtattaagggacaataatggccgctttcaaggtgtggattttggctccttgagcctgtctgagcgaggggtggcagcgccggcgccccagaatccgggacagaagggtcccaagagtcgcgcttggtgagagaaatcccagatcctgtgatgggggacaccagtgaggatgcctcgatccatcgattggaaggcastgatctggactgtcaggttggyggtcttatttgcaartccaaaagtgcggccagcgagcagcatgtcttcaaggctcctgctccccgcccttcattactsggactggacttgctggcttccctgaaacggagagagcgagaggagaaggacgatggggaggacaagaagaagtccaaagtctcctcctacaaggactgggaagagagcaaggatgaccagaaggatgctgaggaagagggcggtgaccaggctggccaaaatatccggaaagacagacattatcggtctgctcgggtagagactccatcccatccgggtggtgtgagcgaagagttttgggaacgcagtcggcagagagagcgggagcggmgggaacatggtgtctatgcctcgtccaaagaagaaaaggattggaagaaggagaaatcgcgggatcgagactatgaccgcaagagggacagagatgagcgggatagaagtaggcacagcagcagatcagagcgagatggagggtcagagcgtagcagcagaagaaatgaacccgagagcccacgacatcgacctaaagatgcagccaccccttcaaggtctacctgggaggaagaggacagtggctatggctcctcaaggcgctcacagtgggaatcgccctccccgacgccttcctatcgggattctgagcggagccatcggctgtccactcgagatcgagacaggtctgtgaggggcaagtactcggatgacacgcctctgccaactccctcctacaaatataacgagtgggccgatgacagaagacacttggggtccaccccgcgtctgtccaggggccgaggaagacgtgaggagggcgaagaaggaatttcatttgacacggaggaggagcggcagcagtgggaagatgaccagaggcaagccgatcgggattggtacatgatggacgagggctatgacgagttccacaacccgctggcctactcctccgaggactacgtgaggaggcgggagcagcacctgcataaacagaagcagaagcgcatttcagctcagcggagacagatcaatgaggataacgagcgctgggagacaaaccgcatgctcaccagtggggtggtccatcggctggaggtggatgaggactttgaagaggacaacgcggccaaggtgcatctgatggtgcacaatctggtgcctccctttctggatgggcgcattgtcttcaccaagcagccrgagccggtgattccagtgaaggatgcyacttctgacctggccatcattgctcggaaaggcagccagacagtgcggaagcacagggagcagaaggagcgcaagaaggctcagcacaaacactgggaactggcggggaccaaactgggagatataatgggcgtcaagaaggaggaagagccagataaagctgtgayggaggatgggaaggtggactacaggacagagcagaagtttgcagatcacatgaagagaaagagcgaagccagcagtgaatttgcaaagaagaagtccatcctggagcagaggcagtacctgcccatctttgcagtgcagcaggagctgctcactattatcagagacaacagcatcgtgatcgtggttggggagacggggagtggtaagaccactcagctgacrcagtacctgcatgaagatggttacacggactatgggatgattgggtgtacccagccccggcgtgtagctgccatgtcagtggccaagagagtcagtgaagagatggggggaaaccttggcgaggaggtgggctatgccatccgctttgaagactgcacttcagagaacaccttgatcaaatacatgactgacgggatcctgctccgagagtccctccgggaagccgacctggatcactacagtgccatcatcatggacgaggcccacgagcgctccctcaacactgacgtgctctttgggctgctccgggaggtagtggctcggcgctcagacctgaagctcatcgtcacatcagccacgatggatgcggagaagtttgctgccttttttgggaatgtccccatcttccacatccctggccgtaccttccctgttgacatcctcttcagcaagaccccacaggaggattacgtggaggctgcagtgaagcagtccttgcaggtgcacctgtcgggggcccctggagacatccttatcttcatgcctggccaagaggacattgaggtgacctcagaccagattgtggagcatctggaggaactggagaacgcgcctgcmctggctgtgctgcccatctactctcagctgccttctgacctccaggccaaaatcttccagaaggctccagatggcgttcggaagtgcatcgttgccaccaatattgccgagacgtctctcactgttgacggcatcatgtttgttatcgattctggttattgcaaattaaaggtcttcaaccccaggattggcatggatgctctgcagatctatcccattagccaggccaatgccaaccagcggtcagggcgagccggcaggacgggcccaggtcagtgtttcaggctctacacccagagcgcctacaagaatgagctcctgaccaccacagtgcccgagatccagaggactaacctggccaacgtggtgctgctgctcaagtccctcggggtgcaggacctgctgcagttccacttcatggacccgcccccggaggacaacatgctcaactctatgtatcagctctggatcctcggggccctggacaacacaggtggtctgacctctaccgggcggctgatggtggagttcccgctggaccctgccctgtccaagatgctcatcgtgtcctgtgacatgggctgcagctccgagatcctgctcatcgtttccatgctctcggtcccagccrtcttctacaggcccaagggtcgagaggaggagagtgatcaaatccgggagaagttcgctgttcctgagagcgatcatttgacctacctgaatgtttacctgcagtggaagaacaataattactccaccatctggtgtaacgatcatttcatccatgctaaggccatgcggaaggtccgggaggtgcgagctcaactcaaggacatcatggtgcagcagcggatgagcctggcctcgtgtggcactgactgggacatcgtcaggaagtgcatctgtgctgcctatttccaccaagcagccaagctcaagggaatcggggagtacgtgaacatccgcacagggatgccctgccacttgcaccccaccagctccctttttggaatgggctacaccccagattacatagtgtatcacgagttggtcatgaccaccaaggagtatatgcagtgtgtgaccgctgtggacggggagtggctggcggagctgggccccatgttctatagcgtgaaacaggcgggcaagtcacggcaggagaaccgtcgtcgggccaaagaggaagcctctgccatggaggaggagatggcgctggccgaggagcagctgcgagcccggcggcaggagcaggagaagcgcagccccctgggcagtgtcaggtctacgaagatctacactccaggccggaaagagcaaggggagcccatgacccctcgccgcacgccagcccgctttggtctgtgagctgaggctgtccccagagaggatggcagcaggtattgggtcctsagccttctggcgggagccctgaggctgcggacaaagccctttcatctgaggactttcatctgtgcatatcacggccccccagggcagttcctgctggaccagactctctggcagaggaggtggagttcytccatgcaggagcacggcatggcgggagcggggctgcagagtatccgaggtgctgccggggcagcggraggtggctggacccatcgcatctaaaactggcccaggacacttggtgtatgcgtgacttggctgtggctgtcttttttaatccttgtgtaaagcagcaaaaaagacctaaagggaattgtaatttggttataattcaggatttggaaataaatttattatttgtaaaacatg

SEQ ID NO: 5982 - DNA, 688 bp, Homo sapiens
gggcttaatgacggaaggagcatggcgtggagacacctgmaaaagcgggcccaggatgctgtgatcatcctggggggaggaggacttctcttygcctcctacctgatggccacgggagatgagcgtttctatgctgaacacctgatgccgactctgcaggggctgctggacccggagtcagcccacagactggctgttcgcttcacctccctggggctccttccacgggccagatttcaagactctgacatgctggtatggatttaacagtcacgggmtttcagtggtggaacacaggttacgggccagacagcagaagcaggccaagctcacagaaggtgctgcaggagagggatggcttgcggagagtgcacaggccggcagtcctggtgaagatcgctcctgacctcaccagccaggataaggaggacattgccagtgtggtcaaagagttgggcatcgatgggctgattgttacgaacaccaccgtgagtcgccctgcgggcctccagggtgccctgcgctctgaaacaggagggctgagtgggaagcccctccgggatttatcaactcaaaccattcgggagatgtatgcactcacccaaggcaaggtttcccgtgtttgtgtcttcagatctgcgtgtggcttgggctcctgggtcgtgatgggratcatcattccctaatc

SEQ ID NO: 5983 - DNA, 1837 bp, Homo sapiens
gggcttaatgacggaaggagcatggcgtggagacacctgmaaaagcgggcccaggatgctgtgatcatcctggggggaggaggacttctcttygcctcctacctgatggccacgggagatgagcgtttctatgctgaacacctgatgccgactctgcaggggctgctggacccggagtcagcccacagactggctgttcgcttcacctccctggggctccttccacgggccagatttcaagactctgacatgctggaagtgagagttctgggccataaattccgaaatccagtaggaattgctgcaggatttgacaagcatggggaagccgtggacggactttataagatgggctttggttttgttgagataggaagtgtgactccaaaacctcaggaaggaaaccctagacccagagtcttccgcctccctgaggaccaagctgtcattaacaggtatggatttaacagtcacgggmtttcagtggtggaacacaggttacgggccagacagcagaagcaggccaagctcacagaagatggactgcctctgggggtcaacttggggaagaacaagacctcagtggacgccgcggaggactacgcagaaggggtgcgcgtactgggccccctggccgactacctggtggtgaatgtgtccagccccaacactgccgggctgcggagccttcagggaaaggccgagctgcgccgcctgctgaccaaggtgctgcaggagagggatggcttgcggagagtgcacaggccggcagtcctggtgaagatcgctcctgacctcaccagccaggataaggaggacattgccagtgtggtcaaagaggccgagttcccataattggggttggtggtgtgagcagcgggcaggacgygctggagaagatccgggcaggggcctccctggtgcagctgtacacggccctcaccttctgggggccacccgttgtgggcaaagtcaagcgggaactggaggcccttctgaaagagcagggctttggcggagtcacagatgccattggagcagatcatcggaggtgaggacagcgtctgacgggaagccygatctggaaccttcccaaggactcaggcaagcctttgtggctggatcatgagaggagggactccatcttgagccatgtcccccagccatggcatggctgcactgtaaacgccaatcggggggtcaccaggatcaaccgcaggctttcttcagtcccttggtcagaccataaactgcatttttgattctttgtggattcaaaccctaggatccatcagtcttgcaaggacattgaatattaggaggaaaaagtcatggaaaaaataaagccatttagaacctgggtttcaacgctagccctttctggtttgccataggccctgccaagatactgcaggtccatccaggcctctgctatctgcatctgcagtgggcttcccaggaacttgactgtctttcatttgatctttatttttgtttatttaatattttaaactttattttaaaaatatttcaaacataagggcggggtgtggtggctcatgcctgtaatcccaagctgagattacaggtgtgagccaccgcacccggcccaaggatacctatttttcttaatgctggaagccacactcagacaccagagcagctctcaatgctgggaatcctgggagactgatgatgaccgcgtctccctctgggaccaaggatggtggaagggtgtgcagaattccaaatgttatttacatcactcactcttgtgtggagtgcataattgtctttgcttgccaatttcatatcagttaaatataagcagtaagct

SEQ ID NO: 5984 - DNA, 2204 bp, Homo sapiens
aagcgggcccaggatgctgtgatcatcctggggggaggaggacttctcttygcctcctacctgatggccacgggagatgagcgtttctatgctgaacacctgatgccgactctgcaggggctgctggacccggagtcagcccacagactggctgttcgcttcacctccctggggctccttccacgggccagatttcaagactctgacatgctggaagtgagagttctgggccataaattccgaaatccagtaggaattgctgcaggatttgacaagcatggggaagccgtggacggactttataagatgggctttggttttgttgagataggaagtgtgactccaaaacctcaggaaggaaaccctagacccagagtcttccgcctccctgaggaccaagctgtcattaacaggtatggatttaacagtcacgggmtttcagtggtggaacacaggttacgggccagacagcagaagcaggccaagctcacagaagatggactgcctctgggggtcaacttggggaagaacaagacctcagtggacgccgcggaggactacgcagaaggggtgcgcgtactgggccccctggccgactacctggtggtgaatgtgtccagccccaacactgccgggctgcggagccttcagggaaaggccgagctgcgccgcctgctgaccaaggtgctgcaggagagggatggcttgcggagagtgcacaggccggcagtcctggtgaagatcgctcctgacctcaccagccaggataaggaggacattgccagtgtggtcaaagagttgggcatcgatgggctgattgttacgaacaccaccgtgagtcgccctgcgggcctccagggtgccctgcgctctgaaacaggagggctgagtgggaagcccctccgggatttatcaactcaaaccattcgggagatgtatgcactcacccaaggcaagttcccataattggggttggtggtgtgagcagcgggcaggacgygctggagaagatccgggcaggggcctccctggtgcagctgtacacggccctcaccttctgggggccacccgttgtgggcaaagtcaagcgggaactggaggcccttctgaaagagcagggctttggcggagtcacagatgccattggagcagatcatcggaggtgaggacagcgtctgacgggaagccygatctggaaccttcccaaggactcaggcaagcctttgtggctggatcatgagaggagggactccatcttgagccatgtcccccagccatggcatggctgcactgtaaacgccaatcggggggtcaccaggatcaaccgcaggctttcttcagtcccttggtcagaccataaactgcatttttgattctttgtggattcaaaccctaggatccatcagtcttgcaaggacattgaatattaggaggaaaaagtcatggaaaaaataaagccatttagaacctgggtttcaacgctagccctttctggtttgccataggccctgccaagatactgcaggtccatccaggcctctgctatctgcatctgcagtgggcttcccaggaacttgactgtctttcatttgatctttatttttgtttatttaatattttaaactttattttaaaaatatttcaaacataagggcggggtgtggtggctcatgcctgtaatcccagcactttgggaggccgaggcgggcggatcacctgaggccaggagttggagaccatccaggccaccatggtgaaaccctgtctctaccaaaaatacaaaaaattagccagatattgtggcaggcacttttaatcccagctactcgggaggctgaggcaggagaattgcttgaacctgggaggcggaggttgcagtgagccaagattgcaccagtgcactccagcttgggcgacagatcaagactctgtcacacacaaacraacraacaaattttcccgtttctctctgtccctttctctataacatggataaaatattcacgtcttatgtatttattattgctgagtcattggtgccttattcttcagtgtttcagtctgtatctcctaagcatcctgatgttagttttttgactataaaattgacctgcattctttactagcaattcaaacggtacagcactcttgaagtgtaaacattcctgttcctcctcaccccactctgcagacatgcctttctg

SEQ ID NO: 5985 - DNA, 2253 bp, Homo sapiens
gggcttaatgacggaaggagcatggcgtggagacacctgmaaaagcgggcccaggatgctgtgatcatcctggggggaggaggacttctcttygcctcctacctgatggccacgggagatgagcgtttctatgctgaacacctgatgccgactctgcaggggctgctggacccggagtcagcccacagactggctgttcgcttcacctccctggggctccttccacgggccagatttcaagactctgacatgctggaagtgagagttctgggccataaattccgaaatccagtaggaattgctgcaggatttgacaagcatggggaagccgtggacggactttataagatgggctttggttttgttgagataggaagtgtgactccaaaacctcaggaaggaaaccctagacccagagtcttccgcctccctgaggaccaagctgtcattaacaggtatggatttaacagtcacgggmtttcagtggtggaacacaggttacgggccagacagcagaagcaggccaagctcacagaagatggactgcctctgggggtcaacttggggaagaacaagacctcagtggacgccgcggaggactacgcagaaggggtgcgcgtactgggccccctggccgactacctggtggtgaatgtgtccagccccaacactgccgggctgcggagccttcagggaaaggccgagctgcgccgcctgctgaccaaggtgctgcaggagagggatggcttgcggagagtgcacaggccggcagtcctggtgaagatcgctcctgacctcaccagccaggataaggaggacattgccagtgtggtcaaagagttgggcatcgatgggctgattgttacgaacaccaccgtgagtcgccctgcgggcctccagggtgccctgcgctctgaaacaggagggctgagtgggaagcccctccgggatttatcaactcaaaccattcgggagatgtatgcactcacccaaggcaaggtttcccttcccataattggggttggtggtgtgagcagcgggcaggacgygctggagaagatccgggcaggggcctccctggtgcagctgtacacggccctcaccttctgggggccacccgttgtgggcaaagtcaagcgggaactggaggcccttctgaaagagcagggctttggcggagtcacagatgccattggagcagatcatcggaggtgaggacagcgtctgacgggaagccygatctggaaccttcccaaggactcaggcaagcctttgtggctggatcatgagaggagggactccatcttgagccatgtcccccagccatggcatggctgcactgtaaacgccaatcggggggtcaccaggatcaaccgcaggctttcttcagtcccttggtcagaccataaactgcatttttgattctttgtggattcaaaccctaggatccatcagtcttgcaaggacattgaatattaggaggaaaaagtcatggaaaaaataaagccatttagaacctgggtttcaacgctagccctttctggtttgccataggccctgccaagatactgcaggtccatccaggcctctgctatctgcatctgcagtgggcttcccaggaacttgactgtctttcatttgatctttatttttgtttatttaatattttaaactttattttaaaaatatttcaaacataagggcggggtgtggtggctcatgcctgtaatcccagcactttgggaggccgaggcgggcggatcacctgaggccaggagttggagaccatccaggccaccatggtgaaaccctgtctctaccaaaaatacaaaaaattagccagatattgtggcaggcacttttaatcccagctactcgggaggctgaggcaggagaattgcttgaacctgggaggcggaggttgcagtgagccaagattgcaccagtgcactccagcttgggcgacagatcaagactctgtcacacacaaacraacraacaaattttcccgtttctctctgtccctttctctataacatggataaaatattcacgtcttatgtatttattattgctgagtcattggtgccttattcttcagtgtttcagtctgtatctcctaagcatcctgatgttagttttttgactataaaattgacctgcattctttactagcaattcaaacggtacagcactcttgaagtgtaaacattcctgttcctcctcaccccactctgcagacatgcctttctg

SEQ ID NO: 5986 - DNA, 2246 bp, Homo sapiens
gggcttaatgacggaaggagcatggcgtggagacacctgmaaaagcgggcccaggatgctgtgatcatcctggggggaggaggacttctcttygcctcctacctgatggccacgggagatgagcgtttctatgctgaacacctgatgccgactctgcaggggctgctggacccggagtcagcccacagactggctgttcgcttcacctccctggggctccttccacgggccagatttcaagactctgacatgctggaagtgagagttctgggccataaattccgaaatccagtaggaattgctgcaggatttgacaagcatggggaagccgtggacggactttataagatgggctttggttttgttgagataggaagtgtgactccaaaacctcaggaaggaaaccctagacccagagtcttccgcctccctgaggaccaagctgtcattaacaggtatggatttaacagtcacgggmtttcagtggtggaacacaggttacgggccagacagcagaagcaggccaagctcacagaagatggactgcctctgggggtcaacttggggaagaacaagacctcagtggacgccgcggaggactacgcagaaggggtgcgcgtactgggccccctggccgactacctggtggtgaatgtgtccagccccaacactgccgggctgcggagccttcagggaaaggccgagctgcgccgcctgctgaccaaggtgctgcaggagagggatggcttgcggagagtgcacaggccggcagtcctggtgaagatcgctcctgacctcaccagccaggataaggaggacattgccagtgtggtcaaagagttgggcatcgatgggctgattgttacgaacaccaccgtgagtcgccctgcgggcctccagggtgccctgcgctctgaaacaggagggctgagtgggaagcccctccgggatttatcaactcaaaccattcgggagatgtatgcactcacccaaggcaagttcccataattggggttggtggtgtgagcagcgggcaggacgygctggagaagatccgggcaggggcctccctggtgcagctgtacacggccctcaccttctgggggccacccgttgtgggcaaagtcaagcgggaactggaggcccttctgaaagagcagggctttggcggagtcacagatgccattggagcagatcatcggaggtgaggacagcgtctgacgggaagccygatctggaaccttcccaaggactcaggcaagcctttgtggctggatcatgagaggagggactccatcttgagccatgtcccccagccatggcatggctgcactgtaaacgccaatcggggggtcaccaggatcaaccgcaggctttcttcagtcccttggtcagaccataaactgcatttttgattctttgtggattcaaaccctaggatccatcagtcttgcaaggacattgaatattaggaggaaaaagtcatggaaaaaataaagccatttagaacctgggtttcaacgctagccctttctggtttgccataggccctgccaagatactgcaggtccatccaggcctctgctatctgcatctgcagtgggcttcccaggaacttgactgtctttcatttgatctttatttttgtttatttaatattttaaactttattttaaaaatatttcaaacataagggcggggtgtggtggctcatgcctgtaatcccagcactttgggaggccgaggcgggcggatcacctgaggccaggagttggagaccatccaggccaccatggtgaaaccctgtctctaccaaaaatacaaaaaattagccagatattgtggcaggcacttttaatcccagctactcgggaggctgaggcaggagaattgcttgaacctgggaggcggaggttgcagtgagccaagattgcaccagtgcactccagcttgggcgacagatcaagactctgtcacacacaaacraacraacaaattttcccgtttctctctgtccctttctctataacatggataaaatattcacgtcttatgtatttattattgctgagtcattggtgccttattcttcagtgtttcagtctgtatctcctaagcatcctgatgttagttttttgactataaaattgacctgcattctttactagcaattcaaacggtacagcactcttgaagtgtaaacattcctgttcctcctcaccccactctgcagacatgcctttctg

SEQ ID NO: 5987 - DNA, 1911 bp, Homo sapiens
caggcttcatttggagtcaggcctggctgttgctcaggtgaccagcttgtgtctctgggagggcrctgctttccccggccacccggcgcgatgatccagaatgtcggaaatcacytgcgayggggcttggcctctgtgttctccaaccrcacatcccggaagtcagccttacgtgcggggaacgacagtgccatggcagayggcgagggataccggaaccccacggaggtgcagatgagccagctggtgctgccctgccacaccaaccaacgtggtgagctgagcgtcgggcagctgctcaagtggattgacaccacggcttgcctgtccgcggagaggcacgctggctgcccctgtgtcacagcttccatggatgacatctattttgagcacaccattagtgttggacaagtggtgaatatcaaggccaaggtgaaccgggccttcaactccagcatggaggtgggcatccaggtggcctcggaggacctgtgctctgagaagcagtggaatgtgtgcaaggccttggccaccttcgtggcccgccgagagatcaccaaggtgaagctgaagcagatcacgcygcggacagaagaggagaagatggagcacagtgtggcrgctgagcgccggcgcatgcgccttgtctatgcagacaccatcaaggacctcctggccaactgcgccattcaggrcgatctggagagcagagactgtagccgcatrgtgccggctgagaagacccgtgtggagagtgtggagctggtcctgcctccccacgccaatcaccagggcaacacctttgggggccagatcatggcctggatggagaatgtggccaccattgcagccagccggctctgccrtgcccaccctacgctgaaggccattgaaatgttccacttccgaggcccgtcccaggtcggcgaccgtctggtgctcaaagccatcgtgaacaatgccttcaaacatagcatggaggtgggcgtgtgcgtggaggcctatcgccaggaggstgagacccaccggcgccacatcaacagtgcctttatgacctttgtggtcctggacgcagatgaccagccccagttgctgccctggattcggccccagcccggcgatggtgagcggcggtaccgagaggccagtgccagaaagaagatccgcctggacaggaagtacatcgtgtcctgtaagcagacagaggtgcccctctccgtcccctgggaccctagcaaccaggtgtacctgagctacaataacgtctcctccttgaagatgcttgtggccaaggacaactgggtgctgtcctyggagatcagtcaggtccgcctgtacactctggaggatgacaagttcctctccttccacatggagatggtggtgcatgtggatgcagcccaggccttcctgctgctctcggacctgcgtcagaggccagagtgggacaagcactaccggagcgtggagctagtgcagcaggtagacgaggacgacgccatctaccacgtcaccagccctgccctcggaggtcacacaaagccccaggacttcgtgatcctggcctcraggcggaagccttgtgacaatggggacccctatgtcatcgcgctgaggtcggtcacgctgcccacacaccgagagacgccagagtacagacgcggagagaccctctgctcaggcttctgcctctggcrcgagggggaccagctgaccaagtgctgctgggttagggtctccctgactgagctggtctcggcaagtggcttctattcctgggggctcgaatccaggtcaaagggtcgcaggagcgacggttggaatggaaaactagctggaggacacctgagtactcttaaagcaatccccgtggccaaaatcaacagccgatttggataccttcaagacacc

SEQ ID NO: 5988 - DNA, 3090 bp, Homo sapiens
caggcttcatttggagtcaggcctggctgttgctcaggtgaccagcttgtgtctctgggagggcrctgctttccccggccacccggcgcgatgatccagaatgtcggaaatcacytgcgayggggcttggcctctgtgttctccaaccrcacatcccggaagtcagccttacgtgcggggaacgacagtgccatggcagayggcgagggataccggaaccccacggaggtgcagatgagccagctggtgctgccctgccacaccaaccaacgtggtgagctgagcgtcgggcagctgctcaagtggattgacaccacggcttgcctgtccgcggagaggcacgctggctgcccctgtgtcacagcttccatggatgacatctattttgagcacaccattagtgttggacaagtggtgaatatcaaggccaaggtgaaccgggccttcaactccagcatggaggtgggcatccaggtggcctcggaggacctgtgctctgagaagcagtggaatgtgtgcaaggccttggccaccttcgtggcccgccgagagatcaccaaggtgaagctgaagcagatcacgcygcggacagaagaggagaagatggagcacagtgtggcrgctgagcgccggcgcatgcgccttgtctatgcagacaccatcaaggacctcctggccaactgcgccattcaggrcgatctggagagcagagactgtagccgcatrgtgccggctgagaagacccgtgtggagagtgtggagctggtcctgcctccccacgccaatcaccagggcaacacctttgggggccagatcatggcctggatggagaatgtggccaccattgcagccagccggctctgccrtgcccaccctacgctgaaggccattgaaatgttccacttccgaggcccgtcccaggtcggcgaccgtctggtgctcaaagccatcgtgaacaatgccttcaaacatagcatggaggtgggcgtgtgcgtggaggcctatcgccaggaggstgagacccaccggcgccacatcaacagtgcctttatgacctttgtggtcctggacgcagatgaccagccccagttgctgccctggattcggccccagcccggcgatggtgagcggcggtaccgagaggccagtgccagaaagaagatccgcctggacaggaagtacatcgtgtcctgtaagcagacagaggtgcccctctccgtcccctgggaccctagcaaccaggtgtacctgagctacaataacgtctcctccttgaagatgcttgtggccaaggacaactgggtgctgtcctyggagatcagtcaggtccgcctgtacactctggaggatgacaagttcctctccttccacatggagatggtggtgcatgtggatgcagcccaggccttcctgctgctctcggacctgcgtcagaggccagagtgggacaagcactaccggagcgtggagctagtgcagcaggtagacgaggacgacgccatctaccacgtcaccagccctgccctcggaggtcacacaaagccccaggacttcgtgatcctggcctcraggcggaagccttgtgacaatggggacccctatgtcatcgcgctgaggtcggtcacgctgcccacacaccgagagacgccagagtacagacgcggagagaccctctgctcaggcttctgcctctggcrcgagggggaccagctgaccaaggtatcctactacaaccaggccaccccaggtgttctcaactatgtgaccaccaacgtggccggcctctcctctgagttctacaccaccttcaaggcttgtgagcagtttctcttggacaaccggaatgatctggcccccagcctccagaccctctagatgccctcagtggccacatcatgcccactcccactccatcctgtccccaaggacwcacatacagtgcctggagaaagccaaagacctttatttcttcctgcctccccgtgggaagcctccgccctgaggtccgctgrcccaccacccctgggtgctcagtttctaccaacatgagccagcaagtccttgtggtagccctggggtagcctgtagtagactcgggtcctgtccacagccctagctgccagcaatgctgtcctcacagaggcatagtcgyccccagctgggttgtgctccactgtgacggtggsccggggggaggatgccakcagcctgcctatggctccagctgtgctgtggcccagcagcatggcctgcatctggaaggacacaggttgccaragcccctggcacaactctagcatatctgtgagcagctgttccctgtagccactgcccagcacctcctcaggccagcctggtgccacagtcacgtgggggaagacctcagccacagctgtaagcagctctctgccagccacatggccggggaccgaaaaactcccgtgggagattttggccccaacccacacaggccaatgcaagaggccaaggctggagaggcgtgccagcaaggccagggatggccggagggctgcgggctcyrctatttgcaaatggatgccccagtgtccgggatgtgtggccagctgctgcaggcaggactccagcgtcaggatgttgccacttggagtatgaacaatgggcacggggttttcagccacagttccctcgaggccagtgttcagcaggatcatgccttctgtgtctggaagaggcggcagaggcaacagtgtttaggatttgggttatcataaggtgttaagagtcccttgttaaaggggcagtgggagttatggggtcatcaaggaccttgcctctctggaatctgtcaacccagttttgggctccaggtggatgggttgctttataaatgtgcctggtgcatgagaaactcttgtttcagctcttggcctttacccatgactcagcctgggggctggtgccggccttgcctgcagcaatgtagctgaggactggtctgaaggccaggagccctgtgctcttgacatcactgtactccctctccctccccgcaaccctgccccaccttgcatccagggtatggtgtaaataaacctgtgttrccatggc

SEQ ID NO: 5989 - DNA, 2432 bp, Homo sapiens
caggcttcatttggagtcaggcctggctgttgctcaggtgaccagcttgtgtctctgggagggcrctgctttccccggccacccggcgcgatgatccagaatgtcggaaatcacytgcgayggggcttggcctctgtgttctccaaccrcacatcccggaagtcagccttacgtgcggggaacgacagtgccatggcagayggcgagggataccggaaccccacggaggtgcagatgagccagctggtgctgccctgccacaccaaccaacgtggtgagctgagcgtcgggcagctgctcaagtggattgacaccacggcttgcctgtccgcggagaggcacgctggctgcccctgtgtcacagcttccatggatgacatctattttgagcacaccattagtgttggacaagtggtgaatatcaaggccaaggtgaaccgggccttcaactccagcatggaggtgggcatccaggtggcctcggaggacctgtgctctgagaagcagtggaatgtgtgcaaggccttggccaccttcgtggcccgccgagagatcaccaaggtgaagctgaagcagatcacgcygcggacagaagaggagaagatggagcacagtgtggcrgctgagcgccggcgcatgcgccttgtctatgcagacaccatcaaggacctcctggccaactgcgccattcaggrcgatctggagagcagagactgtagccgcatrgtgccggctgagaagacccgtgtggagagtgtggagctggtcctgcctccccacgccaatcaccagggcaacacctttgggggccagatcatggcctggatggagaatgtggccaccattgcagccagccggctctgccrtgcccaccctacgctgaaggccattgaaatgttccacttccgaggcccgtcccaggtcggcgaccgtctggtgctcaaagccatcgtgaacaatgccttcaaacatagcatggaggtgggcgtgtgcgtggaggcctatcgccaggaggstgagacccaccggcgccacatcaacagtgcctttatgacctttgtggtcctggacgcagatgaccagccccagttgctgccctggattcggccccagcccggcgatggtgagcggcggtaccgagaggccagtgccagaaagaagatccgcctggacaggaagtacatcgtgtcctgtaagcagacagaggtgcccctctccgtcccctgggaccctagcaaccaggtgtacctgagctacaataacgtctcctccttgaagatgcttgtggccaaggacaactgggtgctgtcctyggagatcagtcaggtccgcctgtacactctggaggatgacaagttcctctccttccacatggagatggtggtgcatgtggatgcagcccaggccttcctgctgctctcggacctgcgtcagaggccagagtgggacaagcactaccggagcgtggagctagtgcagcaggtagacgaggacgacgccatctaccacgtcaccagccctgccctcggaggtcacacaaagccccaggacttcgtgatcctggcctcraggcggaagccttgtgacaatggggacccctatgtcatcgcgctgaggtcggtcacgctgcccacacaccgagagacgccagagtacagacgcggagagaccctctgctcaggcttctgcctctggcrcgagggggaccagctgaccaaggtatcctactacaaccaggccaccccaggtgttctcaactatgtgaccaccaacgtggccggcctctcctctgagttctacaccaccttcaaggcttgtgagcagtttctcttggacaaccggaatgatctggcccccagcctccagaccctctagatgccctcagtggccacatcatgcccactcccactccatcctgtccccaaggacwcacatacagtgcctggagaaagccaaagacctttatttcttcctgcctccccgtgggaagcctccgccctgaggtccgctgrcccaccacccctgggtgctcagtttctaccaacatgagccagcaagccagggatggccggagggctgcgggctcyrctatttgcaaatggatgccccagtgtccgggatgtgtggccagctgctgcaggcaggactccagcgtcaggatgttgccacttggagtatgaacaatgggcacggggttttcagccacagttccctcgaggccagtgttcagcaggatcatgccttctgtgtctggaagaggcggcagaggcaacagtgtttaggatttgggttatcataaggtgttaagagtcccttgttaaaggggcagtgggagttatggggtcatcaaggaccttgcctctctggaatctgtcaacccagttttgggctccaggtggatgggttgctttataaatgtgcctggtgcatga

SEQ ID NO: 5990 - DNA, 1311 bp, Homo sapiens
gaattaggtgctgctgggagctcctgcctcccacaggattccagctgcagggagcctcagggactctgggccgcacggagttgggggcattccccagagagcgtcgccatggtctgcagggagcagttatcaaagaatcaggtcaagtgggtgtttgccggcattacctgtgtgtctgtggtggtcattgccgcaatagtccttgccatcaccctgcggcggccaggctgtgagctggaggcctgcagccctgatgccgacatgctggactacctgctgagcctgggccagatcagccggcgagatgccttggaggtcacctggtaccacgcagccaacagcaagaaagccatgacagctgccctgaacagcaacatcacagtcctggaggctgacgtcaatgtagaagggctcggcacagccaatgagacaggagttcccatcatggcacacccccccactatctacagtgacaacacactggagcagtggctggacgctgtgctgggctcttcccaaaagggcatcaaactggacttcaagaacatcaaggcagtgggcccctccctggacctcctgcggcagctgacagaggaaggcaaagtccggcggcccatatggatcaacgctgacatcttaaagggccccaacatgctcatctcaactgaggtcaatgccacacagttcctggccctggtccaggagaagtatcccaaggctaccctatctccaggctggaccaccttctacatgtccacgtccccaaacaggacgtacacccaagccatggtggagaagatgcacgagctggtgggaggagtgccccagagggtcaccttccctgtacggtcttccatggtgcgggctgcctggccccacttcagctggctgctgagccaatctgagaggtacagcctgacgctgtggcaggctgcctcggaccccatgtcggtggaagatctgctctacgtccgggataacactgctgtccaccaagtctactatgacatctttgagcctctcctggaacagctgctcacagatatgctagagttgtgccaggggctytggcaacctgtgtccttccagatgcaggccatgctgctgggccacagcacagctggagccataggcaggctgmtggcatcctccccccggsccaccgtcacagtggagcacaacccagctggggrcgactatgcctctgtgaggacagcattgctggcagctagggctgtggacaggacccgagtctactacaggctaccccagggctaccacaaggacttgctggctcatgttggtagaaac

SEQ ID NO: 5991 - DNA, 1954 bp, Homo sapiens
gaattaggtgctgctgggagctcctgcctcccacaggattccagctgcagggagcctcagggactctgggccgcacggagttgggggcattccccagagagcgtcgccatggtctgcagggagcagttatcaaagaatcaggtcaagtgggtgtttgccggcattacctgtgtgtctgtggtggtcattgccgcaatagtccttgccatcaccctgcggcggccaggctgtgagctggaggcctgcagccctgatgccgacatgctggactacctgctgagcctgggccagatcagccggcgagatgccttggaggtcacctggtaccacgcagccaacagcaagaaagccatgacagctgccctgaacagcaacatcacagtcctggaggctgacgtcaatgtagaagggctcggcacagccaatgagacaggagttcccatcatggcacacccccccactatctacagtgacaacacactggagcagtggctggacgctgtgctgggctcttcccaaaagggcatcaaactggacttcaagaacatcaaggcagtgggcccctccctggacctcctgcggcagctgacagaggaaggcaaagtccggcggcccatatggatcaacgctgacatcttaaagggccccaacatgctcatctcaactgaggtcaatgccacacagttcctggccctggtccaggagaagtatcccaaggctaccctatctccaggctggaccaccttctacatgtccacgtccccaaacaggacgtacacccaagccatggtggagaagatgcacgagctggtgggaggagtgccccagagggtcaccttccctgtacggtcttccatggtgcgggctgcctggccccacttcagctggctgctgagccaatctgagaggtacagcctgacgctgtggcaggctgcctcggaccccatgtcggtggaagatctgctctacgtccgggataacactgctgtccaccaagtctactatgacatctttgagcctctcctgtcacagttcaagcagctggccttgaatgccacacggaaaccaatgtactacacgggaggcagcctgatccctcttctccagctgcctggggatgacggtctgaatgtggagtggctggttcctgacgtccagggcagyggtaaaacagcaacaatgaccctcccagacacagaaggcatgatcctgctgaacactggcctcgagggaactgtggctgaaaaccccgtgcccattgttcatactccaagtggcaacatcctgacgctggagtcctgcctgcagcagctggccacacatcccggacactggggcatccatttgcaaatagyrgagcccgcagccctccggccatccctggccttgctggcacgcctctccagccttggcctcttgcattggcctgtgtgggttggggccaaaatctcccacgggagtttttcggtccccggccatgtggctggcagagagctgcttacagctgtggctgaggtcttcccccacgtgactgtggcaccaggctggcctgaggaggtgctgggcagtggctacagggaacagctgctcacagatatgctagagttgtgccaggggctytggcaacctgtgtccttccagatgcaggccatgctgctgggccacagcacagctggagccataggcaggctgmtggcatcctccccccggsccaccgtcacagtggagcacaacccagctggggrcgactatgcctctgtgaggacagcattgctggcagctagggctgtggacaggacccgagtctactacaggctaccccagggctaccacaaggacttgctggctcatgttggtagaaactgagcacccaggggtggtgggycagcggacctcagggcggaggcttcccacggggaggcaggaagaaataaaggtctttggctttctccag

SEQ ID NO: 5992 - DNA, 1233 bp, Homo sapiens
cacaagtggggtactgaaattcatgaaggaatttacaacatgttgatgctattaatagaactggtcgcagagagaataaaacaagatccaattcccaytggtctcctgggtgtgcttacaatggctttcaatcctgataatgaataccattttaaaaacagaatgaaagtgtctcaaaggaattgggcagaagtgtttggagagggaaatatgtttgctgtttcacctgtatcgactttccaaaaggagcctcatggatgggttgtggatttggtaaataagtttggagaattaggtggatttgcagcaatccaagccaagctccattcagaagatatagaacttggggctgtctcagcactgattcagcccttaggagtgtgtgcagagtacctcaattcctccgtggtacagcccatgctagacccagtcattcttactacaatccaggatgtacggagtgtagaagagaaagacctcaaagacaagagattggttagcatccctgagctcttgtctgccgttaagttactttgcatgcgcttccaaccggatctggtgacaattgtggatgaccttcgactagatattctattgcgcatgctgaaatcaccacatttcagtgctaagatgaattctctcaaagaagtaaccaaactaatagaagatagcactttatccaaatctgtgaagaatgctatagatacagacagattattagattggctagttgaaaactcagttctgtcgattgcactggaaggcaacatagaccaagcacaatactgtgaccgtataaagggaattattgaactcttgggtagtaaattgtcgttagatgaactcactaaaatttggaagatacagtcaggacaatcatctactgtgattgagaacattcatactattattgctgcagcggctgtgaaatttaattcagatcagcttaatcatttgtttgttctcattcagaagagctgggagactgagagtgatagagtaagacagaagcttttgagcctgattggacgaataggccgggaagctcgctttgagaccacttctggaaaggttttagacgtactctgggaactggctcaccttccaaccctgcccagtagccttattcagcaggccttggaggagcacctgacaatccttagtgatgcatatgcagtgaaagaagcaatcaagaggagctacatcatcaagtgcatagaagatattaagagg

SEQ ID NO: 5993 - DNA, 1195 bp, Homo sapiens
acgccgcctgggtcccagtccccgtcccatcccccggcggcctaggcagcgtttccagccccgagaactttgttctttttgtcccgccccctgcgcccaaccgcctgcgccgccttccggcccgagttctggagactcaacatgaagctaccggccagggttttctttactctggggtcccggctgccctgtggcctcgctcctcggaggtttttcagttatgggacaaaaatattatatcaaaacactgaagctttgcaatctaaattcttttcacctcttcaaaaagcgatgctaccacctaatagttttcaaggaaaagtggcattcattactgggggaggtactggccttggtaaaggaatgacaactcttctgtccagcctaggtgctcagtgcgtgatagccagccggaagatggatgttttgaaagctaccgcagaacaaatttcttctcaaactggaaataaggttcatgcaattcagtgtgatgtgagggatcctgatatggttcaaaacactgtgtcagaactgatcaaagttgcaggacatcctaatattgtgataaacaatgcagcagggaattttatttctcctactgaaagactttctcctaatgcttggaaaaccataactgacatagttctaaatggcacagccttcgtgacactagaaattggaaaacaactaattaaagcacagaaaggagcagcatttctttctattactactatctatgctgagactggttcaggttttgtagtaccaagtgcttctgccaaagcaggtgtggaagccatgagcaagtctcttgcagctgaatggggtaaatatggaatgcgattcaatgtgattcaaccagggcctataaaaaccaaaggtgcctttagccgtctggacccaactggaacatttgagaaagaaatgattggcagaattccctgtggtcgcmtggggactgtagaagaactcgcaaatcttgctgctttcctttgtagtgattatgcttcttggattaatggagcagtcattaaatttgacggtggagaggaagtacttatttcaggggaattcaacgacctgagaaaggtcaccaaggagcagtgggacaccatagaagaactcatcaggaagacaaawggttcctaaraccactttggccttcatctatttcaagtctaataaattcttaatt

SEQ ID NO: 5994 - DNA, 1344 bp, Homo sapiens
acgccgcctgggtcccagtccccgtcccatcccccggcggcctaggcagcgtttccagccccgagaactttgttctttttgtcccgccccctgcgcccaaccgcctgcgccgccttccggcccgagttctggagactcaacatgaagctaccggccagggttttctttactctggggtcccggctgccctgtggcctcgctcctcggaggtttttcagttatgggacaaaaatattatatcaaaacactgaagctttgcaatctaaattcttttcacctcttcaaaaagcgatgctaccacctaatagttttcaaggaaaagtggcattcattactgggggaggtactggccttggtaaaggaatgacaactcttctgtccagcctaggtgctcagtgcgtgatagccagccggaagatggatgttttgaaagctaccgcagaacaaatttcttctcaaactggaaataaggttcatgcaattcagtgtgatgtgagggatcctgatatggttcaaaacactgtgtcagaactgatcaaagttgcaggacatcctaatattgtgataaacaatgcagcagggaattttatttctcctactgaaagactttctcctaatgcttggaaaaccataactgacatagttctaaatggcacagccttcgtgacactagaaattggaaaacaactaattaaagcacagaaaggagcagcatttctttctattactactatctatgctgagactggttcaggttttgtagtaccaagtgcttctgccaaagcaggtgtggaagccatgagcaagtctcttgcagctgaatggggtaaatatggaatgcgattcaatgtgattcaaccagggcctataaaaaccaaaggtgcctttagccgtctggacccaactggaacatttgagaaagaaatgattggcagaattccctgtggtcgcmtggggactgtagaagaactcgcaaatcttgctgctttcctttgtagtgattatgcttcttggattaatggagcagtcattaaatttgacggtggagaggaagtacttatttcaggggaattcaacgacctgagaaaggtcaccaaggagcagtgggacaccatagaagaactcatcaggaagacaaawggttcctaaraccactttggccttcatcttggttacagaaaagggaatagaaatgaaacaaattatctctcatcttttgactatttcaagtctaataaattcttaattaacaaamattcattgaatatgtattatgtgccaggccagtgatagccattgtatattcaaagataaataaaatgaaatatagtccttcaaaacatt

SEQ ID NO: 5995 - DNA, 675 bp, Homo sapiens
atgtccctgagacaccatggtgaaaatgaaggccagagtaaacgagttggctgtattgggttcctggtcaccaaggctgcttttaactctggcaaagtgtatattgtcaccaccaatgaccccatcattgacctcaactacatggtctacatgttcccttctcattccacctatggcaagttccatggcaccattaaggctgagaatgggaagtttgttatcaatggaaatcccattgccatctcccaggagcgagatcctaccaaaatcaaatggggtgattccggcattgattatgttgtggagtccactggtgtcttcactgccatggggaaggctaggactcattttcagggggtggggggagccaaaagggtcatcwtctctgccccctctgctgatggccccaagtttgtgatggacataaaccatgagaaacctggcaaatatgatgacatcaagaaagtggagggccccctcaagggcatcctgggctacaatgagcaccaggttgtatcttttgactttaacagcaacactcaatattcaattttcgatgctggggttggcgtcaccttgaacgaccactttgtcaagctcatttcctgctatgacaatgaatttggctgcagcaacagggtggtggacctcatggtccacatagcctccaaggag

SEQ ID NO: 5996 - DNA, 2194 bp, Homo sapiens
atgacctgcttccttttcccaaagcagctttctaccatcaggtgcttggataatgtccaagatcttctggagagtgtatcccatgctgtggagcactctgtggaagccacgggtcctttagacagctcatcctrtgaggagcacttcttaactggcactgrttctgagaacaaggctctgtgccatccctcgtctgttgactccctctccaccagcgcagccacggaggaccacgtctccatgggaggatgggcagcaaggaaagccctcagggtcatcgagcatgtggagcaagtgctggccatcgagctccttgcagcctgccagggcatagagtttctacgtcccctgaaaacaaccactccgctggagaaggtctatgacctggtgcgctctgttgtaaggaaagcaaagtcggggatggagaaacattgccttattctattgttttctggccattccttgggaatgagcaaaaaggtttgggaagtagctgctccatacattgaaaaatacagaatggagcatattccagaatcaagacctctttctccaacagccttttcactgcaatttctgcacaagaaatccaccaaaatcccggagtctgaggacctttaatgggctttgtcatgaagtagcagatgagagggcagtcagtttagcacaaagcaatactaggctgaaggagagacctgagaactttcctaggtagatcaatccattgtatmattcagttcttctaaagcctacgttggttaggctgatggcagtattatagttgctaaattcagcactgtgttcctgttgtcgtggttcaagacccaccaggtattttcagattataaaacttttctttctttcttaacagtttcaacaggccactcactcttaagggtgagaagaataaccacaattgtatgtgcctgttttttactcttagcattagatgaattcaaatttggaaacagattgatagcaattttttctaaaaacattagacttttgttaacctttttttttttttttttaaatttgcttcaacaagctctccaccagttgactttctttggctaattttactttgcatgatatgccttaatatgccttcataaataaccattttaagtcataatttgtccttaagctgcttttttcttctattaattggatcatagtaaagagtagtcaatagggtcttcagctattaattgtagaggtgattaaaaccaacaaggagtttcatgtgcaaaggagataaggaatgaatataaagattgctatttgggtggctcttattaaactgtgtattttgtacttatcactacacgtatcccccaaatgcttacatgggagtttgaggttagtattttcacttccttggtgttagtactctattcacattcttattgtaaccttcctcatttcacagataaggaatctttggggattaaccaacctcctttctgtaatggtaatcattaaaataagtcctattgataaaggtcagatggagccctagagtgtattactgcatctatttttttccccgagaagataaaggaccttcagggatggcttaagtgtatctgtccagatgaaggatgggtcacatgacctcttggcttcccaagtctaagctctgtgactttgcaccagtgtgtgcatatatgtgcaaggcccttcaagtggtctgaaaccgtggctctaaaaaccacagctggtggagaggaggacagacacacttgccaccttgcctacctaattgccatctaaaatgggccgaacagtggatttcacaatagagttttcaccctttagatttacaacctgtcaggtggaaactgaagtgaaaactgctgcmcacagcaattcagggagcaaaaaatgtgctgaggagactgtttacctaaaggttgttcttggtgctattcyttgtcaaaatgtgaacacacacaaatgaggtttgtgcattgtcatccgtgggctgccattgagccagtaacccccagtggtctcatggtgctcttcgctccagtttggggaatgctggattctttcagcccctgcagccctccaggtcaaaatgacactttgtcactgagttttctacacagctctrttagtaactgacagcacacgccttcaagggaacttcaagggaaacatggaataaactaagtctcaattgcct

SEQ ID NO: 5997 - DNA, 3916 bp, Homo sapiens
gttttacagttgagtaatctcagataaagacaggaacatggtgtttataagctgcccttaatggcagagaacacagacagaaacgagggaagagagagaaattggggaccctgaagaaagggggccagcagcaggtaggtgccatcagggacamgaacagcacctcccagggtgggagaccccaggcctttctggcagcaggtctggatggaaagtggacaggaggctcacccgtctgcatcccctgctcctgcccctgctcggctacaaaaaccaaagggacagcagctgaccacaccccggtagccactcctgcataaagctctcccctcctgtgaccagctgaggacctcaggctgcagcggagccatgcccagatacacggtgcacgtacgtggggaatggctggcagtgccctgccaggacgcgcagctcactgtgggctggctgggccgggaggccgtgaggcgctatatcaagaataagcccgacaatggtggcttcacctccgtggatgacgcgcacttccttgtgcgccggtgcaagggcctgggcctgctggacaacgaggaccggctcgaggtggccctagagaacaacgagttcgtggaagtggttatagagggtgatgccatgtctcctgacttcattccatctcaaccagaaggagtttatctatacagcaagtaccgggagcctgaaaagtacatcgagttagatggagaccgtctgaccacggaggatctggtcaacttgggaaagggacgctacaaaataaagctcaccccaacwgctgagaagagggtgcagaaatccagggaggtcatagatagcatcataaaagagaaaacagttgtttayggtattactacaggttttgggaaatttgccagaactgtaattcctatcaataagctacaggagcttcaggtcaacttagtacgctcacattcttcaggtgttgggaaaccactaagtcctgagaggtgtcggatgctcttggctttaaggatcaatgtcttagccaaaggatacagtggcatttccctggagaccctcaaacaagtcatagaaatgtttaatgcctcctgcctgccctatgtcccagagaaaggaaccgttggtgccagtggagaccttgccccrctctctcatcttgctcttgggctagttggagaagggaagatgtggtctccgaagagtggctgggctgatgctaaatacgtgctagaagcccatggattgaaaccagttattttaaaaccaaaagagggcctggcactcatcaaygggacgcagatgatcacatccctgggctgtgaagctgtagagygagccagtgctattgcacggcaggctgacattgtggcagccctgacccttgaggtgctgaagggcaccaccaaagcctttgacactgacattcatgctcttcgacctcaccgtgggcaaattgaagttgcttttcggtttcggtcactcttggactcagatcaccacccatcagaaatagcagagagtcacaggttctgtgatcgcgtccaggatgcatacaccttgcgctgctgtccacaggtccatggtgtggtgaatgatacaatagcatttgtgaagaacatcattaccacagaactgaacagcgcaacagataatcctatggtctttgccaataggggagagacartttctggaggaaacttccatggtgaatacccagccaaagccctagactacttggccattggcatccatgaacttgctgcaatcagtgagagaagaatcgagcggctctgcaatccctccctcagtgagctgcctgccttcctggtggctgaaggtggtctgaactctgggttcatgatagctcactgcacggcagcagcccttgrttctgagaacaaggctctgtgccatccctcgtctgttgactccctctccaccagcgcagccacggaggaccacgtctccatgggaggatgggcagcaaggaaagccctcagggtcatcgagcatgtggagcaagtgctggccatcgagctccttgcagcctgccagggcatagagtttctacgtcccctgaaaacaaccactccgctggagaaggtctatgacctggtgcgctctgttgtaaggccctggataaaagatcgcttcatggccccggacatcgaggcagcccacaggctgctcctggagcagaaggtttgggaagtagctgctccatacattgaaaaatacagaatggagcatattccagaatcaagacctctttctccaacagccttttcactgcaatttctgcacaagaaatccaccaaaatcccggagtctgaggacctttaatgggctttgtcatgaagtagcagatgagagggcagtcagtttagcacaaagcaatactaggctgaaggagagacctgagaactttcctaggtagatcaatccattgtatmattcagttcttctaaagcctacgttggttaggctgatggcagtattatagttgctaaattcagcactgtgttcctgttgtcgtggttcaagacccaccaggtattttcagattataaaacttttctttctttcttaacagtttcaacaggccactcactcttaagggtgagaagaataaccacaattgtatgtgcctgttttttactcttagcattagatgaattcaaatttggaaacagattgatagcaattttttctaaaaacattagacttttgttaacctttttttttttttttttaaatttgcttcaacaagctctccaccagttgactttctttggctaattttactttgcatgatatgccttaatatgccttcataaataaccattttaagtcataatttgtccttaagctgcttttttcttctattaattggatcatagtaaagagtagtcaatagggtcttcagctattaattgtagaggtgattaaaaccaacaaggagtttcatgtgcaaaggagataaggaatgaatataaagattgctatttgggtggctcttattaaactgtgtattttgtacttatcactacacgtatcccccaaatgcttacatgggagtttgaggttagtattttcacttccttggtgttagtactctattcacattcttattgtaaccttcctcatttcacagataaggaatctttggggattaaccaacctcctttctgtaatggtaatcattaaaataagtcctattgataaaggtcagatggagccctagagtgtattactgcatctatttttttccccgagaagataaaggaccttcagggatggcttaagtgtatctgtccagatgaaggatgggtcacatgacctcttggcttcccaagtctaagctctgtgactttgcaccagtgtgtgcatatatgtgcaaggcccttcaagtggtctgaaaccgtggctctaaaaaccacagctggtggagaggaggacagacacacttgccaccttgcctacctaattgccatctaaaatgggccgaacagtggatttcacaatagagttttcaccctttagatttacaacctgtcaggtggaaactgaagtgaaaactgctgcmcacagcaattcagggagcaaaaaatgtgctgaggagactgtttacctaaaggttgttcttggtgctattcyttgtcaaaatgtgaacacacacaaatgaggtttgtgcattgtcatccgtgggctgccattgagccagtaacccccagtggtctcatggtgctcttcgctccagtttggggaatgctggattctttcagcccctgcagccctccaggtcaaaatgacactttgtcactgagttttctacacagctctrttagtaactgacagcacacgccttcaagggaacttcaagggaaacatggaataaactaagtctcaattgcct

SEQ ID NO: 5998 - DNA, 2153 bp, Homo sapiens
ccagccccggacagcgcaggctgcggcttttcgtcctccactgagtcctgccggtggcccgagcccggtggcctcccggcgaccctcrgcgcgaggcgacatggcargcggccacagcctcctgctggagaacgcgcagcaagtggtgytggtgtgcgcccgcggcgagcgcttcctggcgcgggatgcgctgcgcagcctggcggtgctggaaggcgccagcctggtggtgggcaaagatggatttataaaagctattggtcctgctgatgttattcaaagacagttttctggagaaacttttgaagaaataattgactgctctgggaaatgtatyctaccaggtttggtggatgcacacacacatccagtatgggctggtgaaagagttcacgaatttgcaatgaagttggcaggagccacctacatggaaattcaccaggccggaggagggatccactttaccgtggagcgcacgcgccaagccacagaggaggagctgttccgctccttgcagcaacggctccagtgcatgatgagggctggcaccacgctggtggagtgcaagagtggatatggcctcgacctggagaccgagctcaagatgctgcgcgtgattgagcgcgcccggcgggagctggacatcggcatctcggctacctactgcggggctcattcagtgcctaaaggaaaaactgctactgaagctgctgatgacatcatcaataaccacctcccaaagctgaaggaacttggcagaaatggggaaatacacgtggacaatatagacgtattttgtgagaaaggtgtctttgatctcgattccaccagaaggattcttcaacgtggaaaagatatagggttacagattaacttccatggggatgaactccacccgatgaaggctgctgagcttggggctgaactgggagcgcaggcaatcagccacctggaagaagtgagtgatgaaggcatcgttgccatggcaacggccaggtgctctgccatccttctgcccaccacagcctacatgctgagactgaaacaacctcgagccaggaagatgttagatgaaggagtaatagttgctctgggaagtgatttcaaccccaatgcatattgcttttcaatgccaatggtcatgcatctggcctgtgtaaacatgagaatgtccatgcctgaggccttggccgctgccaccatcaatgcagcttatgcactgggaaagtctcacacacacggatcgttggaagttggcaaacagggagatctcattatcatcaattcatcccgatgggagcatttgatttaccagttcggaggccatcatgaattaattgaatatgttatagctaaaggaaaactcatctataaaacatgatagatttgaaaagagaagactttttgactatatgaaataagtcaatatagttatattaaaagttaaaacaccttaatatttacaagaattatatcacttaaacctaaatgtacttcaatgtctttttaagtcactcaaaaaacccaagggatagatttattttcatttaacacatgcatttgacatataaacaggtaaacctattgtgattaaaatcacaaaacatccaattagttcacaaatattggttacaaatattctgtagattaatatggtggggtatcacaaaaatgcctttgtggggtaagtgatacgccccaatgaagctaaaatatagccttctgttaagcaaatagtatttcctttccccaagtagttcattttctagatgcttgtcaaatgaattaatgtcctctgatgaagagtgtccttccgtttctaaggtcttctcaatctcagcaatagagcttcccagcagcgttcaagacacatcatttatacacaggcacaggggccttcctgaaatgggtgcatttttaccaactamaatcatgtaatttttttggaaattttttaaaattttygattctttacattacaattgggtgaaacacattttacagctctcaataaatgtttgctgtcgctcttattgttgttgtttcctttcagcctggaagtagatcagcagcgttgtctattagagtttttaggaaattacaaaattatttgtaaagagtcgataattatttacatataaatgggtgttttt

SEQ ID NO: 5999 - DNA, 2250 bp, Homo sapiens
ccagccccggacagcgcaggctgcggcttttcgtcctccactgagtcctgccggtggcccgagcccggtggcctcccggcgaccctcrgcgcgaggcgacatggcargcggccacagcctcctgctggagaacgcgcagcaagtggtgytggtgtgcgcccgcggcgagcgcttcctggcgcgggatgcgctgcgcagcctggcggtgctggaaggcgccagcctggtggtgggcaaagatggatttataaaagctattggtcctgctgatgttattcaaagacagttttctggagaaacttttgaagaaataattgactgctctgggaaatgtatyctaccaggtttggtggatgcacacacacatccagtatgggctggtgaaagagttcacgaatttgcaatgaagttggcaggagccacctacatggaaattcaccaggccggaggagggatccactttaccgtggagcgcacgcgccaagccacagaggaggagctgttccgctccttgcagcaacggctccagtgcatgatgagggctggcaccacgctggtggagtgcaagagtggatatggcctcgacctggagaccgagctcaagatgctgcgcgtgattgagcgcgcccggcgggagctggacatcggcatctcggctacctactgcggggctcattcagtgcctaaaggaaaaactgctactgaagctgctgatgacatcatcaataaccacctcccaaagctgaaggaacttggcagaaatggggaaatacacgtggacaatatagacgtattttgtgagaaaggtgtctttgatctcgattccaccagaaggattcttcaacgtggaaaagatatagggttacagattaacttccatggggatgaactccacccgatgaaggctgctgagcttggggctgaactgggagcgcaggcaatcagccacctggaagaagtgagtgatgaaggcatcgttgccatggcaacggccaggtgctctgccatccttctgcccaccacagcctacatgctgagactgaaacaacctcgagccaggaagatgttagatgaaggagtaatagttgctctgggaagtgatttcaaccccaatgcatattgcttttcaatgccaatggtcatgcatctggcctgtgtaaacatgagaatgtccatgcctgaggccttggccgctgccaccatcaatgcagcttatgcactgggaaagtctcacacacacggatcgttggaagttggcaaacagggagatctcattatcatcaattcatcccgatgggagcatttgatttaccagttcggaggccatcatgaattaattgaatatgttatagctaaaggaaaactcatctataaaacatgatagatttgaaaagagaagactttttgactatatgaaataagtcaatatagttatattaaaagttaaaacaccttaatatttacaagaattatatcacttaaacctaaatgtacttcaatgtctttttaagtcactcaaaaaacccaagggatagatttattttcatttaacacatgcatttgacatataaacaggtaaacctattgtgattaaaatcacaaaacatccaattagttcacaaatattggttacaaatattctgtagattaatatggtggggtatcacaaaaatgcctttgtggggaaaagtaggcttggcttaaaatttccattttgtgtctgtatttcacatctcagtttttaaactatatttagtgaacattgagggatcgaaagaaatctaagtgatacgccccaatgaagctaaaatatagccttctgttaagcaaatagtatttcctttccccaagtagttcattttctagatgcttgtcaaatgaattaatgtcctctgatgaagagtgtccttccgtttctaaggtcttctcaatctcagcaatagagcttcccagcagcgttcaagacacatcatttatacacaggcacaggggccttcctgaaatgggtgcatttttaccaactamaatcatgtaatttttttggaaattttttaaaattttygattctttacattacaattgggtgaaacacattttacagctctcaataaatgtttgctgtcgctcttattgttgttgtttcctttcagcctggaagtagatcagcagcgttgtctattagagtttttaggaaattacaaaattatttgtaaagagtcgataattatttacatataaatgggtgttttt

SEQ ID NO: 6000 - DNA, 2043 bp, Homo sapiens
caaagacaaaataatttactagggaagcccttactaacgacccaacatccagacacaggtgagggagaagaaatttcctgacagccgaagagcaacaagtatcatgatggggtgctggattttgaatgagggtctctccaccatattagtactctcatggctgggaataaatttttatctgtttattgacacgttctactggtatgaagaggaggagtctttccattacacacgagttattttgggttcaacactggcttgggcacgagcatccgcactgtgcctgaattttaactgcatgctaattctaatacctgtcagtmgaaaccttatttcattcataagaggaacaagtatttgctgcagaggaccrtggaggaggcaattagacaaaaacctcagatttcacaaactggtcgcctatgggatagctgttaatgcaaccatccacatcgtggcgcatttcttcaacctggaacgctaccactggagccagtccgaggaggcccagggacttctggccgcactttccaagctgggcaacacccctaacgagagctacctcaaccctgtccggaccttccccacaaacacaaccactgaattgctaaggacaatagcaggcgtcaccggtctggtgatctctctggctttagtcttgatcatgacctcgtcaactgagttcatcagacaggcctcctatgagttgttctggtacacacaccatgttttcatcgtcttctttctcagcctggccatccatgggacgggtcggattgttcgaggccaaacccaagacagtctctctctgcacaacatcaccttctgtagagaccgctatgcagaatggcagacagtggcccaatgccccgtgcctcaattttctggcaaggaaccctcggcttggaaatggattttaggccctgtggtcttgtatgcatgtgaaagaataattaggttctggcgatttcaacaagaagttgtcattaccaaggtggtaagccacccctctggagtcctggaacttcacatgaaaaagcgtggctttaaaatggcgccagggcagtacatcttggtgcagtgcccagccatatcttcgctggagtggcaccccttcacccttacctctgccccccargargactttttcagcgtgcacatccgggcagcaggagactggacagcagcgctactggaggcctttggggcagagggacaggccctccaggagccctggagcctgccaaggctggcagtggacgggccctttggaactgccctgacagatgtatttcactacccagtgtgtgtgtgcgttgccgcggggatcggagtcactcccttcgctgctcttctgaaatctatatggtacaaatgcagtgaggcacagaccccactgaagctgagcaaggtgtatttctactggatttgccgggatgcaagagcttttgagtggtttgctgatctcttactctccctggaaacacggatgagtgagcaggggaaaactcactttctgagttatcatatatttcttaccggctgggatgaaaatcaggctcttcacatagctttacactgggacgaaaatactgacgtgattacaggcttaaagcagaagaccttctatgggaggcccaactggaacaatgagttcaagcagattgcctacaatcaccccagcagcagtattggcgtgttcttctgtggacctaaagctctctcgaggacacttcaaaagatgtgccacttgtattcatcagctgaccccagaggtgttcatttctattacaacaaggagagcttctagactttggaggtcaagtccaggcattgtgttttcaatcaagttattgattccaaagaactccaccaggaattcctgtgacggcctgttgatatgagctcccagttgggaactggtgaataataattaactattgtgaacagtacactataccatacttccttagcttataaataacatgtcatatacaacagaacaaaaacatttactgaaattaaaatatattatgtttctca

SEQ ID NO: 6001 - DNA, 3920 bp, Homo sapiens
tgcgccgagcggccctgcgcgcagtgaggcagtggcgggggaaggcaccggtggggccgacgggcgggttgaaggagggaagcgggcgagcgaagtcccagtgcgcgccgcggcagcccgggcaccctccccttccgggcgtgagtcgctgtgaaaagagctgaagcgagcggactcgcaccggcagcgaggcgccgctcccgccgcctcagcccggccttcctcggctccggcgctccggtcgcggggagaactcaacaaaaatccagtggaaggcttttctgcaggtttaatagatgacaatgatctctaccgatgggaagtccttattattggccctccagatacactttagtggtgtttttaaggctcatcttactttcccaaaagattatcccctccgacctcctaaaatgaaattcattacagaaatctggcacccaaatgttgataaaaatggtgatgtgtgcatttctattcttcatgagcctggggaagataagtatggttatgaaaagccagaggaacgctggctccctatccacactgtggaaaccatcatgattagtgtcatttctatgctggcagaccctaatggagactcacctgctaatgttgatgctgcgaaagaatggagggaagatagaaatggagaatttaaaagaaaagttgcccgctgtgtaagaaaaagccaagagactgcttttgagtgacatttatttagcagctagtaacttcacttatttcagggtctccaattgagaaacatggcactgtttttcctgcactctacccacctattgctggacttctgttgtacaagttggcaaacactggctggaactgggctgcaataaaacatgccagttatcaatgctgacaagagcctaacaagtgccaacttacagatgattacgcattttgaattctaatgaactgttttaaccttcaggaagaattgtaaagacctgtacatagcacaacwtgatccggataatatatatactgttcatgtacatccacaaatacaccttgtaccaaataatgctttcttgtagtagaataagaatcgtgtaaattctaagagattttagcaggttttctttcctattcattgtttcttatcagtttaaaaggattcctttaagcatgtcagatgaaaagcaattaggattaaaagtttccatttaatttcccttaaacccttgaggcttcattaaactcttttcacttactaaacttttgtatcttctttgttttgacacactcccctttgcttttatctcttacctgccagaatgttctcaaatgatttagttcaaatactgaaatacttaatgagcaattacttgatttttaatgatgacttcgaaggagtcatcactaggtgctttgtcctttttgtattctagttgcacccacctcttggattggatatagcaataacatttattggccgttgtgagctcttgatcccagtcattacccctgagaactaaaaatagatggttcttaattcaacttactgaaaatttccccaaacaatagcaaatctgacttttccctcttcagttgcctggtattaaggttggataaatgaagcatgcacagctacaggctttctacttaacttctgggtttgctattacaaatcctatttactctcatacccttctccttagtccttcatatttctctgcctctattcttctatactgcagatttttctcacctattgtacaaagaaattgcgatgtatattttcatgtaatttgattttggaattctgtcaccttatgtagtgagttcttccaaaatataattttttttcaataattgtcaagttgttggcttttattgtattgaatgaaggctataatactgagtgccagagaagtggtttaggaaaatctcaggttgattccttatgcaaatgaacttttaatacttgaaaatcacatggccatggcagtatatgtatttggttctatctagattcttctgtgaatctaaaagcattacaggggtaaatgctttgctatttgacgtatagatcccgtcactaacaatagtacacttggatgtgattaatgtttgagcttcaatatatttcatatcatacagttttctaaaacaacttcagcaaatggtaaaatgaacatgtgcagtgttaaaggcaggccttaggctccttcatgtttgttgtgaggttgtgtgtgggaagtagtctttggcttataagggatagaacttgagacagtagcagatgggacatggtgtttgattgtgagaatcagtgagaattcgtgcatctctgctctgtggggtttggagaaatgctttggcagaagagtgaaagaactcctgccaagagcccagacctctacaaacgttgtatgtccttttttaagcagaaataaaatggttgaggatgtagtcacagtagagagtgatttttttctaagtccctgtcctctactctgaagcgttataaaaacctgtaaacattatacaaacccacaaaccttatagaaactcgtaagtgtgttgtgactggaaattgattcattagaacccagttttctttaagaactttgtgacttggttttttttttccttttccaaagactgtaaaaatagttgccccaaaatgtcagcactgcacaccctccagggacttggaatacaatcctttttacttttttttttttttttttaagaaactgggtctctctgtcacccaggctggagtgcagtggcaacgatcatagctaactgcagctttgacctcctgggctcaagtgatcctcctgcctcagcctcctgagtagctaggactacaggtgtatgccaccatgcctggctaatacaaaaaaattcttttaagagatgggatccctcccttttaaaatcagaacttgttcacatggtggttgcttgtggcaaaacggagttcaaattttgctctcctattgctataattctgctagcaatctgttgaggtgaaacttgggatctgactcttcagcaagcagcaaatgacctagtaactcagggacaactatttttgaactttaagtgccactttaatgcagttagtttgataaaaccatgtgggttttttttttagggctagctctacgggagtggaaktgagagccaggcatgagtgcgtctccacatgcttttccacctgccctgagtgtgttacatactgaaacaggcctacatagatgttacaacttcccttcctctgtcggagatgtcatctgtgcctttctcagtgttcatctgataatgtaaatttaaatgcctctacatttgatacgaaacccacattcaggtgacactgaacgaggtggcttttgtcccaccagtgcctcatcagtgtgaggcgattcctctctgctttaatcttatggattgtagaactgttggctgtttcctaaatttattccaagttctcgtagaggcatatagatttcagtctgtgcttgtatgggatagatgatctgagtggctttctggcctcttttttgagtttaaaatccatatgaggttgacktgtcatactaaggtaacatgtttgtgagattttatttgatatgcccactcaccctcgacgaatctgcccgctttgggctgtggtgcctgtgtatctttgcccgtctggtctccagttggtggaattaccttttttgtactgccacttctcagcatctttgaaatttgacataatgttgcttcatttcagtttttttagttctgtaatttgttgattgtatttaactatgtgagttctgttgtgatgtttactgtattgtaaagcacctcattcatgtgatgagtgctctatraatcaataaatgatgacttagaggctgtatcacgagctattttggttttaggatgcaggtctc

SEQ ID NO: 6002 - DNA, 3813 bp, Homo sapiens
agtcggcagtctcagcgcgcctgcgccgagcggccctgcgcgcagtgaggcagtggcgggggaaggcaccggtggggccgacgggcgggttgaaggagggaagcgggcgagcgaagtcccagtgcgcgccgcggcagcccgggcaccctccccttccgggcgtgagtcgctgtgaaaagagctgaagcgagcggactcgcaccggcagcgaggcgccgctcccgccgcctcagcccggccttcctcggctccggcgctccggtcgcggggcccgggttcctcggcacaccccgctccagccgcccccagagcctgtccccagcccttcggaagccccggcgccagcccgggccctcggcagggaggatgacggagctgcagtcggcactgctactgcgaagacagctggcagaactcaacaaaaatccagtggaaggcttttctgcaggtttaatagatgacaatgatctctaccgatgggaagtccttattattggccctccagatacactttatgaaggtggtgtttttaaggctcatcttactttcccaaaagattatcccctccgacctcctaaaatgaaattcattacagaaatctggcacccaaatgttgataaaaatggtgatgtgtgcatttctattcttcatgagcctggggaagataagtatggttatgaaaagccagaggaacgctggctccctatccacactgtggaaaccatcatgattagtgtcatttctatgctggcagaccctaatggagactcacctgctaatgttgatgctgcgaaagaatggagggaagatagaaatggagaatttaaaagaaaagttgcccgctgtgtaagaaaaagccaagagactgcttttgagtgacatttatttagcagctagtaacttcacttatttcagggtctccaattgagaaacatggcactgtttttcctgcactctacccacctattgctggacttctgttgtacaagttggcaaacactggctggaactgggctgcaataaaacatgccagttatcaatgctgacaagagcctaacaagtgccaacttacagatgattacgcattttgaattctaatgaactgttttaaccttcaggaagaattgtaaagacctgtacatagcacaacwtgatccggataatatatatactgttcatgtacatccacaaatacaccttgtaccaaataatgctttcttgtagtagaataagaatcgtgtaaattctaagagattttagcaggttttctttcctattcattgtttcttatcagtttaaaaggattcctttaagcatgtcagatgaaaagcaattaggattaaaagtttccatttaatttcccttaaacccttgaggcttcattaaactcttttcacttactaaacttttgtatcttctttgttttgacacactcccctttgcttttatctcttacctgccagaatgttctcaaatgatttagttcaaatactgaaatacttaatgagcaattacttgatttttaatgatgacttcgaaggagtcatcactaggtgctttgtcctttttgtattctagttgcacccacctcttggattggatatagcaataacatttattggccgttgtgagctcttgatcccagtcattacccctgagaactaaaaatagatggttcttaattcaacttactgaaaatttccccaaacaatagcaaatctgacttttccctcttcagttgcctggtattaaggttggataaatgaagcatgcacagctacaggctttctacttaacttctgggtttgctattacaaatcctatttactctcatacccttctccttagtccttcatatttctctgcctctattcttctatactgcagatttttctcacctattgtacaaagaaattgcgatgtatattttcatgtaatttgattttggaattctgtcaccttatgtagtgagttcttccaaaatataattttttttcaataattgtcaagttgttggcttttattgtattgaatgaaggctataatactgagtgccagagaagtggtttaggaaaatctcaggttgattccttatgcaaatgaacttttaatacttgaaaatcacatggccatggcagtatatgtatttggttctatctagattcttctgtgaatctaaaagcattacaggggtaaatgctttgctatttgacgtatagatcccgtcactaacaatagtacacttggatgtgattaatgtttgagcttcaatatatttcatatcatacagttttctaaaacaacttcagcaaatggtaaaatgaacatgtgcagtgttaaaggcaggccttaggctccttcatgtttgttgtgaggttgtgtgtgggaagtagtctttggcttataagggatagaacttgagacagtagcagatgggacatggtgtttgattgtgagaatcagtgagaattcgtgcatctctgctctgtggggtttggagaaatgctttggcagaagagtgaaagaactcctgccaagagcccagacctctacaaacgttgtatgtccttttttaagcagaaataaaatggttgaggatgtagtcacagtagagagtgatttttttctaagtccctgtcctctactctgaagcgttataaaaacctgtaaacattatacaaacccacaaaccttatagaaactcgtaagtgtgttgtgactggaaattgattcattagaacccagttttctttaagaactttgtgacttggttttttttttccttttccaaagactgtaaaaatagttgccccaaaatgtcagcactgcacaccctccagggacttggaatacaatcctttttacttttttttttttttttttaagaaactgggtctctctgtcacccaggctggagtgcagtggcaacgatcatagctaactgcagctttgacctcctgggctcaagtgatcctcctgcctcagcctcctgagtagctaggactacaggtgtatgccaccatgcctggctaatacaaaaaaattcttttaagagatgggatccctcccttttaaaatcagaacttgttcacatggtggttgcttgtggcaaaacggagttcaaattttgctctcctattgctataattctgctagcaatctgttgaggtgaaacttgggatctgactcttcagcaagcagcaaatgacctagtaactcagggacaactatttttgaactttaagtgccactttaatgcagttagtttgataaaaccatgtgggttttttttttagggctagctctacgggagtggaaktgagagccaggcatgagtgcgtctccacatgcttttccacctgccctgagtgtgttacatactgaaacaggcctacatagatgttacaacttcccttcctctgtcggagatgtcatctgtgcctttctcagtgttcatctgataatgtaaatttaaatgcctctacatttgatacgaaacccacattcaggtgacactgaacgaggtggcttttgtcccaccagtgcctcatcagtgtgaggcgattcctctctgctttaggaaaatgatttttccccctaaacttgtgccaaccatcaacaacatctccatagatcttatggattgtagaactgttggctgtttcctaaatttattccaagttctcgtagaggcatatagatttcagtctgtgcttgtatgggatagatgatctgagtggctttctggcctcttttttgagtttaaaatccatatgaggttgacktgtcatactaaggtaacatgtttgtgag

SEQ ID NO: 6003 - DNA, 1206 bp, Homo sapiens
agtcggcagtctcagcgcgcctgcgccgagcggccctgcgcgcagtgaggcagtggcgggggaaggcaccggtggggccgacgggcgggttgaaggagggaagcgggcgagcgaagtcccagtgcgcgccgcggcagcccgggcaccctccccttccgggcgtgagtcgctgtgaaaagagctgaagcgagcggactcgcaccggcagcgaggcgccgctcccgccgcctcagcccggccttcctcggctccggcgctccggtcgcggggcccgggttcctcggcacaccccgctccagccgcccccagagcctgtccccagcccttcggaagccccggcgccagcccgggccctcggcagggaggatgacggagctgcagtcggcactgctactgcgaagacagctggcagaactcaacaaaaatccagtggaaggcttttctgcaggtttaatagatgacaatgatctctaccgatgggaagtccttattattggccctccagatacactttatgaaggtggtgtttttaaggctcatcttactttcccaaaagattatcccctccgacctcctaaaatgaaattcattacagaaatctggcacccaaatgttgataaaaatggtgatgtgtgcatttctattcttcatgagcctggggaagataagtatggttatgaaaagccagaggaacgctggctccctatccacactgtggaaaccatcatgattagtgtcatttctatgctggcagaccctaatggagactcacctgctaatgttgatgctgcgaaagaatggagggaagatagaaatggagaatttaaaagaaaagttgcccgctgtgtaagaaaaagccaagagactgcttttgagtttactattgcttttcttcataattttaccaaatttkcatgtttaaacaatgtatttcatgattttgaactgtttatatgtggaatgataatgaatgcattcttctgttacttttattgctcaatattcttcaaattgatctgtgttgcaaataggtacatttcacctgtgtgctattacactgggtaaattaccgctctactccttattctcattgcagttattttctgaattggtgtaggggtgtttgttctttttctgttatagagggtggctatccttgtttcctgatttgcatgtactgtaagaggttctctagggtatatactt

SEQ ID NO: 6004 - DNA, 4086 bp, Homo sapiens
agtcggcagtctcagcgcgcctgcgccgagcggccctgcgcgcagtgaggcagtggcgggggaaggcaccggtggggccgacgggcgggttgaaggagggaagcgggcgagcgaagtcccagtgcgcgccgcggcagcccgggcaccctccccttccgggcgtgagtcgctgtgaaaagagctgaagcgagcggactcgcaccggcagcgaggcgccgctcccgccgcctcagcccggccttcctcggctccggcgctccggtcgcggggcccgggttcctcggcacaccccgctccagccgcccccagagcctgtccccagcccttcggaagccccggcgccagcccgggccctcggcagggaggatgacggagctgcagtcggcactgctactgcgaagacagctggcagaactcaacaaaaatccagtggaaggcttttctgcaggtttaatagatgacaatgatctctaccgatgggaagtccttattattggccctccagatacactttatgaaggtggtgtttttaaggctcatcttactttcccaaaagattatcccctccgacctcctaaaatgaaattcattacagaaatctggcacccaaatgttgataaaaatggtgatgtgtgcatttctattcttcatgagcctggggaagataagtatggttatgaaaagccagaggaacgctggctccctatccacactgtggaaaccatcatgattagtgtcatttctatgctggcagaccctaatggagactcacctgctaatgttgatgctgcgaaagaatggagggaagatagaaatggagaatttaaaagaaaagttgcccgctgtgtaagaaaaagccaagagactgcttttgagtgacatttatttagcagctagtaacttcacttatttcagggtctccaattgagaaacatggcactgtttttcctgcactctacccacctattgctggacttctgttgtacaagttggcaaacactggctggaactgggctgcaataaaacatgccagttatcaatgctgacaagagcctaacaagtgccaacttacagatgattacgcattttgaattctaatgaactgttttaaccttcaggaagaattgtaaagacctgtacatagcacaacwtgatccggataatatatatactgttcatgtacatccacaaatacaccttgtaccaaataatgctttcttgtagtagaataagaatcgtgtaaattctaagagattttagcaggttttctttcctattcattgtttcttatcagtttaaaaggattcctttaagcatgtcagatgaaaagcaattaggattaaaagtttccatttaatttcccttaaacccttgaggcttcattaaactcttttcacttactaaacttttgtatcttctttgttttgacacactcccctttgcttttatctcttacctgccagaatgttctcaaatgatttagttcaaatactgaaatacttaatgagcaattacttgatttttaatgatgacttcgaaggagtcatcactaggtgctttgtcctttttgtattctagttgcacccacctcttggattggatatagcaataacatttattggccgttgtgagctcttgatcccagtcattacccctgagaactaaaaatagatggttcttaattcaacttactgaaaatttccccaaacaatagcaaatctgacttttccctcttcagttgcctggtattaaggttggataaatgaagcatgcacagctacaggctttctacttaacttctgggtttgctattacaaatcctatttactctcatacccttctccttagtccttcatatttctctgcctctattcttctatactgcagatttttctcacctattgtacaaagaaattgcgatgtatattttcatgtaatttgattttggaattctgtcaccttatgtagtgagttcttccaaaatataattttttttcaataattgtcaagttgttggcttttattgtattgaatgaaggctataatactgagtgccagagaagtggtttaggaaaatctcaggttgattccttatgcaaatgaacttttaatacttgaaaatcacatggccatggcagtatatgtatttggttctatctagattcttctgtgaatctaaaagcattacaggggtaaatgctttgctatttgacgtatagatcccgtcactaacaatagtacacttggatgtgattaatgtttgagcttcaatatatttcatatcatacagttttctaaaacaacttcagcaaatggtaaaatgaacatgtgcagtgttaaaggcaggccttaggctccttcatgtttgttgtgaggttgtgtgtgggaagtagtctttggcttataagggatagaacttgagacagtagcagatgggacatggtgtttgattgtgagaatcagtgagaattcgtgcatctctgctctgtggggtttggagaaatgctttggcagaagagtgaaagaactcctgccaagagcccagacctctacaaacgttgtatgtccttttttaagcagaaataaaatggttgaggatgtagtcacagtagagagtgatttttttctaagtccctgtcctctactctgaagcgttataaaaacctgtaaacattatacaaacccacaaaccttatagaaactcgtaagtgtgttgtgactggaaattgattcattagaacccagttttctttaagaactttgtgacttggttttttttttccttttccaaagactgtaaaaatagttgccccaaaatgtcagcactgcacaccctccagggacttggaatacaatcctttttacttttttttttttttttttaagaaactgggtctctctgtcacccaggctggagtgcagtggcaacgatcatagctaactgcagctttgacctcctgggctcaagtgatcctcctgcctcagcctcctgagtagctaggactacaggtgtatgccaccatgcctggctaatacaaaaaaattcttttaagagatgggatccctcccttttaaaatcagaacttgttcacatggtggttgcttgtggcaaaacggagttcaaattttgctctcctattgctataattctgctagcaatctgttgaggtgaaacttgggatctgactcttcagcaagcagcaaatgacctagtaactcagggacaactatttttgaactttaagtgccactttaatgcagttagtttgataaaaccatgtgggttttttttttagggctagctctacgggagtggaaktgagagccaggcatgagtgcgtctccacatgcttttccacctgccctgagtgtgttacatactgaaacaggcctacatagatgttacaacttcccttcctctgtcggagatgtcatctgtgcctttctcagtgttcatctgataatgtaaatttaaatgcctctacatttgatacgaaacccacattcaggtgacactgaacgaggtggcttttgtcccaccagtgcctcatcagtgtgaggcgattcctctctgctttaatcttatggattgtagaactgttggctgtttcctaaatttattccaagttctcgtagaggcatatagatttcagtctgtgcttgtatgggatagatgatctgagtggctttctggcctcttttttgagtttaaaatccatatgaggttgacktgtcatactaaggtaacatgtttgtgagattttatttgatatgcccactcaccctcgacgaatctgcccgctttgggctgtggtgcctgtgtatctttgcccgtctggtctccagttggtggaattaccttttttgtactgccacttctcagcatctttgaaatttgacataatgttgcttcatttcagtttttttagttctgtaatttgttgattgtatttaactatgtgagttctgttgtgatgtttactgtattgtaaagcacctcattcatgtgatgagtgctctatraatcaataaatgatgacttagaggctgtatcacgagctattttggttttaggatgcaggtctc

SEQ ID NO: 6005 - DNA, 3198 bp, Homo sapiens
cagcatcctggcgcgggccggggccgccgccgccactgccgtcgggtaaggtcccagcacggacatggcctcgcgcggcgcccgcccgggcccgagtcccccgcgccccgctttgtagccccccggcggagaggcggcctcgacggtgcggacggcgcagacggccgggcgggcggcatggaggcggcgcayctgctcccggccgccgacgtgctgcgccacttctcggtgacagccgagggcggcctgagcccggcgcaggtgaccggcgcgcgggagcgctacggccccaacgagctcccgagtgaggaagggaagtccctgtgggagctggtgctggaacagtttgaggacctcctggtgcgcatcctgctgctggctgcccttgtctcctttgtcctggcctggttcgaggagggcgaggagaccacgaccgccttcgtggagcccctggtcatcatgctgatcctcgtggccaacgccattgtgggcgtgtggcargaacgcaacgccgagagtgccatcgaggccctgaaggagtatgagcctgagatgggcaaggtgatccgctcggaccgcaagggcgtgcagaggatccgtgcccgggacatcgtcccaggggacattgtagaagtggcagtgggggacaaagtgcctgctgacctccgcctcatcgagatcaagtccaccacgctgcgagtggaccagtccatcctgacgggtgaatctgtgtccgtgaccaagcacacagaggccatcccagaccccagagctgtgaaccaggacaagaagaacatgctgttttctggcaccaatatcacatcgggcaaagcggtgggtgtggccgtggccaccggcctgcacacggagctgggcaagatccggagccagatggcggcagtcgagcccgagcggacgccgctgcagcgcaagctggacgagtttggacggcagctgtcccacgccatctctgtgatctgcgtggccgtgtgggtcatcaacatcggccacttcgccgacccggcccacggtggctcctggctgcgyggcgctgtctactacttcaagatcgccgtggccytggcggtggcggccatccccgagggcctcccggctgtcatcactacatgcctggcactgggcacgcggcgcatggcacgcaagaacgccatcgtgcgaagcctgccgtccgtggagaccctgggctgcacctcagtcatctgctccgacaagacgggcacgctcaccaccaatcagatgtctgtctgccggatgttcgtggtagccgaggccgatgcgggctcctgccttttgcacgagttcaccatctcgggtaccacgtatacccccgagggcgaagtgcggcagggggatcagcctgtgcgctgcggccagttcgacgggctggtggagctggcgaccatctgcgccctgtgcaacgactcggckctggactacaacgaggccaagggtgtgtaygagaaggtgggagaggccacggagacagctctgacttgcctggtggagaagatgaaygtgttcgacaccracctgcaggctctgtcccgggtggagcgagctggcgcctgtaacacgggggctcctgagagtgtgatcgagcgctgtagctcagtccgcgtggggagccgcacagcacccctgacccccacctccagggagcagatcctggcaaagatccgggattggggctcaggctcagacacgctgcgctgcctggcactggccacccgggacgcscccccaaggaaggaggacatggagctggacgactgcagcaagtttgtgcagtacgagacggacctgaccttcgtgggctgcgtaggcatgctggacccgccgcgacctgaggtggctgcctgcatcacacgctgctaccaggcgggcatccgcgtggtcatgatcacrggggataacaaaggcactgccgtggccatctgccgcaggcttggcatctttggggacacggaagacrtggcgggcaaggcctacacgggccgcgagtttgatgacctcagccccgagcagcagcgccaggcctgccgcaccgccygctgcttcgcccgcgtggagcccgcacacaagtcccrcatcgtggagaacctgcagtcctttaacgagatcactgctatgacyggcgatggagtgaacgacgcaccagccctgaagaaagcagagatcggcatcgccatgggctcaggcacggccgtggccaagtcggcggcagagatggtgctgtcagatgacaactttgcctccatcgtggctgcggtggaggagggccgggccmtctacagcaacatgaagcaattcatccgctacctcatctcctccaatgttggcgaggtcgtctgcatcttcctcacggcaattctgggcctgcccgaagccctgatccctgtgcagctgctctgggtgaacctggtgacagayggcctacctgccacggctctgggcttcaacccgccagacctggacatcatrgagaagctgccccggagcccccgagaagccctcatcagtggctggctcttcttccgatacctggctatcggagtgtacgtaggcctggccacagtggctgccgccacctggtggtttgtgtatgacgccgagggacctcacatcaacttctaccagctgaggaacttcctgaagtgctccgaagacaacccgctctttgccggcatcgactgtgaggtgttcgagtcacgcttccccaccaccatggccttgtccgtgctcgtgaccattgaaatgtgcaatgccctcaacagcgtctcrgagaaccagtcgctgctgcggatgccgccctggatgaacccctggctgctggtggctgtggccatgtccatggccctgcacttcctcatcctgctcgtgccgcccctgcctctcattttccaggtgaccccactgagcgggcgccagtgggtggtggtgctccagatatctctgcctgtcatcctgctggatgaggccctcaagtacctgtcccggaaccacatgcacgcctgtctttatccaggccttctcaggacagtctcgcaggcctggagtaggcagccgctgaccacctcttggaccccagaccacaccgggttggcctctttgggccagggacacagcatcgtctcgctgtcagagctgctcagagagggaggaagcaggggtgagctc

SEQ ID NO: 6006 - DNA, 1386 bp, Homo sapiens
cagcatcctggcgcgggccggggccgccgccgccactgccgtcgggtaaggtcccagcacggacatggcctcgcgcggcgcccgcccgggcccgagtcccccgcgccccgctttgtagccccccggcggagaggcggcctcgacggtgcggacggcgcagacggccgggcgggcggcatggaggcggcgcayctgctcccggccgccgacgtgctgcgccacttctcggtgacagccgagggcggcctgagcccggcgcaggtgaccggcgcgcgggagcgctacggccccaacgagctcccgagtgaggaagggaagtccctgtgggagctggtgctggaacagtttgaggacctcctggtgcgcatcctgctgctggctgcccttgtctcctttgtcctggcctggttcgaggagggcgaggagaccacgaccgccttcgtggagcccctggtcatcatgctgatcctcgtggccaacgccattgtgggcgtgtggcargaacgcaacgccgagagtgccatcgaggccctgaaggagtatgagcctgagatgggcaaggtgatccgctcggaccgcaagggcgtgcagaggatccgtgcccgggacatcgtcccaggggacattgtagaagtggcagtgggggacaaagtgcctgctgacctccgcctcatcgagatcaagtccaccacgctgcgagtggaccagtccatcctgacgggtgaatctgtgtccgtgaccaagcacacagaggccatcccagaccccagagctgtgaaccaggacaagaagaacatgctgttttctggcaccaatatcacatcgggcaaagcggtgggtgtggccgtggccaccggcctgcacacggagctgggcaagatccggagccagatggcggcagtcgagcccgagcggacgccgctgcagcgcaagctggacgagtttggacggcagctgtcccacgccatctctgtgatctgcgtggccgtgtgggtcatcaacatcggccacttcgccgacccggcccacggtggctcctggctgcgyggcgctgtctactacttcaagatcgccgtggccytggcggtggcggccatccccgagggcctcccggctgtcatcactacatgcctggcactgggcacgcggcgcatggcacgcaagaacgccatcgtgcgaagcctgccgtccgtggagaccctgggctgcacctcaccccgcgcgcctcctggactcagggttccccgtcctgagctcgggagatgttcagagtcacactgccgcccggtctgccacgcagaggtccaacttgccacccgcgtccctggtacctgagaccaccgacatcctcaggttcctgaccgtggcgcccttctacccagccca

SEQ ID NO: 6007 - DNA, 4706 bp, Homo sapiens
cagcatcctggcgcgggccggggccgccgccgccactgccgtcgggtaaggtcccagcacggacatggcctcgcgcggcgcccgcccgggcccgagtcccccgcgccccgctttgtagccccccggcggagaggcggcctcgacggtgcggacggcgcagacggccgggcgggcggcatggaggcggcgcayctgctcccggccgccgacgtgctgcgccacttctcggtgacagccgagggcggcctgagcccggcgcaggtgaccggcgcgcgggagcgctacggccccaacgggaagtccctgtgggagctggtgctggaacagtttgaggacctcctggtgcgcatcctgctgctggctgcccttgtctcctttgtcctggcctggttcgaggagggcgaggagaccacgaccgccttcgtggagcccctggtcatcatgctgatcctcgtggccaacgccattgtgggcgtgtggcargaacgcaacgccgagagtgccatcgaggccctgaaggagtatgagcctgagatgggcaaggtgatccgctcggaccgcaagggcgtgcagaggatccgtgcccgggacatcgtcccaggggacattgtagaagtggcagtgggggacaaagtgcctgctgacctccgcctcatcgagatcaagtccaccacgctgcgagtggaccagtccatcctgacgggtgaatctgtgtccgtgaccaagcacacagaggccatcccagaccccagagctgtgaaccaggacaagaagaacatgctgttttctggcaccaatatcacatcgggcaaagcggtgggtgtggccgtggccaccggcctgcacacggagctgggcaagatccggagccagatggcggcagtcgagcccgagcggacgccgctgcagcgcaagctggacgagtttggacggcagctgtcccacgccatctctgtgatctgcgtggccgtgtgggtcatcaacatcggccacttcgccgacccggcccacggtggctcctggctgcgyggcgctgtctactacttcaagatcgccgtggccytggcggtggcggccatccccgagggcctcccggctgtcatcactacatgcctggcactgggcacgcggcgcatggcacgcaagaacgccatcgtgcgaagcctgccgtccgtggagaccctgggctgcacctcagtcatctgctccgacaagacgggcacgctcaccaccaatcagatgtctgtctgccggatgttcgtggtagccgaggccgatgcgggctcctgccttttgcacgagttcaccatctcgggtaccacgtatacccccgagggcgaagtgcggcagggggatcagcctgtgcgctgcggccagttcgacgggctggtggagctggcgaccatctgcgccctgtgcaacgactcggckctggactacaacgaggccaagggtgtgtaygagaaggtgggagaggccacggagacagctctgacttgcctggtggagaagatgaaygtgttcgacaccracctgcaggctctgtcccgggtggagcgagctggcgcctgtaacacggtcatcaagcagctgatgcggaaggagttcaccctggagttctcccgagaccggaaatccatgtccgtgtactgcacgcccacccgccctcaccctacyggccagggcagcaagatgtttgtgaagggggctcctgagagtgtgatcgagcgctgtagctcagtccgcgtggggagccgcacagcacccctgacccccacctccagggagcagatcctggcaaagatccgggattggggctcaggctcagacacgctgcgctgcctggcactggccacccgggacgcscccccaaggaaggaggacatggagctggacgactgcagcaagtttgtgcagtacgagacggacctgaccttcgtgggctgcgtaggcatgctggacccgccgcgacctgaggtggctgcctgcatcacacgctgctaccaggcgggcatccgcgtggtcatgatcacrggggataacaaaggcactgccgtggccatctgccgcaggcttggcatctttggggacacggaagacrtggcgggcaaggcctacacgggccgcgagtttgatgacctcagccccgagcagcagcgccaggcctgccgcaccgccygctgcttcgcccgcgtggagcccgcacacaagtcccrcatcgtggagaacctgcagtcctttaacgagatcactgctatgacyggcgatggagtgaacgacgcaccagccctgaagaaagcagagatcggcatcgccatgggctcaggcacggccgtggccaagtcggcggcagagatggtgctgtcagatgacaactttgcctccatcgtggctgcggtggaggagggccgggccmtctacagcaacatgaagcaattcatccgctacctcatctcctccaatgttggcgaggtcgtctgcatcttcctcacggcaattctgggcctgcccgaagccctgatccctgtgcagctgctctgggtgaacctggtgacagayggcctacctgccacggctctgggcttcaacccgccagacctggacatcatrgagaagctgccccggagcccccgagaagccctcatcagtggctggctcttcttccgatacctggctatcggagtgtacgtaggcctggccacagtggctgccgccacctggtggtttgtgtatgacgccgagggacctcacatcaacttctaccagctgaggaacttcctgaagtgctccgaagacaacccgctctttgccggcatcgactgtgaggtgttcgagtcacgcttccccaccaccatggccttgtccgtgctcgtgaccattgaaatgtgcaatgccctcaacagcgtctcrgagaaccagtcgctgctgcggatgccgccctggatgaacccctggctgctggtggctgtggccatgtccatggccctgcacttcctcatcctgctcgtgccgcccctgcctctcattttccaggtgaccccactgagcgggcgccagtgggtggtggtgctccagatatctctgcctgtcatcctgctggatgaggccctcaagtacctgtcccggaaccacatgcacgaagaaatgagccagaagtgagcgctgggaacagrgtggagtctccggtgtgtacctcagactgatggtgcccatgtgttcgcctccgccccccacccttgccaccacactcgcccacttgcccaccgggtcccgccggataaatgacaggcccgaggtcagaatggccatccccgggccccgtcctggggtctctgtccccacttccttctggcctgggaggtctgtaattcctgtctcctggactctcctgggaagttccctgctctgcagctctggcccaggagctgcaggctgggagggggcagccaagaagccggagctggcagcatacccagagatccggggcccccccacccccaaatcacgagtgcagctggagcttgctcccccttgttcggaagctggacgttcacttggtgactggtgcctctgcactgacggaggactctgggggtccttcttaccggctctgacctctctcttcgtgcctggtctgggactgggtcagccctgggggatcagaaggggccatctgggcccagctgtgtacagcgagggtgggcagccccctccactccactctgcttccacaaagtcggctcccgagagctcgaggctgcttctgtttatatgtgcagggccygggssggtgaagggtcagagagacggacacaaggagccggcaggagggcggagcgaggatgtcctttcccgggagacaagtcgggaaagcctggctggactgcctcagccccgcgcgcctcctggactcagggttccccgtcctgagctcgggagatgttcagagtcacactgccgcccggtctgccacgcagaggtccaacttgccacccgcgtccctggtacctgagaccaccgacatcctcaggttcctgaccgtggcgcccttctacccagcccagtgtgcggccgccgcgctgtctgcacagctgggggcctctgagcctggtgggcttcctggactcttggcctcactccttgccccctccccacgacacccatgagccgaaaggatgtcactaaggatggctgattccccaagggcacccgctctccctccctccctgctggaggaacacgtcatatcagatgagaggaagatggcctctgatggacagaatttttctcttaactcagcttttgctactttggcaaaaactagcgaggggtagcagaaacctgcaccaaggattgtccctatgtcttggccmctcctagagcgtgtgcagactgatgattttatatgtaaatcaagactcacatccctttcctagtcccccacatccaaagcccctcagcctgccttgcagaccaatgggctccatgttctgtagccccctcccctacgcctcacccctcctccctctcacaggttctgggcggccagtgagagaaacgcagtgggggaggcagggagtctggtgcctgcagagattctctgcttctttcctggggggaggtggggaggtcttagcaggagcgggccctgtacccacctgctgacctgctgtttggtagagaaataaaggttgtgtgactggggg

SEQ ID NO: 6008 - DNA, 4725 bp, Homo sapiens
cagcatcctggcgcgggccggggccgccgccgccactgccgtcgggtaaggtcccagcacggacatggcctcgcgcggcgcccgcccgggcccgagtcccccgcgccccgctttgtagccccccggcggagaggcggcctcgacggtgcggacggcgcagacggccgggcgggcggcatggaggcggcgcayctgctcccggccgccgacgtgctgcgccacttctcggtgacagccgagggcggcctgagcccggcgcaggtgaccggcgcgcgggagcgctacggccccaacgacatgacccccgttcccagggaagtccctgtgggagctggtgctggaacagtttgaggacctcctggtgcgcatcctgctgctggctgcccttgtctcctttgtcctggcctggttcgaggagggcgaggagaccacgaccgccttcgtggagcccctggtcatcatgctgatcctcgtggccaacgccattgtgggcgtgtggcargaacgcaacgccgagagtgccatcgaggccctgaaggagtatgagcctgagatgggcaaggtgatccgctcggaccgcaagggcgtgcagaggatccgtgcccgggacatcgtcccaggggacattgtagaagtggcagtgggggacaaagtgcctgctgacctccgcctcatcgagatcaagtccaccacgctgcgagtggaccagtccatcctgacgggtgaatctgtgtccgtgaccaagcacacagaggccatcccagaccccagagctgtgaaccaggacaagaagaacatgctgttttctggcaccaatatcacatcgggcaaagcggtgggtgtggccgtggccaccggcctgcacacggagctgggcaagatccggagccagatggcggcagtcgagcccgagcggacgccgctgcagcgcaagctggacgagtttggacggcagctgtcccacgccatctctgtgatctgcgtggccgtgtgggtcatcaacatcggccacttcgccgacccggcccacggtggctcctggctgcgyggcgctgtctactacttcaagatcgccgtggccytggcggtggcggccatccccgagggcctcccggctgtcatcactacatgcctggcactgggcacgcggcgcatggcacgcaagaacgccatcgtgcgaagcctgccgtccgtggagaccctgggctgcacctcagtcatctgctccgacaagacgggcacgctcaccaccaatcagatgtctgtctgccggatgttcgtggtagccgaggccgatgcgggctcctgccttttgcacgagttcaccatctcgggtaccacgtatacccccgagggcgaagtgcggcagggggatcagcctgtgcgctgcggccagttcgacgggctggtggagctggcgaccatctgcgccctgtgcaacgactcggckctggactacaacgaggccaagggtgtgtaygagaaggtgggagaggccacggagacagctctgacttgcctggtggagaagatgaaygtgttcgacaccracctgcaggctctgtcccgggtggagcgagctggcgcctgtaacacggtcatcaagcagctgatgcggaaggagttcaccctggagttctcccgagaccggaaatccatgtccgtgtactgcacgcccacccgccctcaccctacyggccagggcagcaagatgtttgtgaagggggctcctgagagtgtgatcgagcgctgtagctcagtccgcgtggggagccgcacagcacccctgacccccacctccagggagcagatcctggcaaagatccgggattggggctcaggctcagacacgctgcgctgcctggcactggccacccgggacgcscccccaaggaaggaggacatggagctggacgactgcagcaagtttgtgcagtacgagacggacctgaccttcgtgggctgcgtaggcatgctggacccgccgcgacctgaggtggctgcctgcatcacacgctgctaccaggcgggcatccgcgtggtcatgatcacrggggataacaaaggcactgccgtggccatctgccgcaggcttggcatctttggggacacggaagacrtggcgggcaaggcctacacgggccgcgagtttgatgacctcagccccgagcagcagcgccaggcctgccgcaccgccygctgcttcgcccgcgtggagcccgcacacaagtcccrcatcgtggagaacctgcagtcctttaacgagatcactgctatgacyggcgatggagtgaacgacgcaccagccctgaagaaagcagagatcggcatcgccatgggctcaggcacggccgtggccaagtcggcggcagagatggtgctgtcagatgacaactttgcctccatcgtggctgcggtggaggagggccgggccmtctacagcaacatgaagcaattcatccgctacctcatctcctccaatgttggcgaggtcgtctgcatcttcctcacggcaattctgggcctgcccgaagccctgatccctgtgcagctgctctgggtgaacctggtgacagayggcctacctgccacggctctgggcttcaacccgccagacctggacatcatrgagaagctgccccggagcccccgagaagccctcatcagtggctggctcttcttccgatacctggctatcggagtgtacgtaggcctggccacagtggctgccgccacctggtggtttgtgtatgacgccgagggacctcacatcaacttctaccagctgaggaacttcctgaagtgctccgaagacaacccgctctttgccggcatcgactgtgaggtgttcgagtcacgcttccccaccaccatggccttgtccgtgctcgtgaccattgaaatgtgcaatgccctcaacagcgtctcrgagaaccagtcgctgctgcggatgccgccctggatgaacccctggctgctggtggctgtggccatgtccatggccctgcacttcctcatcctgctcgtgccgcccctgcctctcattttccaggtgaccccactgagcgggcgccagtgggtggtggtgctccagatatctctgcctgtcatcctgctggatgaggccctcaagtacctgtcccggaaccacatgcacgaagaaatgagccagaagtgagcgctgggaacagrgtggagtctccggtgtgtacctcagactgatggtgcccatgtgttcgcctccgccccccacccttgccaccacactcgcccacttgcccaccgggtcccgccggataaatgacaggcccgaggtcagaatggccatccccgggccccgtcctggggtctctgtccccacttccttctggcctgggaggtctgtaattcctgtctcctggactctcctgggaagttccctgctctgcagctctggcccaggagctgcaggctgggagggggcagccaagaagccggagctggcagcatacccagagatccggggcccccccacccccaaatcacgagtgcagctggagcttgctcccccttgttcggaagctggacgttcacttggtgactggtgcctctgcactgacggaggactctgggggtccttcttaccggctctgacctctctcttcgtgcctggtctgggactgggtcagccctgggggatcagaaggggccatctgggcccagctgtgtacagcgagggtgggcagccccctccactccactctgcttccacaaagtcggctcccgagagctcgaggctgcttctgtttatatgtgcagggccygggssggtgaagggtcagagagacggacacaaggagccggcaggagggcggagcgaggatgtcctttcccgggagacaagtcgggaaagcctggctggactgcctcagccccgcgcgcctcctggactcagggttccccgtcctgagctcgggagatgttcagagtcacactgccgcccggtctgccacgcagaggtccaacttgccacccgcgtccctggtacctgagaccaccgacatcctcaggttcctgaccgtggcgcccttctacccagcccagtgtgcggccgccgcgctgtctgcacagctgggggcctctgagcctggtgggcttcctggactcttggcctcactccttgccccctccccacgacacccatgagccgaaaggatgtcactaaggatggctgattccccaagggcacccgctctccctccctccctgctggaggaacacgtcatatcagatgagaggaagatggcctctgatggacagaatttttctcttaactcagcttttgctactttggcaaaaactagcgaggggtagcagaaacctgcaccaaggattgtccctatgtcttggccmctcctagagcgtgtgcagactgatgattttatatgtaaatcaagactcacatccctttcctagtcccccacatccaaagcccctcagcctgccttgcagaccaatgggctccatgttctgtagccccctcccctacgcctcacccctcctccctctcacaggttctgggcggccagtgagagaaacgcagtgggggaggcagggagtctggtgcctgcagagattctctgcttctttcctggggggaggtggggaggtcttagcaggagcgggccctgtacccacctgctgacctgctgtttggtagagaaataaaggttgtgtgactggggg

SEQ ID NO: 6009 - DNA, 4812 bp, Homo sapiens
cagcatcctggcgcgggccggggccgccgccgccactgccgtcgggtaaggtcccagcacggacatggcctcgcgcggcgcccgcccgggcccgagtcccccgcgccccgctttgtagccccccggcggagaggcggcctcgacggtgcggacggcgcagacggccgggcgggcggcatggaggcggcgcayctgctcccggccgccgacgtgctgcgccacttctcggtgacagccgagggcggcctgagcccggcgcaggtgaccggcgcgcgggagcgctacggccccaacgagctcccgagtgaggaagggaagtccctgtgggagctggtgctggaacagtttgaggacctcctggtgcgcatcctgctgctggctgcccttgtctcctttgtcctggcctggttcgaggagggcgaggagaccacgaccgccttcgtggagcccctggtcatcatgctgatcctcgtggccaacgccattgtgggcgtgtggcargaacgcaacgccgagagtgccatcgaggccctgaaggagtatgagcctgagatgggcaaggtgatccgctcggaccgcaagggcgtgcagaggatccgtgcccgggacatcgtcccaggggacattgtagaagtggcagtgggggacaaagtgcctgctgacctccgcctcatcgagatcaagtccaccacgctgcgagtggaccagtccatcctgacgggtgaatctgtgtccgtgaccaagcacacagaggccatcccagaccccagagctgtgaaccaggacaagaagaacatgctgttttctggcaccaatatcacatcgggcaaagcggtgggtgtggccgtggccaccggcctgcacacggagctgggcaagatccggagccagatggcggcagtcgagcccgagcggacgccgctgcagcgcaagctggacgagtttggacggcagctgtcccacgccatctctgtgatctgcgtggccgtgtgggtcatcaacatcggccacttcgccgacccggcccacggtggctcctggctgcgyggcgctgtctactacttcaagatcgccgtggccytggcggtggcggccatccccgagggcctcccggctgtcatcactacatgcctggcactgggcacgcggcgcatggcacgcaagaacgccatcgtgcgaagcctgccgtccgtggagaccctgggctgcacctcagtcatctgctccgacaagacgggcacgctcaccaccaatcagatgtctgtctgccggatgttcgtggtagccgaggccgatgcgggctcctgccttttgcacgagttcaccatctcgggtaccacgtatacccccgagggcgaagtgcggcagggggatcagcctgtgcgctgcggccagttcgacgggctggtggagctggcgaccatctgcgccctgtgcaacgactcggckctggactacaacgaggccaagggtgtgtaygagaaggtgggagaggccacggagacagctctgacttgcctggtggagaagatgaaygtgttcgacaccracctgcaggctctgtcccgggtggagcgagctggcgcctgtaacacggtcatcaagcagctgatgcggaaggagttcaccctggagttctcccgagaccggaaatccatgtccgtgtactgcacgcccacccgccctcaccctacyggccagggcagcaagatgtttgtgaagggggctcctgagagtgtgatcgagcgctgtagctcagtccgcgtggggagccgcacagcacccctgacccccacctccagggagcagatcctggcaaagatccgggattggggctcaggctcagacacgctgcgctgcctggcactggccacccgggacgcscccccaaggaaggaggacatggagctggacgactgcagcaagtttgtgcagtacgagacggacctgaccttcgtgggctgcgtaggcatgctggacccgccgcgacctgaggtggctgcctgcatcacacgctgctaccaggcgggcatccgcgtggtcatgatcacrggggataacaaaggcactgccgtggccatctgccgcaggcttggcatctttggggacacggaagacrtggcgggcaaggcctacacgggccgcgagtttgatgacctcagccccgagcagcagcgccaggcctgccgcaccgccygctgcttcgcccgcgtggagcccgcacacaagtcccrcatcgtggagaacctgcagtcctttaacgagatcactgctatgacyggcgatggagtgaacgacgcaccagccctgaagaaagcagagatcggcatcgccatgggctcaggcacggccgtggccaagtcggcggcagagatggtgctgtcagatgacaactttgcctccatcgtggctgcggtggaggagggccgggccmtctacagcaacatgaagcaattcatccgctacctcatctcctccaatgttggcgaggtcgtctgcatcttcctcacggcaattctgggcctgcccgaagccctgatccctgtgcagctgctctgggtgaacctggtgacagayggcctacctgccacggctctgggcttcaacccgccagacctggacatcatrgagaagctgccccggagcccccgagaagccctcatcagtggctggctcttcttccgatacctggctatcggagtgtacgtaggcctggccacagtggctgccgccacctggtggtttgtgtatgacgccgagggacctcacatcaacttctaccagctgaggaacttcctgaagtgctccgaagacaacccgctctttgccggcatcgactgtgaggtgttcgagtcacgcttccccaccaccatggccttgtccgtgctcgtgaccattgaaatgtgcaatgccctcaacagcgtctcrgagaaccagtcgctgctgcggatgccgccctggatgaacccctggctgctggtggctgtggccatgtccatggccctgcacttcctcatcctgctcgtgccgcccctgcctctcattttccaggtgaccccactgagcgggcgccagtgggtggtggtgctccagatatctctgcctgtcatcctgctggatgaggccctcaagtacctgtcccggaaccacatgcacgcctgtctttatccaggccttctcaggacagtctcgcaggcctggagtaggcagccgctgaccacctcttggaccccagaccacaccggaagaaatgagccagaagtgagcgctgggaacagrgtggagtctccggtgtgtacctcagactgatggtgcccatgtgttcgcctccgccccccacccttgccaccacactcgcccacttgcccaccgggtcccgccggataaatgacaggcccgaggtcagaatggccatccccgggccccgtcctggggtctctgtccccacttccttctggcctgggaggtctgtaattcctgtctcctggactctcctgggaagttccctgctctgcagctctggcccaggagctgcaggctgggagggggcagccaagaagccggagctggcagcatacccagagatccggggcccccccacccccaaatcacgagtgcagctggagcttgctcccccttgttcggaagctggacgttcacttggtgactggtgcctctgcactgacggaggactctgggggtccttcttaccggctctgacctctctcttcgtgcctggtctgggactgggtcagccctgggggatcagaaggggccatctgggcccagctgtgtacagcgagggtgggcagccccctccactccactctgcttccacaaagtcggctcccgagagctcgaggctgcttctgtttatatgtgcagggccygggssggtgaagggtcagagagacggacacaaggagccggcaggagggcggagcgaggatgtcctttcccgggagacaagtcgggaaagcctggctggactgcctcagccccgcgcgcctcctggactcagggttccccgtcctgagctcgggagatgttcagagtcacactgccgcccggtctgccacgcagaggtccaacttgccacccgcgtccctggtacctgagaccaccgacatcctcaggttcctgaccgtggcgcccttctacccagcccagtgtgcggccgccgcgctgtctgcacagctgggggcctctgagcctggtgggcttcctggactcttggcctcactccttgccccctccccacgacacccatgagccgaaaggatgtcactaaggatggctgattccccaagggcacccgctctccctccctccctgctggaggaacacgtcatatcagatgagaggaagatggcctctgatggacagaatttttctcttaactcagcttttgctactttggcaaaaactagcgaggggtagcagaaacctgcaccaaggattgtccctatgtcttggccmctcctagagcgtgtgcagactgatgattttatatgtaaatcaagactcacatccctttcctagtcccccacatccaaagcccctcagcctgccttgcagaccaatgggctccatgttctgtagccccctcccctacgcctcacccctcctccctctcacaggttctgggcggccagtgagagaaacgcagtgggggaggcagggagtctggtgcctgcagagattctctgcttctttcctggggggaggtggggaggtcttagcaggagcgggccctgtacccacctgctgacctgctgtttggtagagaaataaaggttgtgtgactggggg

SEQ ID NO: 6010 - DNA, 1479 bp, Homo sapiens
ggagacgaggtctatgttgcccaagctggtcctgaactcctgggctcaagtaatcctcctgcctcagcctcccaaattgctgggattacaaacctgagccaccgtgcccaacctgacagttttcactacaaattcttttgtactttttcaacttactgtatgcatataatcatttttaaatggtacttttattcttttactttaaacctgtcatgtttctaaaatgaatgagaaatgcttattattctttcaaaattacataatatctctaggcagagtttctaaaagtatttagaattctgatattgcatgaaacggctagggcaggcgagcgcagtggagtgccgcgcggtgcggtgcgggcggcagagttggggtgtcatggaggatgagcggagcttttcggatatctgcggtggccgcctggccctgcagcgccgctactacttcccttcctgccgggaattctgcctcagctgccctgggctctcgctgcgttcgctcaccgctgtcacctgcacggtgtggctggcagcctacggactcttcaccctctgcgagaacagcatgatcctctctgctgccatcttcatcaccctcttaggtctgcttggttatctccattttgtgaagattgatcaggagactgttaatcattgattcccttggcattcagatgacttcatcttatgcttcaggctaagaaagcactaccttcatagaaatgggcaaggtcaaggatattgtcatcaatgaggctatttacatgcagaaggtgatttactacctctgcatcttattgaaggatccagtggaaccacatgggatatcccaagtagtacccgtcttccagagtgccaagccccggctggactgcttgactgaagtatacaggagctgccaggggatcctggcacaccagaaagccacatcaacaagcccatgagccccagcgttcagaaggccagcatygtcttccatgggagatgactcttaagccataagggttggttttccgtactccaaaccatcaggtggacacagtcctaggaaccattatggatatagtgcatctcagagccatagagcaggtgactggaaatctaactcagtatatttccacgtattatagtgttttccttgtaaggttttgcctactttaccaaaggaggggagaccttaagaattttgacacagtatgtcaaaagtaatgtcagcaaagaacattgggaaattgctaagcatgttcaggtttactttgttgatgtttgtgaagcaaaacaatgggaaactgacatyagatgtcttgagaaagctatattttccattagtgccccttgtgtaaagttacaaaaaaaacaagccctccaggaactggttagcaggaagaaatgtcctacaaaagacgagtctctcaacctagcgcctgtgttctgtacagggcttatttactcttaataaacagatatccttccaaaa

SEQ ID NO: 6011 - DNA, 1548 bp, Homo sapiens
gaaacggcgcccgccgcccgcccggagcccgcgagcaaccccagtcccccccacccgcgcgtggcggcgccggctccctagccaccgcggccccaccctcttccggcctcagctgtccgggctgctttcgcctccgcctgtggatgctgcgcctctccgaacgcaacatgaaggtgctccttgccgccgccctcatcgcggggtcmgtcttcttcctgctgctgccgggaccttctgcggccgatgagaagaagaaggggcccaaagtcaccgtcaaggtgtattttgacctacgaattggagatgaagatgtaggccgggtgatctttggtctcttcggaaagactgttccaaaaacagtggataattttgtggccttagctacaggagagaaaggatttggctacaaaaacagcaaattccatcgtgtaatcaaggacttcatgatccagggcggagacttcacyaggggagatggcacaggaggaaagagcatctacggtgagcgcttccccgatgagaacttcaaactgaagcactacgggcctggctgggtgagcatggccaacgcaggcaaagacaccaacggctcccagttcttcatcacgacagtcaagacagcctggctagatggcaagcatgtggtgtttggcaaagttctagagggcatggaggtggtgcggaaggtggagagcaccaagacagacagccgggataaacccctgaaggatgtgatcatcgcagactgcggcaagatcgaggyggagaagccctttgccatcgccaaggagtagggcacagggacatctttcttwgagtgaccgtctgtgcaggccctgtagtccgccacagggctytsagctgcactggccycggtgctggcatytggtggagcggamccmctcccctcacattccacaggcccatggactcacttttgtaacaaactcctaccaacmctgaccaataaaaaaaaatgtgggttttttttttttttaatatataatgtgtgggcctggttcttgagcctgcagcacctcccctaggcctacatcccaacatgcctgcaactctcctgtggcaatgggtgcctgccccttccctgggatcctgcctgaaattttgacccaggagctacccaggaaaagtcaggcaggagcttttgccccctgcttctaaactttgccagctactgggcctccacatttgctccccttgccaccaccctccagtytatgttaagggatgtatctgtactttttcatagcctacctytaaattgattttttttttttttttggtagagacaggtctcactatgttgcgctggctggtctcaaacttccagacccaagcatcctcctgccttggcctcctaaagtattgggattacaggcatgagcctctgcacccagctgacttcttcctttattatttatttattttgagacggagtttcactcttgttgcccaggctggagtgcagtggcgcgatctcggctcaccacaacttccgcctcctggcttcaagagattctcctgccttgg

SEQ ID NO: 6012 - DNA, 1598 bp, Homo sapiens
gaaacggcgcccgccgcccgcccggagcccgcgagcaaccccagtcccccccacccgcgcgtggcggcgccggctccctagccaccgcggccccaccctcttccggcctcagctgtccgggctgctttcgcctccgcctgtggatgctgcgcctctccgaacgcaacatgaaggtgctccttgccgccgccctcatcgcggggtcmgtcttcttcctgctgctgccgggaccttctgcggccgatgagaagaagaaggggcccaaagtcaccgtcaaggtgtattttgacctacgaattggagatgaagatgtaggccgggtgatctttggtctcttcggaaagactgttccaaaaacagtggataattttgtggccttagctacaggagagaaaggatttggctacaaaaacagcaaattccatcgtgtaatcaaggacttcatgatccagggcggagacttcacyaggggagatggcacaggaggaaagagcatctacggtgagcgcttccccgatgagaacttcaaactgaagcactacgggcctggctgggtgagcatggccaacgcaggcaaagacaccaacggctcccagttcttcatcacgacagtcaagacagcctggctagatggcaagcatgtggtgtttggcaaagttctagagggcatggaggtggtgcggaaggtggagagcaccaagacagacagccgggataaacccctgaaggatgtgatcatcgcagactgcggcaagatcgaggyggagaagccctttgccatcgccaaggagtagggcacagggacatctttcttwgagtgaccgtctgtgcaggccctgtagtccgccacagggctytsagctgcactggccycggtgctggcatytggtggagcggamccmctcccctcacattccacaggcccatggactcacttttgtaacaaactcctaccaacmctgaccaataaaaaaaaatgtgggttttttttttttttaatatataatgtgtgggcctggttcttgagcctgcagcacctcccctaggcctacatcccaacatgcctgcaactctcctgtggcaatgggtgcctgccccttccctgggatcctgcctgaaattttgacccaggagctacccaggaaaagtcaggcaggagcttttgccccctgcttctaaactttgccagctactgggcctccacatttgctccccttgccaccaccctccagtytatgttaagggatgtatctgtactttttcatagcctacctytaaattgattttttttttttttttggtagagacaggtctcactatgttgcgctggctggtctcaaacttccagacccaagcatcctcctgccttggcctcctaaagtattgggattacaggcatgagcctctgcacccagctgacttcttcctttattatttatttattttgagacggagtttcactcttgttgcccaggctggagtgcagtggcgcgatctcggctcaccacaacttccgcctcctggcttcaagagattctcctgccttgggccgggcgcggtggctcacgcctgtaatcccagcactttgggaggccgag

SEQ ID NO: 6013 - DNA, 2428 bp, Homo sapiens
gccagtcagttggtctgggcactgcagcaggctcggctctgtcccagcacttgtctgggagaaaagtggtgttactcacccagggagagtctctctttctaccttccttctttctcgatctccttgtgtgcttttgtgtttctttatttcttttccttttttttctttttttttttttgttacttaattatattcctaatcctggatgaagttgctggattctgcagcacaagtcttcatgaacaagcagcaccgctcagagatttcacggcattcaaaggtcacagaactgccactatggttaaatgtcttgtttaatggttgagaggtgtggcgaaatcttgtttgagaaccccgatcagaatgccaaatgtgtttgcatgctgggagatatacgactaaggggtcagacgggggttcgtgctgaacgccgtggctcctacccattcattgacttccgcctacttaacagtacaacatactcaggggagattggcaccaagaaaaaggtgaaaagactattaagctttcaaagatacttccatgcatcaaggctgcttcgtggaattataccacaagcccctctgcacctgctggatgaagactaccttggacaagcaaggcatatgctctccaaagtgggaatgtgggattttgacattttcttgtttgatcgcttgacaaatggaaacagcctggtaacactgttgtgccacctcttcaatacccatggactcattcaccatttcaagttagatatggtgaccttacaccgatttttagtcatggttcaagaagattaccacagccaaaacccgtatcacaatgctgttcacgcagccgacgtcacccaggccatgcactgctacctgaaagagccaaagcttgccagcttcctcacrcctctggacatcatgcttggactgctggctgcagcagcacacgatgtggaccacccaggggtgaaccagccatttttgataaaaactaaccaccatcttgcaaacctatatcagaatatgtctgtgctggagaatcatcactggcgatctacaattggcatgcttcgagaatcaaggcttcttgctcatttgccaaaggaaatgacacaggatattgaacagcagctgggctccttgatcttggcaacagacatcaacaggcagaatgaatttttgaccagattgaaagctcacctccacaataaagacttaagactggaggatgcacaggacaggcactttatgcttcagatcgccttgaagtgtgctgacatttgcaatccttgtagaatctgggagatgagcaagcagtggagtgaaagggtctgtgaagaattctacaggcaaggkgaacttgaacagaaatttgaactggaaatcagtcctctttgtaatcaacagaaagattccatccctagtatacaaattggtttcatgagctacatcgtggagccgctcttccgggaatgggcccatttcacgggtaacagcaccctgtcggagaacatgctgggccacctcgcacacaacaaggcccagtggaagagcctgttgcccaggcagcacagaagcaggggcagcagtggcagcgggcctgaccacgaccacgcaggccaagggactgagagcgaggagcaggaaggcgacagcccctaggggccggcccarcttagacgcrgctctcctccggcagggcccycagagggcagaagcagcgtggaggggccctcacgcagcagcccagccactttctgagtgttgtcctggggctctttggaacgccatcttcctcccacttacctgcctcccctccttttcgcaaatgtacagaagccatttgtcacctcagcattcgctgccgaaatgagcaactccattcagtaacgtgggagctgatcccacgggcaggctctccctgctccaggagaagactaggaggaagaatgaggtgctcctgccgtgtccgccttgttccgggtcgcactggaacaggcagcaattcctaagtccggagcgtttgagcgtttgctatctgactgctgatctgcgtgacagaaacaccagcatatttgcaacgccaaggatattggtcttaagtgcaagagcacaaatgagagtgtgagagaaagtaccttctattttaataataatattattataaaaataataaatctttttaacttttatattttatgcactagacaatggatctgcaactttggactaaggtcattcaatgtacccaaacttgaacagggggttcattgttttgctattgactttattatgccactttggggcagagacttggcatcttcgcagtttaagaaaccacgtttcctatccaatccgaagggaaggtgctgtacagttcattcctttgcaccattagccaatctgtcttttatggattctgtgacatgttt

SEQ ID NO: 6014 - DNA, 2415 bp, Homo sapiens
gccagtcagttggtctgggcactgcagcaggctcggctctgtcccagcacttgtctgggagaaaagtggtgttactcacccagggagagtctctctttctaccttccttctttctcgatctccttgtgtgcttttgtgtttctttatttcttttccttttttttctttttttttttttgttacttaattatattcctaatcctggatgaagttgctggattctgcagcacaagtcttcatgaacaagcagcaccgctcagagatttcacggcattcaaaggtcacagaactgccactatggttaaatgtcttgtttaatggttgaggtatgtggcaatgttttcaagcctttgtttggattttctgttttctaggagatatacgactaaggggtcagacgggggttcgtgctgaacgccgtggctcctacccattcattgacttccgcctacttaacagtacaacatactcaggggagattggcaccaagaaaaaggtgaaaagactattaagctttcaaagatacttccatgcatcaaggctgcttcgtggaattataccacaagcccctctgcacctgctggatgaagactaccttggacaagcaaggcatatgctctccaaagtgggaatgtgggattttgacattttcttgtttgatcgcttgacaaatggaaacagcctggtaacactgttgtgccacctcttcaatacccatggactcattcaccatttcaagttagatatggtgaccttacaccgatttttagtcatggttcaagaagattaccacagccaaaacccgtatcacaatgctgttcacgcagccgacgtcacccaggccatgcactgctacctgaaagagccaaagcttgccagcttcctcacrcctctggacatcatgcttggactgctggctgcagcagcacacgatgtggaccacccaggggtgaaccagccatttttgataaaaactaaccaccatcttgcaaacctatatcagaatatgtctgtgctggagaatcatcactggcgatctacaattggcatgcttcgagaatcaaggcttcttgctcatttgccaaaggaaatgacacaggatattgaacagcagctgggctccttgatcttggcaacagacatcaacaggcagaatgaatttttgaccagattgaaagctcacctccacaataaagacttaagactggaggatgcacaggacaggcactttatgcttcagatcgccttgaagtgtgctgacatttgcaatccttgtagaatctgggagatgagcaagcagtggagtgaaagggtctgtgaagaattctacaggcaaggkgaacttgaacagaaatttgaactggaaatcagtcctctttgtaatcaacagaaagattccatccctagtatacaaattggtttcatgagctacatcgtggagccgctcttccgggaatgggcccatttcacgggtaacagcaccctgtcggagaacatgctgggccacctcgcacacaacaaggcccagtggaagagcctgttgcccaggcagcacagaagcaggggcagcagtggcagcgggcctgaccacgaccacgcaggccaagggactgagagcgaggagcaggaaggcgacagcccctaggggccggcccarcttagacgcrgctctcctccggcagggcccycagagggcagaagcagcgtggaggggccctcacgcagcagcccagccactttctgagtgttgtcctggggctctttggaacgccatcttcctcccacttacctgcctcccctccttttcgcaaatgtacagaagccatttgtcacctcagcattcgctgccgaaatgagcaactccattcagtaacgtgggagctgatcccacgggcaggctctccctgctccaggagaagactaggaggaagaatgaggtgctcctgccgtgtccgccttgttccgggtcgcactggaacaggcagcaattcctaagtccggagcgtttgagcgtttgctatctgactgctgatctgcgtgacagaaacaccagcatatttgcaacgccaaggatattggtcttaagtgcaagagcacaaatgagagtgtgagagaaagtaccttctattttaataataatattattataaaaataataaatctttttaacttttatattttatgcactagacaatggatctgcaactttggactaaggtcattcaatgtacccaaacttgaacagggggttcattgttttgctattgactttattatgccactttggggcagagacttggcatcttcgcagtttaagaaaccacgtttcctatccaatccgaagggaaggtgctgtacagttcattcctttgcaccattagccaatctgtcttttatggattctgtgacatgttt

SEQ ID NO: 6015 - DNA, 3092 bp, Homo sapiens
ctcatatctagaattttgggaggtactttgaatcattacgatctatctacttcttaggtgaggaaatagaggtttaaaatttagtccacagtctcgcaaggatggagcctggatcaaattttgggttatcagattccaatcacgtttcttagcttttcttttttttttccaactccagtttctgtcttgctccaaaaaaggggaaggagcggctgcggcgctcggtttcccgcctcctagggaagggaagggagacgagcagcgcggaggctggggcccccttccgggcggggcctactagtgggcggggcctgtcagtgagcggcccctgcccggaaggagccagtccggggcggagccgatggccttacaggggccggaagtggcctgcgggcggagaagtgcctcaggagtcctgacgcagtgtcttgggcgctaacggcggcggcggccttgtgtttagactccagaactccccacttgccgcgttctcgccgccgcaggctcccgggacgatggtgccccgcctgctgctgcgcgcctggccccggggccccgcggttggtccgggagcccccagtcggcccctcagcgccggctccgggcccggccagtacytgcagcgcagcatcgtgcccaccatgcactaccaggacagcctgcmcaggctgcctattcccaaacttgaagacaccattaggagatacctcagtgcacagaagcctctcttgaatgatggccagttcaggaaaacagaacaattttgcaagagttttgaaaatgggattggaaaagaactgcatgagcagctggttgctctggacaaacagaataaacatacaagctacatttcgggaccctggtttgatatgtacctatctgctcgagactccgttgttctgaactttaatccatttatggctttcaatcctgacccaaaatctgagtataatgaccagctcacccrggcaaccaacatgactgtttctgccatccggtttctgaagacactccgggctggccttytggagccaraagtgttccacttgaaccctgcaaaaagtgacactatcaccttcaagagactcatacgctttgtgccttcctctctgtcctggtatggggcctacctggtcaatgcgtatcccctggataygtcccagtattttcggcttttcaactcaactcgtttacycaaacccagtcgggatgaactcttcactgatgacaaggccagacacctcctggtcctaaggaaaggaaatttttatatctttgatgtcctggatcaagatgggaacattgtgagcccctcggaaatccaggcacatctgaagtacattctctcagacagcagccccgcccccgagtttcccctggcatacctgaccagtgagaaccgagacatctgggcagagctcaggcagaagctgatgagtagtggcaatgaggagagcctgaggaaagtggactcggcagtgttctgtctctgcctagatgacttccccattaaggaccttgtccacttgtcccacaatatgctgcatggggatggcacaaaccgctggtktgataaatcctttaacctcattatcgccaaggatggctctactgccrtccactttgagcactcttggggtgatggtgtggcagtgctcaratwttttaatgaagtatttaaagacagcactcagacccctgccgtcactccacagagccagccagctaccactgactctactgtcacggtgcagaaactcaacttcgagctgactgatgccttaaagactggcatcacagctgctaaggaaaagtttgatgccaccatgaaaaccctcactattgactgcgtccagyttcagagaggaggcaaagaattcctgaagaagcaaaagctgagccctgacgcagttgcccagctggcattccagatggccttcctgcggcagtwcgggcagacagtggccacctacragtcctgtagcactgccrcattcaagcacggccgcactgagaccaycygcccggcctccgtctatacaaagaggtgctctgaggcctttgtcagggagccctccaggcacagtgctggtgagcttcagcagatgatggttgagtgctccaagtaccatggccagctgaccaaagaagcagcaatggrccrgggctttraccgacacttgtttgctctgcggcatctggcagcagccaaagggatcatcttgcctgagctctacctggaccctgcatacgggcagataaaccacaatgtcctgtscacgagcacactgagcagcccagcagtgaaccttgggggctttgccyctgtggtctctgatggctttggtgttgggtatgctgttcatgacaactggataggctgcaatgtctcttcctmcccaggcygcaatgcccgggagtttctccaatgtgtggagaaggccttagaagacrtgtttgatgccttagaaggcaaatccatcaaaagttaacttctgggcagatgaaaagctaccatcacttcctcatcatgaaaactgggaggccgggcatggtggctcatgcctgtaatcccagcattttgagaggctgaggcgggtggatcacttgaggtcaggagtttgagaccaacctggccaacatggtgaaaccttgtctctactaaaaatacaaaaattagctgggtgtggtggcatgtgcctataatcccagctacttgggaggttgaagcagaattgcttgaacccaggaggtggaggttgcagtgagctgagatcacaccactgcactccggcctgggcgacagagcgagactgtctcaaaaaracaaaaaagaaaaaaaaactggggcctgtgtagccagtgggtgctattctgtgaaactaatcataagctgcctaggcagccagctacaggcttgagctttaaattcatggttttaaagctaaacgtaatttccacttgggactagatcacaactgaagataacaagagatttaagttttaagggcatttaatcaggaggaaaggtttggaaaactaactcaggtgtatttattgtttaagcagaaataaagtttaatttttgcttg

SEQ ID NO: 6016 - DNA, 1534 bp, Homo sapiens
acgcgccggaaagcaacggcaagggccgcagccagcaccgggcggagagggctaccatggggaaaatcgcgctgcaactcaaagccacgctggagaacatcaccaacctccggcccgtgggcgaggacttccggtggtacctgaagatgaaatgtggcaactgtggtgagatttcggacaagtggcagtacatccggctgatggacagtgtggcactgaaggggggccgtggcagtgcttccatggtccagaagtgcaagctgtgtgcaagagaaaattccatcgagattttaagcagcaccatcaagccttacaataacttcaagacaatagtggagtttgagtgccggggccttgaaccagttgatttccagccgcaggctgggtttgctgctgaaggtgtggagtcmgggacagccttcagtgacattaatctgcaggagaaggactggactgactatgatgaaaaggcccaggagtctgtgggaatctatgaggtcacccmccagtttgtgaagtgctgatccctcttccttcccagttgcccttaagaactgagaaaggacaaagtactytaagcagcagagcccacagaggctcgttcctttgacccttgtctcctggtggctatacgaaaccktcacaatctgcatgctggactttattacagcttcccaagccccatcaataaagcccctgttcacgctgcactggtgcatgaaggtgaagtaaggaggcagctactccctccacaaataagaattygtgcagcagcagttcactccttaggaaaatgaagagtatttttaaggagatggtatctccccagtcaagggcaagtttacagagatgaaaccgcgatcccaccatcactcaatgagccagaagccaatggtgacgtactgttacctgaacttactgaacttgctgttggaaagatctttgtgaggattaggaattaggttaaaagaaattargaamcatcttcaagcaaaaattaaactttatttctgcttaaacaataaatacacctgagttagttttccaaacctttcctcctgattaaatgcccttaaaacttaaatctcttgttatcttcagttgtgatctagtcccaagtggaaattacgtttagctttaaaaccatgaatttaaagctcaagcctgtagctggctgcctaggcagcttatgattagtttcacagaatagcacccactggctacacaggccccagtttttttttcttttttgtytttttgagacagtctcgctctgtcgcccaggccggagtgcagtggtgtgatctcagctcactgcaacctccacctcctgggttcaagcaattctgcttcaacctcccaagtagctgggattataggcacatgccaccacacccagctaatttttgtatttttagtagagacaaggtttcaccatgttggccaggttggtctcaaactcctgacctcaagtgatccacccgcctcagcctctcaaaatgctgggattacaggcatgagccaccatgcccgg

SEQ ID NO: 6017 - DNA, 1549 bp, Homo sapiens
acgcgccggaaagcaacggcaagggccgcagccagcaccgggcggagagggctaccatggggaaaatcgcgctgcaactcaaagccacgctggagaacatcaccaacctccggcccgtgggcgaggacttccggtggtacctgaagatgaaatgtggcaactgtggtgagatttcggacaagtggcagtacatccggctgatggacagtgtggcactgaaggggggccgtggcagtgcttccatggtccagaagtgcaagctgtgtgcaagagaaaattccatcgagattttaagcagcaccatcaagccttacaatgctgaagacaatgagaacttcaagacaatagtggagtttgagtgccggggccttgaaccagttgatttccagccgcaggctgggtttgctgctgaaggtgtggagtcmgggacagccttcagtgacattaatctgcaggagaaggactggactgactatgatgaaaaggcccaggagtctgtgggaatctatgaggtcacccmccagtttgtgaagtgctgatccctcttccttcccagttgcccttaagaactgagaaaggacaaagtactytaagcagcagagcccacagaggctcgttcctttgacccttgtctcctggtggctatacgaaaccktcacaatctgcatgctggactttattacagcttcccaagccccatcaataaagcccctgttcacgctgcactggtgcatgaaggtgaagtaaggaggcagctactccctccacaaataagaattygtgcagcagcagttcactccttaggaaaatgaagagtatttttaaggagatggtatctccccagtcaagggcaagtttacagagatgaaaccgcgatcccaccatcactcaatgagccagaagccaatggtgacgtactgttacctgaacttactgaacttgctgttggaaagatctttgtgaggattaggaattaggttaaaagaaattargaamcatcttcaagcaaaaattaaactttatttctgcttaaacaataaatacacctgagttagttttccaaacctttcctcctgattaaatgcccttaaaacttaaatctcttgttatcttcagttgtgatctagtcccaagtggaaattacgtttagctttaaaaccatgaatttaaagctcaagcctgtagctggctgcctaggcagcttatgattagtttcacagaatagcacccactggctacacaggccccagtttttttttcttttttgtytttttgagacagtctcgctctgtcgcccaggccggagtgcagtggtgtgatctcagctcactgcaacctccacctcctgggttcaagcaattctgcttcaacctcccaagtagctgggattataggcacatgccaccacacccagctaatttttgtatttttagtagagacaaggtttcaccatgttggccaggttggtctcaaactcctgacctcaagtgatccacccgcctcagcctctcaaaatgctgggattacaggcatgagccaccatgcccgg

SEQ ID NO: 6018 - DNA, 1752 bp, Homo sapiens
gggccgcagccagcaccgggcggagagggctaccatgggggtgaggggaggccgcccgccgcggggacacggaggggaggtggcgagggtctgggaggcaacagctcgcgccaggaggagatgaagcgagtgggtgcgcgctgaaggagcaggaggcagaaggagtgtctccctgtggcacccacggctgggaatgcgggagggtcgggcaggcgtggggctgcgcaggcacggctgacgcagtcgctctggccctccccctcagaaaatcgcgctgcmactcaaagccacgctggagaacatcaccaacctccggcccgtgggcgaggacttccggtggtacctgaagatgaaatgtggcaactgtggtgagmtttcggacaagtggcagtacatccggctgatggacagtgtggcactgaaggggggccgtggcagtgcttycatggtccagaagtgcaagctgtgtgcaagagaaaattccatcgagattttaagcagcaccatckagccttacaatgctgaagacaatgagaacttcaagacaatagtggagtttgagtgccggggccttgaaccagttgatttccagccgcaggctgggtttgctgctgaaggtgtggagtcagggacygccttcagtgacattaatctgcaggagaaggactggactgactatgatgaaaaggcccaggagtctgtgggaatctatgaggtcacccaccagtttgtgaagtgctgatccctcttccttcccagttgcccttaagaactgagaaaggacaaagtactctaagcagcagagcccacagaggctcgttcctttgacccttgtctcctggtggrtatmcgaaaccttcacaatctgcatgctggactttattacagcttcccaagccccatcaataaagcccctgttcacgctgcactggtgcatgaaggtgaagtaaggaggcagctactccctccacaaataagaattcgtgcagcagcagttcactccttaggaaaatgaagagtatttttaaggagatggtatctccccagtcaagggcaagtttacagagatgaaaccgcgatcccaccatcactcaatgagccagaagccaatggtgacgtactyttacctgaacttactgaacttgctgttggaaagatctttgtgaggattaggaattaggttaaaagaaattaagaaccatcttcaagcaaaaattaaactttatttctgcttaaacaataaatacacctgagttagttttccaaacctttcctcctgattaaatgcccttaaaacttaaatctcttgttatcttcagttgtgatctagtcccaagtggaaattacgtttagctttaaaaccatgaatttaaagctcaagcctgtagctggctgcctaggcagcttatgattagtttcacagaatagcacccactggctacacaggccccagtttttttttcttttttgtttttttgagacagtctcgctctgtcgcccaggccggagtgcagtggtgtgatctcagctcactgcaacctccacctcctgggttcaagcaattctgcttcaacctcccaagtagctgggattataggcacatgccaccacacccagctaatttttgtatttttagtagagacaaggtttcaccatgttggccaggttggtctcaaactcctgacctcaagtgatccacccgcctcagcctctcaaaatgctgggattacaggcatgagccaccatgcccgg

SEQ ID NO: 6019 - DNA, 4063 bp, Homo sapiens
cctcagatttctcaggagaccagaactgatctgccagccttgctgccttttgttgctctgctctttacattgtctttacagtcaccaggtgtcargatgctgcaagtacataggactggactgggcaggctgggggtcagcctctccaagggtcttcaccacaaagctgtgttggccgtccggagggaggatgtgaacgcctgggagagaagggccccgctagctcccaagcacatcaaaggcatcaccaatctgggatacaaggtcttgatacagccttcgaatcggcgggccattcatgataaggactatgtcaaagctggtggcattcttcaggaggatatttctgaagcttgtctaattttaggagttaaaagacctccagaggaaaaattaatgtccaggaagacttatgcatttttctcccacacaataaaagctcaggaggccaatatgggcttgttggatgagattctaaaacaggaaattcgccttattgattatgagaaaatggtggatcatagaggagtacgggtagtggcatttggacagtgggctggtgtggcaggaatgatcaacattttacatggaatgggtttaaggctccttgctttgggacatcacacaccttttatgcacattggcatggctcataactacaggaatagcagtcaggctgtgcaagctgtccgtgatgctggctatgaaatatctttgggtttgatgcctaagtcaataggacccttaacatttgtgttcacaggaactggtaatgtttctaagggagcccaagcaatctttaatgagctaccttgtgaatatgtggagccccatgaattaaaagaagtttcccaaactggagacctcagaaaagtgtatgggacggtgttaagtcgtcatcatcatcttgtcaggaaaacagatgctgtgtatgatcctgcagagtatgacaaacatccggagcgctacataagtcgttttaatactgatattgcaccctatacaacttgcttaattaatggaatctactgggaacaaaacactcctcgcctcctaacccgccaagatgctcagagtctcctggctccgggcaagttctcacctgctggtgtggaaggctgccctgcattaccacacaaactcgtggcaatatgtgacatttcagctgacacaggagggtctatagagtttatgactgagtgyacaacaatagagcatcccttttgcatgtatgatgcagaccagcatattattcatgacagtgttgaaggctcggggatcctgatgtgttccattgacaatttgcyggcacagctcccaattgaagctacagaatgctttggagacatgctttacccttatgttgaagaaatgatattatcagacgcracacagcctcttgaaagtcagaatttttctcctgtggtgagagatgcagtgattacatccaacggtacattacctgataaatataaatatatccagacactccgggagagcagggaacgtgctcagtcactttcaatgggcaccaggagaaaggttttggttcttggatctggctacatatctgagcctgtattagaatatttatcaagagatggcaatatagaaataacagtaggatctgacatgaaraatcaaattgaacagttaggcaagaaatataatattaatcctgttagcatggacatttgtaaacaagaagagaagctgggcttcttggtggcaaaacaggatcttgtcatcagcttgttgccttatgtattgcaccctcttgtggccaaggcctgcatcacaaacaaagttaacatggtcactgcaagctacatcacaccagcactaaaagaattggaaaagagtgtggaagatgctggcatcacaatcattggtgaattgggattggaccctggtctggatcacatgttagcaatggaaacaatagataaagccaagraagtgggagccacgattgaatcatatatttcctactgtggtgggcttccagcccctgaacattcaaacaatccattgagatataaatttagctggagtccagtgggagttttgatgaatgtaatgcagtctgccacctatctgctcgatggaaaggttgtgaatgttgcaggaggcatctcctttcttgatgccgttacgtccatggatttttttccaggattaaatttggaaggctatcctaacagagacagtacgaaatatgctgagatttatggcatttcttctgctcacactttgttgcgggggacactgagatataagggatatatgaaagctttgaatggatttgtaaaattaggtcttataaacagagaagcgcttcctgcctttagacctgaggccaaccctctcacctggaaacaactcctctgtgacctagttgggatttcaccctcctctgagcatgatgtgttgaaggaagctgttcttaagaaactaggaggagacaatacccagttggaggctgctgaatggttgggcttacttggggatgaacaagttcctcaggcagagtccattctggatgccctctccaagcatttggtcatgaagctttcctatggtcctgaagaaaaagatatgattgtgatgagagacagctttggaatcagacatccttctggacatttagaacataaaacgattgatcttgtggcttatggggacatcaatggcttttcagccatggctaaaaccgtggggttacccaccgccatggcagccaaaatgttgcttgatggtgaaattggagccaaaggcctaatggggcccttttcaaaggagatctatggaccaatattggagcgaattaaagcagaaggcattatatatactacacagagtacaattaaaccataattgggaattatattttgtttttttcttcccaggcaatacacctctgaacatgtgtgtgataaatgggtttgctaatgtgctgttttaaagtataaagcataatatgttttggttaacacaawgtactttttgaactataaatctttattttaatatggaaatgtttggaacaggagatgcaagccactaacagagaactttaataattctaccctgtattttataaatacgtatgtgaaagtgatgatcatgctatttgttaatttattgtgccactttttttcttttgttttttttttgttgttgttgttttttgagatggagtctcgctctgtcacccaggctggagtgcagtggcgcgatctcggctcactgcaagctccgcctcctgggttcacgccattctcctgcctcagcctcccaagtagctgggactacaggcacccgccaccacgcccggctaaattttttgtatttttcagtagagacggggtttcaccatgttagccaggatgtccacttttttcttaaatgaacatattgtcttataaccagcaaatgaagttttacttttttartcagaaaaaatttcgtcataaagctatatttttatatttttaaaattgatacagttagataccttcagattacctaakttaagtttttgccaaaatgctattttatgccctttttgtaaagttatgatttattttgtaaatatagttccttatagttttctcttgagtgtttggacatgagaatagataagattaaattacaatttacaagatcacttcattaggcacaggaaaagtatttaacaaaattcaacaccctttcacaataaaaaataaaaaataaaaaaccctcaacaaactaggaatagaaggaaacttcctcaacctgataaagggcatctatgaagaacccatggttagcatcatacttaatggtgaaggactggattatttccccctgagatcagaaacaagacaaggatgtctgctttggccatttctattcaacttgtactggacagtcaagaaagggcaattaggcaagaaaataaaataaaagtcatctaggttggaaaggaagaagtataactaaatagagatgggagacgatatggtggttttgtgcatagtaatccaagggaaaactatagaaaatccaaaggcatgat

SEQ ID NO: 6020 - DNA, 4098 bp, Homo sapiens
acctcctacttcccggccttccatcccagtttcttctaggaattcggagcctcccctgcagcgactcggaagattcgaggcggcgggggacaagtcggcgccccagagcggacgagtcaccaggtgtcargatgctgcaagtacataggactggactgggcaggctgggggtcagcctctccaagggtcttcaccacaaagctgtgttggccgtccggagggaggatgtgaacgcctgggagagaagggccccgctagctcccaagcacatcaaaggcatcaccaatctgggatacaaggtcttgatacagccttcgaatcggcgggccattcatgataaggactatgtcaaagctggtggcattcttcaggaggatatttctgaagcttgtctaattttaggagttaaaagacctccagaggaaaaattaatgtccaggaagacttatgcatttttctcccacacaataaaagctcaggaggccaatatgggcttgttggatgagattctaaaacaggaaattcgccttattgattatgagaaaatggtggatcatagaggagtacgggtagtggcatttggacagtgggctggtgtggcaggaatgatcaacattttacatggaatgggtttaaggctccttgctttgggacatcacacaccttttatgcacattggcatggctcataactacaggaatagcagtcaggctgtgcaagctgtccgtgatgctggctatgaaatatctttgggtttgatgcctaagtcaataggacccttaacatttgtgttcacaggaactggtaatgtttctaagggagcccaagcaatctttaatgagctaccttgtgaatatgtggagccccatgaattaaaagaagtttcccaaactggagacctcagaaaagtgtatgggacggtgttaagtcgtcatcatcatcttgtcaggaaaacagatgctgtgtatgatcctgcagagtatgacaaacatccggagcgctacataagtcgttttaatactgatattgcaccctatacaacttgcttaattaatggaatctactgggaacaaaacactcctcgcctcctaacccgccaagatgctcagagtctcctggctccgggcaagttctcacctgctggtgtggaaggctgccctgcattaccacacaaactcgtggcaatatgtgacatttcagctgacacaggagggtctatagagtttatgactgagtgyacaacaatagagcatcccttttgcatgtatgatgcagaccagcatattattcatgacagtgttgaaggctcggggatcctgatgtgttccattgacaatttgcyggcacagctcccaattgaagctacagaatgctttggagacatgctttacccttatgttgaagaaatgatattatcagacgcracacagcctcttgaaagtcagaatttttctcctgtggtgagagatgcagtgattacatccaacggtacattacctgataaatataaatatatccagacactccgggagagcagggaacgtgctcagtcactttcaatgggcaccaggagaaaggttttggttcttggatctggctacatatctgagcctgtattagaatatttatcaagagatggcaatatagaaataacagtaggatctgacatgaaraatcaaattgaacagttaggcaagaaatataatattaatcctgttagcatggacatttgtaaacaagaagagaagctgggcttcttggtggcaaaacaggatcttgtcatcagcttgttgccttatgtattgcaccctcttgtggccaaggcctgcatcacaaacaaagttaacatggtcactgcaagctacatcacaccagcactaaaagaattggaaaagagtgtggaagatgctggcatcacaatcattggtgaattgggattggaccctggtctggatcacatgttagcaatggaaacaatagataaagccaagraagtgggagccacgattgaatcatatatttcctactgtggtgggcttccagcccctgaacattcaaacaatccattgagatataaatttagctggagtccagtgggagttttgatgaatgtaatgcagtctgccacctatctgctcgatggaaaggttgtgaatgttgcaggaggcatctcctttcttgatgccgttacgtccatggatttttttccaggattaaatttggaaggctatcctaacagagacagtacgaaatatgctgagatttatggcatttcttctgctcacactttgttgcgggggacactgagatataagggatatatgaaagctttgaatggatttgtaaaattaggtcttataaacagagaagcgcttcctgcctttagacctgaggccaaccctctcacctggaaacaactcctctgtgacctagttgggatttcaccctcctctgagcatgatgtgttgaaggaagctgttcttaagaaactaggaggagacaatacccagttggaggctgctgaatggttgggcttacttggggatgaacaagttcctcaggcagagtccattctggatgccctctccaagcatttggtcatgaagctttcctatggtcctgaagaaaaagatatgattgtgatgagagacagctttggaatcagacatccttctggacatttagaacataaaacgattgatcttgtggcttatggggacatcaatggcttttcagccatggctaaaaccgtggggttacccaccgccatggcagccaaaatgttgcttgatggtgaaattggagccaaaggcctaatggggcccttttcaaaggagatctatggaccaatattggagcgaattaaagcagaaggcattatatatactacacagagtacaattaaaccataattgggaattatattttgtttttttcttcccaggcaatacacctctgaacatgtgtgtgataaatgggtttgctaatgtgctgttttaaagtataaagcataatatgttttggttaacacaawgtactttttgaactataaatctttattttaatatggaaatgtttggaacaggagatgcaagccactaacagagaactttaataattctaccctgtattttataaatacgtatgtgaaagtgatgatcatgctatttgttaatttattgtgccactttttttcttttgttttttttttgttgttgttgttttttgagatggagtctcgctctgtcacccaggctggagtgcagtggcgcgatctcggctcactgcaagctccgcctcctgggttcacgccattctcctgcctcagcctcccaagtagctgggactacaggcacccgccaccacgcccggctaaattttttgtatttttcagtagagacggggtttcaccatgttagccaggatgtccacttttttcttaaatgaacatattgtcttataaccagcaaatgaagttttacttttttartcagaaaaaatttcgtcataaagctatatttttatatttttaaaattgatacagttagataccttcagattacctaakttaagtttttgccaaaatgctattttatgccctttttgtaaagttatgatttattttgtaaatatagttccttatagttttctcttgagtgtttggacatgagaatagataagattaaattacaatttacaagatcacttcattaggcacaggaaaagtatttaacaaaattcaacaccctttcacaataaaaaataaaaaataaaaaaccctcaacaaactaggaatagaaggaaacttcctcaacctgataaagggcatctatgaagaacccatggttagcatcatacttaatggtgaaggactggattatttccccctgagatcagaaacaagacaaggatgtctgctttggccatttctattcaacttgtactggacagtcaagaaagggcaattaggcaagaaaataaaataaaagtcatctaggttggaaaggaagaagtataactaaatagagatgggagacgatatggtggttttgtgcatagtaatccaagggaaaactatagaaaatccaaaggcatgat

SEQ ID NO: 6021 - DNA, 8048 bp, Homo sapiens
gcactgaggcttcgctgctctcggagcgctcagaccgcggccgccgcagccggcgaaagaggcaaagtcccgcacgccggaggacatgcgcctcggctagcggccccgggccccaccaccgtgcggctttctcsagattattcctctctcgctgtctctgactgtctctctctgtctctgtctctstctctctctctctcwcacacacacacacacacacaaacacacatacgcacgcacgatctcacttcgatctatacactggaggattaaaacaaacaaacaaaaaaaacatttcyttcgctccccctccctctccactctgagaagcagaggagccgcacggcgaggggccgcagaccgtctggaaatgcgaakcctaaagcktttcctcgcttgcattcagctcctctgtgtttgccgcctggattgggctaatggatactacagacaacagagaaaacttgttgaagagattggctggtcctatacaggagcactgaatcaaaaaaattggggaaagaaatatccaacatgtaatagcccaaaacaatctcctatcaatattgatgaagatcttacacaagtaaatgtgaatcttaagaaacttaaatttcagggttgggataaaacatcattggaaaacacattcattcataacactgggaaaacagtggaaattaatctcactaatgactaccgtgtcagcggaggagtttcagaaatggtgtttaaagcaagcaagataacttttcactggggaaaatgcaatatgtcatctgatggatcagagcatagtttagaaggacaaaaatttccacttgagatgcaaatctactgctttgatgcrgaccgattttcaagttttgaggaagcagtcaaaggaaaagggaagttaagagctttatccattttgtttgaggttgggacagaagaaaatttggatttcaaagcgattattgatggagtcgaaagtgttagtcgttttgggaagcaggctgctttagatccattcatactgttgaaccttctgccaaactcaactgacaagtattacatttacaatggctcattgacatctcctccctgcacagacacagttgactggattgtttttaaagatacagttagcatctctgaaagccagttggctgttttttgtgaagttcttacaatgcaacaatctggttatgtcatgctgatggactacttacaaaacaattttcgagagcaacagtacaagttctctagacaggtgttttcctcatacactggaaaggaagagattcatgaagcagtttgtagttcagaaccagaaaatgttcaggctgacccagagaattataccagccttcttgttacatgggaaagacctcgagtcgtttatgataccatgattgagaagtttgcagttttgtaccagcagttggatggagaggaccaaaccaagcatgaatttttgacagatggctatcaagacttgggtgctattctcaataatttgctacccaatatgagttatgttcttcagatagtagccatatgcactaatggcttatatggaaaatacagcgaccaactgattgtcgacatgcctactgataatcctgaacttgatcttttccctgaattaattggaactgaagaaataatcaaggaggaggaagagggaaaagacattgaagaaggcgctattgtgaatcctggtagagacagtgctacaaaccaaatcaggaaaaaggaaccccagatttctaccacaacacactacaatcgcatagggacgaaatacaatgaagccaagactaaccgatccccaacaagaggaagtgaattctctggaaagggtgatgttcccaatacatctttaaattccacttcccaaccagtcactaaattagccacagaaaaagatatttccttgacttctcagactgtgactgaactgccacctcacactgtggaaggtacttcagcctctttaaatgatggctctaaaactgttcttagatctccacatatgaacttgtcggggactgcagaatccttaaatacagtttctataacagaatatgaggaggagagtttattgaccagtttcaagcttgatactggagctgaagattcttcaggctccagtcccgcaacttctgctatcccattcatctctgagaacatatcccaagggtatatattttcctccgaaaacccagagacaataacatatgatgtccttataccagaatctgctagaaatgcttccgaagattcaacttcatcaggttcagaagaatcactaaaggatccttctatggagggaaatgtgtggtttcctagctctacagacataacagcacagcccgatgttggatcaggcagagagagctttctccagactaattacactgagatacgtgttgatgaatctgagaagacaaccaagtccttttctgcaggcccagtgatgtcacagggtccctcagttacagayctggaaatgccacattattctacctttgcctacttcccaactgaggtaacacctcatgcttttaccccatcctccagacaacaggatttggtctccacggtcaacgtggtatactcgcagacaacccaaccggtatacaatggtgagacacctcttcaaccttcctacagtagtgaagtctttcctctagtcacccctttgttgcttgacaatcagatcctcaacactacccctgctgcttcaagtagtgattcggccttgcatgctacgcctgtatttcccagtgtcgatgtgtcatttgaatccatcctgtcttcctatgatggtgcacctttgcttccattttcctctgcttccttcagtagtgaattgtttcgccatctgcatacagtttctcaaatccttccacaagttacttcagctaccgagagtgataaggtgcccttgcatgcttctctgccagtgsctgggggtgatttgctattagagcccagccttgctcagtattctgatgtgctgtccactactcatgctgcttcagagacgctggaatttggtagtgaatctggtgttctttataaaacgcttatgttttctcaagttgaaccacccagcagtgatgccatgatgcatgcacgttcttcagggcctgaaccttcttatgccttgtctgataatgagggctcccaacacatcttcactgtttcttacagttctgcaatacctgtgcatgattctgtgggtgtaacttatcagggttccttatttagcggccctagccatataccaatacctaagtcttcgttaataaccccaactgcatcattactgcagcctactcatgccctctctggtgatggggaatggtctggagcctcttctgatagtgaatttcttttacctgacacagatgggctgacagcccttaacatttcttcacctgtttctgtagctgaatttacatatacaacatctgtgtttggtgatgataataaggcgctttctaaaagtgaaataatatatggaaatgagactgaactgcaaattccttctttcaatgagatggtttacccttctgaaagcacagtcatgcccaacatgtatgataatgtaaataagttgaatgcgtctttacaagaaacctctgtttccatttctagcaccaagggcatgtttccagggtcccttgctcataccaccactaaggtttttgatcatgagattagtcaagttccagaaaataacttttcagttcaacctacacatactgtctctcaagcatctggtgacacttcgcttaaacctgtgcttagtgcaaactcagagccagcatcctctgaccctgcttctagtgaaatgttatctccttcaactcarctcttattttatgagacctcagcttcttttagtactgaagtattgctacaaccttcctttcaggcttctgatgttgacaccttgcttaaaactgttcttccagctgtgcccagtgatccaatattggttgaaacccccaaagttgataaaattagttctacaatgttgcatctcattgtatcaaattctgcttcaagtgaaaacatgctgcactctacatctgtaccagtttttgatgtgtcgcctacttctcatatgcactctgcttcacttcaaggtttgaccatttcctatgcaagtgagaaatatgaaccagttttgttaaaaagtgaaagttcccaccaagtggtaccttctttgtacagtaatgatgagttgttccaaacggccaatttggagattaaccaggcccatcccccaaaaggaaggcatgtatttgctacacctgttttatcaattgatgaaccattaaatacactaataaataagcttatacattccgatgaaattttaacctccaccaaaagttctgttactgrtaaggtatttgctggtattccaacagttgcttctgatacrtttgtatctactgatcattctgttcctataggaaatgggcatgttgccrttacagctgtttctccccacagaratggttctgtaacctcaacaaagttgctgtttccttctaaggcaacttctgagctgagtcatagtgccaaatctgatgccggtttagtgggtggtggtgaagatggtgacactgatgatgatgrdgatgatgatgatgacagagrtagtgatggcttatccattcataagtgtatgtcatgctcatcctatagagaatcacaggaaaaggtaatgaatgattcagacacccacgaaaacagtcttatggatcagaataatccaatctcatactcactatctgagaattctgaagaagataatagagtcacaagtgtatcctcagacagtcaaactggtatggacagaagtcctggtaaatcaccatcagcaaatgggctatcccaaaagcacaatgatggaaaagaggaaaatgacattcagactggtagtgctctgcttcctctcagccctgaatctaaagcatgggcagttctgacaagtgatgaagaaagtggatcagggcaaggtacctcagatagccttaatgagaatgagacttccacagatttcagttttgcagacactaatgaaaaagatgctgatgggatcctggcagcaggtgactcagaaataactcctggattcccacagtccccaacatcatctgttactagcgagaackcagaagtgttccacgtttcagaggcagaggccagtaatagtagccatgagtctcgtattggtctagctgaggggttggaatccgagaagaaggcagttataccccttgtgatcgtgtcagccctgacttttatctgtctagtggttcttgtgggtattctcatctactggaggaaatgcttccagactgcacacttttacttagaggacagtacatcccctagagttatatccacacctccaacacctatctttccaatttcagatgatgtcggagcaattccaataaagcactttccaaagcatgttgcagatttacatgcaagtagtgggtttactgaagaatttgagacactgaaagagttttaccaggaagtgcagagctgtactgttgacttaggtattacagcagacagctccaaccacccagacaacaagcacaagaatcgatacataaatatcgttgcctatgatcatagcagggttaagctagcacagcttgctgaaaaggatggcaaactgactgattatatcaatgccaattatgttgatggctacaacagaccaaaagcttatattgctgcccaaggcccactgaaatccacagctgaagatttctggagaatgatatgggaacataatgtggaagttattgtcatgataacaaacctcgtggagaaaggaaggagaaaatgtgatcagtactggcctgccgatgggagtgaggagtacgggaactttctggtcactcagaagagtgtgcaagtgcttgcctattatactgtgaggaattttactctaagaaacacaaaaataaaaaagggctcccagaaaggaagacccagtggacgtgtggtcacacagtatcactacacgcagtggcctgacatgggagtaccagagtactccctgccagtgctgacctttgtgagaaaggcagcctatgccaagcgccatgcagtggggcctgttgtcgtccactgcagtgctggagttggaagaacaggcacatatattgtgctagacagtatgttgcagcagattcaacacgaaggaactgtcaacatatttggcttcttaaaacacatccgttcacaaagaaattatttggtacaaactgaggagcaatattcctcattcctggaccagcaggcaaaacaaagctagagaaacaattccagctcctgagccagtcaaatatacagcagagtgactattctgcagccctaaagcaatgcaacagggaaaagaatcgaacttcttctatcatccctgtggaaagatcaagggttggcatttcatccctgagtggagaaggcacagactacatcaatgcctcctatatcatgggctattaccagagcaatgaattcatcattacccagcaccctctccttcataccatcaaggatttctggaggatgatatgggaccataatgcccaactggtggttatgattcctgatggccaaaacatggcagaagatgaatttgtttactggccaaataaagatgagcctataaattgtgagagctttaaggtcactcttatggctgaagaacacaaatgtctatctaatgaggaaaaacttataattcaggactttatcttagaagctacacaggatgattatgtacttgaagtgaggcactttcagtgtcctaaatggccaaatccagatagccccattagtaaaacttttgaacttataagtgttataaaagaagaagctgccaatagggatgggcctatgattgttcatgatgagcatggaggagtgacggcaggaactttctgtgctctgacaacccttatgcaccaactagaaaaagaaaattccgtggatgtttaccaggkagccaagatgatcaatctgatgaggccaggagtctttgctgacattgagcagtatcagtttctctacaaagtgatcctcagccttgtgagcacaaggcaggaagagaatccatccacctctctggacagtaatggtgcagcattgcctgatggaaatatagctgagagcttagagtctttagtttaacacagaaaggggtgggggractcacatctgagcattgttttcctcttcctaaaattaggcaggaaaatcagtctagttctgttatctgttgatttcccatcacctgacagtaactttcatgacataggattctgccgccaaatttatatcattaacaatgtgtgcctttttgcaagacttgtaatttacttattatgtttgaactaaaatgattgaattttacagtatttctaagaatggaattgtggtatttttttctgtattgattttaacagaaaatttcaatttatagaggttaggaattccaaactacagaaaatgtttgtttttagtgtcaaatttttagctgtatttgtagcaattatcaggtttgctagaaatataacttttaatacagtagcctgtaaataaaacactcttccatatgatattcaacattttacaactgcagtattcacctaaagtagaaataatctgttacttattgtaaatactgccctagtgtctccatggaccaaatttatatttataattgtagatttttatattttactactgagtcaagttttctagttctgtgtaattgtttagtttaatgacgtagttcattagctggtcttactctaccagttttctgacattgtattgtgttacctaagtcattaactttgtttcagcatgtaattttaacttttgtggaaaatagaaataccttcattttgaaagaagtttttatgagaataacaccttaccaaacattgttcaaatggtttttatccaaggaattgcaaaaataaatataaatattgccattaatttgt

SEQ ID NO: 6022 - DNA, 5689 bp, Homo sapiens
agagcggcagccgcgcccctccgccccccgcgcgaccccgggtccgaggcacgctcccagcggagcggtcctgcgcccccgccccctccaggmgccgcggcgcgcacagccgggctggagcgcgcacccggcactgaggcttcgctgctctcggagcgctcagaccgcggccgccgcagccggcgaaagaggcaaagtcccgcacgccggaggacatgcgcctcggctagcggccccgggccccaccaccgtgcggctttctcsagattattcctctctcgctgtctctgactgtctctctctgtctctgtctctstctctctctctctcwcacacacacacacacacacaaacacacatacgcacgcacgatctcacttcgatctatacactggaggattaaaacaaacaaacaaaaaaaacatttcyttcgctccccctccctctccactctgagaagcagaggagccgcacggcgaggggccgcagaccgtctggaaatgcgaakcctaaagcktttcctcgcttgcattcagctcctctgtgtttgccgcctggattgggctaatggatactacagacaacagagaaaacttgttgaagagattggctggtcctatacaggagcactgaatcaaaaaaattggggaaagaaatatccaacatgtaatagcccaaaacaatctcctatcaatattgatgaagatcttacacaagtaaatgtgaatcttaagaaacttaaatttcagggttgggataaaacatcattggaaaacacattcattcataacactgggaaaacagtggaaattaatctcactaatgactaccgtgtcagcggaggagtttcagaaatggtgtttaaagcaagcaagataacttttcactggggaaaatgcaatatgtcatctgatggatcagagcatagtttagaaggacaaaaatttccacttgagatgcaaatctactgctttgatgcrgaccgattttcaagttttgaggaagcagtcaaaggaaaagggaagttaagagctttatccattttgtttgaggttgggacagaagaaaatttggatttcaaagcgattattgatggagtcgaaagtgttagtcgttttgggaagcaggctgctttagatccattcatactgttgaaccttctgccaaactcaactgacaagtattacatttacaatggctcattgacatctcctccctgcacagacacagttgactggattgtttttaaagatacagttagcatctctgaaagccagttggctgttttttgtgaagttcttacaatgcaacaatctggttatgtcatgctgatggactacttacaaaacaattttcgagagcaacagtacaagttctctagacaggtgttttcctcatacactggaaaggaagagattcatgaagcagtttgtagttcagaaccagaaaatgttcaggctgacccagagaattataccagccttcttgttacatgggaaagacctcgagtcgtttatgataccatgattgagaagtttgcagttttgtaccagcagttggatggagaggaccaaaccaagcatgaatttttgacagatggctatcaagacttgggtgctattctcaataatttgctacccaatatgagttatgttcttcagatagtagccatatgcactaatggcttatatggaaaatacagcgaccaactgattgtcgacatgcctactgataatcctgaacttgatcttttccctgaattaattggaactgaagaaataatcaaggaggaggaagagggaaaagacattgaagaaggcgctattgtgaatcctggtagagacagtgctacaaaccaaatcaggaaaaaggaaccccagatttctaccacaacacactacaatcgcatagggacgaaatacaatgaagccaagactaaccgatccccaacaagaggaagtgaattctctggaaagggtgatgttcccaatacatctttaaattccacttcccaaccagtcactaaattagccacagaaaaagatatttccttgacttctcagactgtgactgaactgccacctcacactgtggaaggtacttcagcctctttaaatgatggctctaaaactgttcttagatctccacatatgaacttgtcggggactgcagaatccttaaatacagtttctataacagaatatgaggaggagagtttattgaccagtttcaagcttgatactggagctgaagattcttcaggctccagtcccgcaacttctgctatcccattcatctctgagaacatatcccaagggtatatattttcctccgaaaacccagagacaataacatatgatgtccttataccagaatctgctagaaatgcttccgaagattcaacttcatcaggttcagaagaatcactaaaggatccttctatggagggaaatgtgtggtttcctagctctacagacataacagcacagcccgatgttggatcaggcagagagagctttctccagactaattacactgagatacgtgttgatgaatctgagaagacaaccaagtccttttctgcaggcccagtgatgtcacagggtccctcagttacagayctggaaatgccacattattctacctttgcctacttcccaactgaggtaacacctcatgcttttaccccatcctccagacaacaggatttggtctccacggtcaacgtggtatactcgcagacaacccaaccggtatacaatgaggccagtaatagtagccatgagtctcgtattggtctagctgaggggttggaatccgagaagaaggcagttataccccttgtgatcgtgtcagccctgacttttatctgtctagtggttcttgtgggtattctcatctactggaggaaatgcttccagactgcacacttttacttagaggacagtacatcccctagagttatatccacacctccaacacctatctttccaatttcagatgatgtcggagcaattccaataaagcactttccaaagcatgttgcagatttacatgcaagtagtgggtttactgaagaatttgagacactgaaagagttttaccaggaagtgcagagctgtactgttgacttaggtattacagcagacagctccaaccacccagacaacaagcacaagaatcgatacataaatatcgttgcctatgatcatagcagggttaagctagcacagcttgctgaaaaggatggcaaactgactgattatatcaatgccaattatgttgatggctacaacagaccaaaagcttatattgctgcccaaggcccactgaaatccacagctgaagatttctggagaatgatatgggaacataatgtggaagttattgtcatgataacaaacctcgtggagaaaggaaggagaaaatgtgatcagtactggcctgccgatgggagtgaggagtacgggaactttctggtcactcagaagagtgtgcaagtgcttgcctattatactgtgaggaattttactctaagaaacacaaaaataaaaaagggctcccagaaaggaagacccagtggacgtgtggtcacacagtatcactacacgcagtggcctgacatgggagtaccagagtactccctgccagtgctgacctttgtgagaaaggcagcctatgccaagcgccatgcagtggggcctgttgtcgtccactgcagtgctggagttggaagaacaggcacatatattgtgctagacagtatgttgcagcagattcaacacgaaggaactgtcaacatatttggcttcttaaaacacatccgttcacaaagaaattatttggtacaaactgaggagcaatatgtcttcattcatgatacactggttgaggccatacttagtaaagaaactgaggtgctggacagtcatattcatgcctatgttaatgcactcctcattcctggaccagcaggcaaaacaaagctagagaaacaattccagctcctgagccagtcaaatatacagcagagtgactattctgcagccctaaagcaatgcaacagggaaaagaatcgaacttcttctatcatccctgtggaaagatcaagggttggcatttcatccctgagtggagaaggcacagactacatcaatgcctcctatatcatgggctattaccagagcaatgaattcatcattacccagcaccctctccttcataccatcaaggatttctggaggatgatatgggaccataatgcccaactggtggttatgattcctgatggccaaaacatggcagaagatgaatttgtttactggccaaataaagatgagcctataaattgtgagagctttaaggtcactcttatggctgaagaacacaaatgtctatctaatgaggaaaaacttataattcaggactttatcttagaagctacacaggatgattatgtacttgaagtgaggcactttcagtgtcctaaatggccaaatccagatagccccattagtaaaacttttgaacttataagtgttataaaagaagaagctgccaatagggatgggcctatgattgttcatgatgagcatggaggagtgacggcaggaactttctgtgctctgacaacccttatgcaccaactagaaaaagaaaattccgtggatgtttaccaggkagccaagatgatcaatctgatgaggccaggagtctttgctgacattgagcagtatcagtttctctacaaagtgatcctcagccttgtgagcacaaggcaggaagagaatccatccacctctctggacagtaatggtgcagcattgcctgatggaaatatagctgagagcttagagtctttagtttaacacagaaaggggtgggggractcacatctgagcattgttttcctcttcctaaaattaggcaggaaaatcagtctagttctgttatctgttgatttcccatcacctgacagtaactttcatgacataggattctgccgccaaatttatatcattaacaatgtgtgcctttttgcaagacttgtaatttacttattatgtttgaactaaaatgattgaattttacagtatttctaagaatggaattgtggtatttttttctgtattgattttaacagaaaatttcaatttatagaggttaggaattccaaactacagaaaatgtttgtttttagtgtcaaatttttagctgtatttgtagcaattatcaggtttgctagaaatataacttttaatacagtagcctgtaaataaaacactcttccatatgatattcaacattttacaactgcagtattcacctaaagtagaaataatctgttacttattgtaaatactgccctagtgtctccatggaccaaatttatatttataattgtagatttttatattttactactgagtcaagttttctagttctgtgtaattgtttagtttaatgacgtagttcattagctggtcttactctaccagttttctgacattgtattgtgttacctaagtcattaactttgtttcagcatgtaattttaacttttgtggaaaatagaaataccttcattttgaaagaagtttttatgagaataacaccttaccaaacattgttcaaatggtttttatccaaggaattgcaaaaataaatataaatattgccattaatttgt

SEQ ID NO: 6023 - DNA, 8266 bp, Homo sapiens
agagcggcagccgcgcccctccgccccccgcgcgaccccgggtccgaggcacgctcccagcggagcggtcctgcgcccccgccccctccaggmgccgcggcgcgcacagccgggctggagcgcgcacccggcactgaggcttcgctgctctcggagcgctcagaccgcggccgccgcagccggcgaaagaggcaaagtcccgcacgccggaggacatgcgcctcggctagcggccccgggccccaccaccgtgcggctttctcsagattattcctctctcgctgtctctgactgtctctctctgtctctgtctctstctctctctctctcwcacacacacacacacacacaaacacacatacgcacgcacgatctcacttcgatctatacactggaggattaaaacaaacaaacaaaaaaaacatttcyttcgctccccctccctctccactctgagaagcagaggagccgcacggcgaggggccgcagaccgtctggaaatgcgaakcctaaagcktttcctcgcttgcattcagctcctctgtgtttgccgcctggattgggctaatggatactacagacaacagagaaaacttgttgaagagattggctggtcctatacaggagcactgaatcaaaaaaattggggaaagaaatatccaacatgtaatagcccaaaacaatctcctatcaatattgatgaagatcttacacaagtaaatgtgaatcttaagaaacttaaatttcagggttgggataaaacatcattggaaaacacattcattcataacactgggaaaacagtggaaattaatctcactaatgactaccgtgtcagcggaggagtttcagaaatggtgtttaaagcaagcaagataacttttcactggggaaaatgcaatatgtcatctgatggatcagagcatagtttagaaggacaaaaatttccacttgagatgcaaatctactgctttgatgcrgaccgattttcaagttttgaggaagcagtcaaaggaaaagggaagttaagagctttatccattttgtttgaggttgggacagaagaaaatttggatttcaaagcgattattgatggagtcgaaagtgttagtcgttttgggaagcaggctgctttagatccattcatactgttgaaccttctgccaaactcaactgacaagtattacatttacaatggctcattgacatctcctccctgcacagacacagttgactggattgtttttaaagatacagttagcatctctgaaagccagttggctgttttttgtgaagttcttacaatgcaacaatctggttatgtcatgctgatggactacttacaaaacaattttcgagagcaacagtacaagttctctagacaggtgttttcctcatacactggaaaggaagagattcatgaagcagtttgtagttcagaaccagaaaatgttcaggctgacccagagaattataccagccttcttgttacatgggaaagacctcgagtcgtttatgataccatgattgagaagtttgcagttttgtaccagcagttggatggagaggaccaaaccaagcatgaatttttgacagatggctatcaagacttgggtgctattctcaataatttgctacccaatatgagttatgttcttcagatagtagccatatgcactaatggcttatatggaaaatacagcgaccaactgattgtcgacatgcctactgataatcctgaacttgatcttttccctgaattaattggaactgaagaaataatcaaggaggaggaagagggaaaagacattgaagaaggcgctattgtgaatcctggtagagacagtgctacaaaccaaatcaggaaaaaggaaccccagatttctaccacaacacactacaatcgcatagggacgaaatacaatgaagccaagactaaccgatccccaacaagaggaagtgaattctctggaaagggtgatgttcccaatacatctttaaattccacttcccaaccagtcactaaattagccacagaaaaagatatttccttgacttctcagactgtgactgaactgccacctcacactgtggaaggtacttcagcctctttaaatgatggctctaaaactgttcttagatctccacatatgaacttgtcggggactgcagaatccttaaatacagtttctataacagaatatgaggaggagagtttattgaccagtttcaagcttgatactggagctgaagattcttcaggctccagtcccgcaacttctgctatcccattcatctctgagaacatatcccaagggtatatattttcctccgaaaacccagagacaataacatatgatgtccttataccagaatctgctagaaatgcttccgaagattcaacttcatcaggttcagaagaatcactaaaggatccttctatggagggaaatgtgtggtttcctagctctacagacataacagcacagcccgatgttggatcaggcagagagagctttctccagactaattacactgagatacgtgttgatgaatctgagaagacaaccaagtccttttctgcaggcccagtgatgtcacagggtccctcagttacagayctggaaatgccacattattctacctttgcctacttcccaactgaggtaacacctcatgcttttaccccatcctccagacaacaggatttggtctccacggtcaacgtggtatactcgcagacaacccaaccggtatacaatggtgagacacctcttcaaccttcctacagtagtgaagtctttcctctagtcacccctttgttgcttgacaatcagatcctcaacactacccctgctgcttcaagtagtgattcggccttgcatgctacgcctgtatttcccagtgtcgatgtgtcatttgaatccatcctgtcttcctatgatggtgcacctttgcttccattttcctctgcttccttcagtagtgaattgtttcgccatctgcatacagtttctcaaatccttccacaagttacttcagctaccgagagtgataaggtgcccttgcatgcttctctgccagtgsctgggggtgatttgctattagagcccagccttgctcagtattctgatgtgctgtccactactcatgctgcttcagagacgctggaatttggtagtgaatctggtgttctttataaaacgcttatgttttctcaagttgaaccacccagcagtgatgccatgatgcatgcacgttcttcagggcctgaaccttcttatgccttgtctgataatgagggctcccaacacatcttcactgtttcttacagttctgcaatacctgtgcatgattctgtgggtgtaacttatcagggttccttatttagcggccctagccatataccaatacctaagtcttcgttaataaccccaactgcatcattactgcagcctactcatgccctctctggtgatggggaatggtctggagcctcttctgatagtgaatttcttttacctgacacagatgggctgacagcccttaacatttcttcacctgtttctgtagctgaatttacatatacaacatctgtgtttggtgatgataataaggcgctttctaaaagtgaaataatatatggaaatgagactgaactgcaaattccttctttcaatgagatggtttacccttctgaaagcacagtcatgcccaacatgtatgataatgtaaataagttgaatgcgtctttacaagaaacctctgtttccatttctagcaccaagggcatgtttccagggtcccttgctcataccaccactaaggtttttgatcatgagattagtcaagttccagaaaataacttttcagttcaacctacacatactgtctctcaagcatctggtgacacttcgcttaaacctgtgcttagtgcaaactcagagccagcatcctctgaccctgcttctagtgaaatgttatctccttcaactcarctcttattttatgagacctcagcttcttttagtactgaagtattgctacaaccttcctttcaggcttctgatgttgacaccttgcttaaaactgttcttccagctgtgcccagtgatccaatattggttgaaacccccaaagttgataaaattagttctacaatgttgcatctcattgtatcaaattctgcttcaagtgaaaacatgctgcactctacatctgtaccagtttttgatgtgtcgcctacttctcatatgcactctgcttcacttcaaggtttgaccatttcctatgcaagtgagaaatatgaaccagttttgttaaaaagtgaaagttcccaccaagtggtaccttctttgtacagtaatgatgagttgttccaaacggccaatttggagattaaccaggcccatcccccaaaaggaaggcatgtatttgctacacctgttttatcaattgatgaaccattaaatacactaataaataagcttatacattccgatgaaattttaacctccaccaaaagttctgttactgrtaaggtatttgctggtattccaacagttgcttctgatacrtttgtatctactgatcattctgttcctataggaaatgggcatgttgccrttacagctgtttctccccacagaratggttctgtaacctcaacaaagttgctgtttccttctaaggcaacttctgagctgagtcatagtgccaaatctgatgccggtttagtgggtggtggtgaagatggtgacactgatgatgatgrdgatgatgatgatgacagagrtagtgatggcttatccattcataagtgtatgtcatgctcatcctatagagaatcacaggaaaaggtaatgaatgattcagacacccacgaaaacagtcttatggatcagaataatccaatctcatactcactatctgagaattctgaagaagataatagagtcacaagtgtatcctcagacagtcaaactggtatggacagaagtcctggtaaatcaccatcagcaaatgggctatcccaaaagcacaatgatggaaaagaggaaaatgacattcagactggtagtgctctgcttcctctcagccctgaatctaaagcatgggcagttctgacaagtgatgaagaaagtggatcagggcaaggtacctcagatagccttaatgagaatgagacttccacagatttcagttttgcagacactaatgaaaaagatgctgatgggatcctggcagcaggtgactcagaaataactcctggattcccacagtccccaacatcatctgttactagcgagaackcagaagtgttccacgtttcagaggcagaggccagtaatagtagccatgagtctcgtattggtctagctgaggggttggaatccgagaagaaggcagttataccccttgtgatcgtgtcagccctgacttttatctgtctagtggttcttgtgggtattctcatctactggaggaaatgcttccagactgcacacttttacttagaggacagtacatcccctagagttatatccacacctccaacacctatctttccaatttcagatgatgtcggagcaattccaataaagcactttccaaagcatgttgcagatttacatgcaagtagtgggtttactgaagaatttgagacactgaaagagttttaccaggaagtgcagagctgtactgttgacttaggtattacagcagacagctccaaccacccagacaacaagcacaagaatcgatacataaatatcgttgcctatgatcatagcagggttaagctagcacagcttgctgaaaaggatggcaaactgactgattatatcaatgccaattatgttgatggctacaacagaccaaaagcttatattgctgcccaaggcccactgaaatccacagctgaagatttctggagaatgatatgggaacataatgtggaagttattgtcatgataacaaacctcgtggagaaaggaaggagaaaatgtgatcagtactggcctgccgatgggagtgaggagtacgggaactttctggtcactcagaagagtgtgcaagtgcttgcctattatactgtgaggaattttactctaagaaacacaaaaataaaaaagggctcccagaaaggaagacccagtggacgtgtggtcacacagtatcactacacgcagtggcctgacatgggagtaccagagtactccctgccagtgctgacctttgtgagaaaggcagcctatgccaagcgccatgcagtggggcctgttgtcgtccactgcagtgctggagttggaagaacaggcacatatattgtgctagacagtatgttgcagcagattcaacacgaaggaactgtcaacatatttggcttcttaaaacacatccgttcacaaagaaattatttggtacaaactgaggagcaatatgtcttcattcatgatacactggttgaggccatacttagtaaagaaactgaggtgctggacagtcatattcatgcctatgttaatgcactcctcattcctggaccagcaggcaaaacaaagctagagaaacaattccagctcctgagccagtcaaatatacagcagagtgactattctgcagccctaaagcaatgcaacagggaaaagaatcgaacttcttctatcatccctgtggaaagatcaagggttggcatttcatccctgagtggagaaggcacagactacatcaatgcctcctatatcatgggctattaccagagcaatgaattcatcattacccagcaccctctccttcataccatcaaggatttctggaggatgatatgggaccataatgcccaactggtggttatgattcctgatggccaaaacatggcagaagatgaatttgtttactggccaaataaagatgagcctataaattgtgagagctttaaggtcactcttatggctgaagaacacaaatgtctatctaatgaggaaaaacttataattcaggactttatcttagaagctacacaggatgattatgtacttgaagtgaggcactttcagtgtcctaaatggccaaatccagatagccccattagtaaaacttttgaacttataagtgttataaaagaagaagctgccaatagggatgggcctatgattgttcatgatgagcatggaggagtgacggcaggaactttctgtgctctgacaacccttatgcaccaactagaaaaagaaaattccgtggatgtttaccaggkagccaagatgatcaatctgatgaggccaggagtctttgctgacattgagcagtatcagtttctctacaaagtgatcctcagccttgtgagcacaaggcaggaagagaatccatccacctctctggacagtaatggtgcagcattgcctgatggaaatatagctgagagcttagagtctttagtttaacacagaaaggggtgggggractcacatctgagcattgttttcctcttcctaaaattaggcaggaaaatcagtctagttctgttatctgttgatttcccatcacctgacagtaactttcatgacataggattctgccgccaaatttatatcattaacaatgtgtgcctttttgcaagacttgtaatttacttattatgtttgaactaaaatgattgaattttacagtatttctaagaatggaattgtggtatttttttctgtattgattttaacagaaaatttcaatttatagaggttaggaattccaaactacagaaaatgtttgtttttagtgtcaaatttttagctgtatttgtagcaattatcaggtttgctagaaatataacttttaatacagtagcctgtaaataaaacactcttccatatgatattcaacattttacaactgcagtattcacctaaagtagaaataatctgttacttattgtaaatactgccctagtgtctccatggaccaaatttatatttataattgtagatttttatattttactactgagtcaagttttctagttctgtgtaattgtttagtttaatgacgtagttcattagctggtcttactctaccagttttctgacattgtattgtgttacctaagtcattaactttgtttcagcatgtaattttaacttttgtggaaaatagaaataccttcattttgaaagaagtttttatgagaataacaccttaccaaacattgttcaaatggtttttatccaaggaattgcaaaaataaatataaatattgccattaatttgt

SEQ ID NO: 6024 - DNA, 8136 bp, Homo sapiens
gcactgaggcttcgctgctctcggagcgctcagaccgcggccgccgcagccggcgaaagaggcaaagtcccgcacgccggaggacatgcgcctcggctagcggccccgggccccaccaccgtgcggctttctcsagattattcctctctcgctgtctctgactgtctctctctgtctctgtctctstctctctctctctcwcacacacacacacacacacaaacacacatacgcacgcacgatctcacttcgatctatacactggaggattaaaacaaacaaacaaaaaaaacatttcyttcgctccccctccctctccactctgagaagcagaggagccgcacggcgaggggccgcagaccgtctggaaatgcgaakcctaaagcktttcctcgcttgcattcagctcctctgtgtttgccgcctggattgggctaatggatactacagacaacagagaaaacttgttgaagagattggctggtcctatacaggagcactgaatcaaaaaaattggggaaagaaatatccaacatgtaatagcccaaaacaatctcctatcaatattgatgaagatcttacacaagtaaatgtgaatcttaagaaacttaaatttcagggttgggataaaacatcattggaaaacacattcattcataacactgggaaaacagtggaaattaatctcactaatgactaccgtgtcagcggaggagtttcagaaatggtgtttaaagcaagcaagataacttttcactggggaaaatgcaatatgtcatctgatggatcagagcatagtttagaaggacaaaaatttccacttgagatgcaaatctactgctttgatgcrgaccgattttcaagttttgaggaagcagtcaaaggaaaagggaagttaagagctttatccattttgtttgaggttgggacagaagaaaatttggatttcaaagcgattattgatggagtcgaaagtgttagtcgttttgggaagcaggctgctttagatccattcatactgttgaaccttctgccaaactcaactgacaagtattacatttacaatggctcattgacatctcctccctgcacagacacagttgactggattgtttttaaagatacagttagcatctctgaaagccagttggctgttttttgtgaagttcttacaatgcaacaatctggttatgtcatgctgatggactacttacaaaacaattttcgagagcaacagtacaagttctctagacaggtgttttcctcatacactggaaaggaagagattcatgaagcagtttgtagttcagaaccagaaaatgttcaggctgacccagagaattataccagccttcttgttacatgggaaagacctcgagtcgtttatgataccatgattgagaagtttgcagttttgtaccagcagttggatggagaggaccaaaccaagcatgaatttttgacagatggctatcaagacttgggtgctattctcaataatttgctacccaatatgagttatgttcttcagatagtagccatatgcactaatggcttatatggaaaatacagcgaccaactgattgtcgacatgcctactgataatcctgaacttgatcttttccctgaattaattggaactgaagaaataatcaaggaggaggaagagggaaaagacattgaagaaggcgctattgtgaatcctggtagagacagtgctacaaaccaaatcaggaaaaaggaaccccagatttctaccacaacacactacaatcgcatagggacgaaatacaatgaagccaagactaaccgatccccaacaagaggaagtgaattctctggaaagggtgatgttcccaatacatctttaaattccacttcccaaccagtcactaaattagccacagaaaaagatatttccttgacttctcagactgtgactgaactgccacctcacactgtggaaggtacttcagcctctttaaatgatggctctaaaactgttcttagatctccacatatgaacttgtcggggactgcagaatccttaaatacagtttctataacagaatatgaggaggagagtttattgaccagtttcaagcttgatactggagctgaagattcttcaggctccagtcccgcaacttctgctatcccattcatctctgagaacatatcccaagggtatatattttcctccgaaaacccagagacaataacatatgatgtccttataccagaatctgctagaaatgcttccgaagattcaacttcatcaggttcagaagaatcactaaaggatccttctatggagggaaatgtgtggtttcctagctctacagacataacagcacagcccgatgttggatcaggcagagagagctttctccagactaattacactgagatacgtgttgatgaatctgagaagacaaccaagtccttttctgcaggcccagtgatgtcacagggtccctcagttacagayctggaaatgccacattattctacctttgcctacttcccaactgaggtaacacctcatgcttttaccccatcctccagacaacaggatttggtctccacggtcaacgtggtatactcgcagacaacccaaccggtatacaatggtgagacacctcttcaaccttcctacagtagtgaagtctttcctctagtcacccctttgttgcttgacaatcagatcctcaacactacccctgctgcttcaagtagtgattcggccttgcatgctacgcctgtatttcccagtgtcgatgtgtcatttgaatccatcctgtcttcctatgatggtgcacctttgcttccattttcctctgcttccttcagtagtgaattgtttcgccatctgcatacagtttctcaaatccttccacaagttacttcagctaccgagagtgataaggtgcccttgcatgcttctctgccagtgsctgggggtgatttgctattagagcccagccttgctcagtattctgatgtgctgtccactactcatgctgcttcagagacgctggaatttggtagtgaatctggtgttctttataaaacgcttatgttttctcaagttgaaccacccagcagtgatgccatgatgcatgcacgttcttcagggcctgaaccttcttatgccttgtctgataatgagggctcccaacacatcttcactgtttcttacagttctgcaatacctgtgcatgattctgtgggtgtaacttatcagggttccttatttagcggccctagccatataccaatacctaagtcttcgttaataaccccaactgcatcattactgcagcctactcatgccctctctggtgatggggaatggtctggagcctcttctgatagtgaatttcttttacctgacacagatgggctgacagcccttaacatttcttcacctgtttctgtagctgaatttacatatacaacatctgtgtttggtgatgataataaggcgctttctaaaagtgaaataatatatggaaatgagactgaactgcaaattccttctttcaatgagatggtttacccttctgaaagcacagtcatgcccaacatgtatgataatgtaaataagttgaatgcgtctttacaagaaacctctgtttccatttctagcaccaagggcatgtttccagggtcccttgctcataccaccactaaggtttttgatcatgagattagtcaagttccagaaaataacttttcagttcaacctacacatactgtctctcaagcatctggtgacacttcgcttaaacctgtgcttagtgcaaactcagagccagcatcctctgaccctgcttctagtgaaatgttatctccttcaactcarctcttattttatgagacctcagcttcttttagtactgaagtattgctacaaccttcctttcaggcttctgatgttgacaccttgcttaaaactgttcttccagctgtgcccagtgatccaatattggttgaaacccccaaagttgataaaattagttctacaatgttgcatctcattgtatcaaattctgcttcaagtgaaaacatgctgcactctacatctgtaccagtttttgatgtgtcgcctacttctcatatgcactctgcttcacttcaaggtttgaccatttcctatgcaagtgagaaatatgaaccagttttgttaaaaagtgaaagttcccaccaagtggtaccttctttgtacagtaatgatgagttgttccaaacggccaatttggagattaaccaggcccatcccccaaaaggaaggcatgtatttgctacacctgttttatcaattgatgaaccattaaatacactaataaataagcttatacattccgatgaaattttaacctccaccaaaagttctgttactgrtaaggtatttgctggtattccaacagttgcttctgatacrtttgtatctactgatcattctgttcctataggaaatgggcatgttgccrttacagctgtttctccccacagaratggttctgtaacctcaacaaagttgctgtttccttctaaggcaacttctgagctgagtcatagtgccaaatctgatgccggtttagtgggtggtggtgaagatggtgacactgatgatgatgrdgatgatgatgatgacagagrtagtgatggcttatccattcataagtgtatgtcatgctcatcctatagagaatcacaggaaaaggtaatgaatgattcagacacccacgaaaacagtcttatggatcagaataatccaatctcatactcactatctgagaattctgaagaagataatagagtcacaagtgtatcctcagacagtcaaactggtatggacagaagtcctggtaaatcaccatcagcaaatgggctatcccaaaagcacaatgatggaaaagaggaaaatgacattcagactggtagtgctctgcttcctctcagccctgaatctaaagcatgggcagttctgacaagtgatgaagaaagtggatcagggcaaggtacctcagatagccttaatgagaatgagacttccacagatttcagttttgcagacactaatgaaaaagatgctgatgggatcctggcagcaggtgactcagaaataactcctggattcccacagtccccaacatcatctgttactagcgagaackcagaagtgttccacgtttcagaggcagaggccagtaatagtagccatgagtctcgtattggtctagctgaggggttggaatccgagaagaaggcagttataccccttgtgatcgtgtcagccctgacttttatctgtctagtggttcttgtgggtattctcatctactggaggaaatgcttccagactgcacacttttacttagaggacagtacatcccctagagttatatccacacctccaacacctatctttccaatttcagatgatgtcggagcaattccaataaagcactttccaaagcatgttgcagatttacatgcaagtagtgggtttactgaagaatttgagacactgaaagagttttaccaggaagtgcagagctgtactgttgacttaggtattacagcagacagctccaaccacccagacaacaagcacaagaatcgatacataaatatcgttgcctatgatcatagcagggttaagctagcacagcttgctgaaaaggatggcaaactgactgattatatcaatgccaattatgttgatggctacaacagaccaaaagcttatattgctgcccaaggcccactgaaatccacagctgaagatttctggagaatgatatgggaacataatgtggaagttattgtcatgataacaaacctcgtggagaaaggaaggagaaaatgtgatcagtactggcctgccgatgggagtgaggagtacgggaactttctggtcactcagaagagtgtgcaagtgcttgcctattatactgtgaggaattttactctaagaaacacaaaaataaaaaagggctcccagaaaggaagacccagtggacgtgtggtcacacagtatcactacacgcagtggcctgacatgggagtaccagagtactccctgccagtgctgacctttgtgagaaaggcagcctatgccaagcgccatgcagtggggcctgttgtcgtccactgcagtgctggagttggaagaacaggcacatatattgtgctagacagtatgttgcagcagattcaacacgaaggaactgtcaacatatttggcttcttaaaacacatccgttcacaaagaaattatttggtacaaactgaggagcaatatgtcttcattcatgatacactggttgaggccatacttagtaaagaaactgaggtgctggacagtcatattcatgcctatgttaatgcactcctcattcctggaccagcaggcaaaacaaagctagagaaacaattccagctcctgagccagtcaaatatacagcagagtgactattctgcagccctaaagcaatgcaacagggaaaagaatcgaacttcttctatcatccctgtggaaagatcaagggttggcatttcatccctgagtggagaaggcacagactacatcaatgcctcctatatcatgggctattaccagagcaatgaattcatcattacccagcaccctctccttcataccatcaaggatttctggaggatgatatgggaccataatgcccaactggtggttatgattcctgatggccaaaacatggcagaagatgaatttgtttactggccaaataaagatgagcctataaattgtgagagctttaaggtcactcttatggctgaagaacacaaatgtctatctaatgaggaaaaacttataattcaggactttatcttagaagctacacaggatgattatgtacttgaagtgaggcactttcagtgtcctaaatggccaaatccagatagccccattagtaaaacttttgaacttataagtgttataaaagaagaagctgccaatagggatgggcctatgattgttcatgatgagcatggaggagtgacggcaggaactttctgtgctctgacaacccttatgcaccaactagaaaaagaaaattccgtggatgtttaccaggkagccaagatgatcaatctgatgaggccaggagtctttgctgacattgagcagtatcagtttctctacaaagtgatcctcagccttgtgagcacaaggcaggaagagaatccatccacctctctggacagtaatggtgcagcattgcctgatggaaatatagctgagagcttagagtctttagtttaacacagaaaggggtgggggractcacatctgagcattgttttcctcttcctaaaattaggcaggaaaatcagtctagttctgttatctgttgatttcccatcacctgacagtaactttcatgacataggattctgccgccaaatttatatcattaacaatgtgtgcctttttgcaagacttgtaatttacttattatgtttgaactaaaatgattgaattttacagtatttctaagaatggaattgtggtatttttttctgtattgattttaacagaaaatttcaatttatagaggttaggaattccaaactacagaaaatgtttgtttttagtgtcaaatttttagctgtatttgtagcaattatcaggtttgctagaaatataacttttaatacagtagcctgtaaataaaacactcttccatatgatattcaacattttacaactgcagtattcacctaaagtagaaataatctgttacttattgtaaatactgccctagtgtctccatggaccaaatttatatttataattgtagatttttatattttactactgagtcaagttttctagttctgtgtaattgtttagtttaatgacgtagttcattagctggtcttactctaccagttttctgacattgtattgtgttacctaagtcattaactttgtttcagcatgtaattttaacttttgtggaaaatagaaataccttcattttgaaagaagtttttatgagaataacaccttaccaaacattgttcaaatggtttttatccaaggaattgcaaaaataaatataaatattgccattaatttgt

SEQ ID NO: 6025 - DNA, 2201 bp, Homo sapiens
agagcggcagccgcgcccctccgccccccgcgcgaccccgggtccgaggcacgctcccagcggagcggtcctgcgcccccgccccctccaggmgccgcggcgcgcacagccgggctggagcgcgcacccggcactgaggcttcgctgctctcggagcgctcagaccgcggccgccgcagccggcgaaagaggcaaagtcccgcacgccggaggacatgcgcctcggctagcggccccgggccccaccaccgtgcggctttctcsagattattcctctctcgctgtctctgactgtctctctctgtctctgtctctstctctctctctctcwcacacacacacacacacacaaacacacatacgcacgcacgatctcacttcgatctatacactggaggattaaaacaaacaaacaaaaaaaacatttcyttcgctccccctccctctccactctgagaagcagaggagccgcacggcgaggggccgcagaccgtctggaaatgcgaakcctaaagcktttcctcgcttgcattcagctcctctgtgtttgccgcctggattgggctaatggatactacagacaacagagaaaacttgttgaagagattggctggtcctatacaggagcactgaatcaaaaaaattggggaaagaaatatccaacatgtaatagcccaaaacaatctcctatcaatattgatgaagatcttacacaagtaaatgtgaatcttaagaaacttaaatttcagggttgggataaaacatcattggaaaacacattcattcataacactgggaaaacagtggaaattaatctcactaatgactaccgtgtcagcggaggagtttcagaaatggtgtttaaagcaagcaagataacttttcactggggaaaatgcaatatgtcatctgatggatcagagcatagtttagaaggacaaaaatttccacttgaggtaagtcaggagatctgctgtgtactattttattttctaaataattgatgtttttatttagcatataatttgattaattttaaaatccaatattaaaatttataaagtgatattttgattacttgattaatatactagactaagctaaattaatgtaagacttatctttgatttgccacttgctggtaagtagcaacccaaagtgccacaaaatggtaatcaataaatgctgatgaattaatgaatgaaggaaggaaaagggggacaatttcattaacatactggagaatcctttgatttaaatcttttgattaaaatgagaaaaattttcagctttaaaattggcaaagtaaataattataaaaaatgagtgtgtagtgaaatgttttcttacatgtctagagaaagtctaaattggtagactttctgggaagcagtttgcttgtttttattaagaattttaaatgatttacactaaatacccwacatttaaatttaaagccatttagtctaaaaatttaaaaattgcaaaaatttatttaaaatataatattgaaccaaaaggcaatgattatttaaatacattatgatggatattatagatttcacaaaartcatgtttttgaatgatatatatacatataaaaggctcatgataaggtattaatggttttaaaaagaaacatgttaagtggtataaccagtattatttttgcaattttttaatacattaaaattaattaaatattgactgagagtggagtctgaatcaaatggactaggtttgaatcttgactccaccatttggttattggttacatgacatacaatatataaattatttaacttaccaatgcttccatttttcttccrtgaaattgacatagtagctgcacctgccttataacattactatggaaattaaatgagggattgacttattactcataaaagtaattgaggagccaggcgcrgtggctcatgcctgtaatcccagcacttcgggaggccgagatgggcagatcactagaggtcaggagttccagaccagcctggccaacatggtgaaatgccacctctactaaaaacacaaaaattagctggtcatggtagcactcacctgtaatttcacctactcaggaggctgaggcatgggaatcacttgaactcaggaggtggaggttgcagtgagccaagatcacaccactgcactccagactgggtaatggagtgagacgctgtctc

SEQ ID NO: 6026 - DNA, 2273 bp, Homo sapiens
ttaaacccaggcagcctgcgctgcagccggttcctggtgtccccacttcrcctccctcctgctgcccccaagacatgcaggggccctgggtgctgctgctgctgggcctgaggctacagctctccctgggcrtcatcccagctgaggaggagaacccggccttctggaacckccaggcagctgaggccctggatgctgccaagaagctgcagcccatccagaaggtcgccaagaacctcatcctcttcctgggcgatgggttgggggtgcccacggtgacagccaccaggatcctaaaggggcagaagaatggcaaactggggcctgagacgcccctggccatggacygcttcccatacctggctctgtccaagacatacaatgtggacagacaggtgccagacagygcagccacagccacggcctacctgtgcggggtcaaggccaacttccagaccatcggcttgagtgcagccgcccgctttaaccagtgcaacacgacacrcggcaawgaggtcatctccgtgatgaaccgggccaagcaagcaggaaagtcagtrggagtggtraccaccacacgggtgcagcacgcctcgccagccggcacctacgcacacacagtgaaccgcaactggtactcagatgctgacatgcctgcctcagcccgccaggaggggtgccaggacatcgccactcagctcatctccaacatggacattgacgtgatccttggcggaggccgcaagtacatgtttcccatggggaccccagaccctgagtacccagctgatgccagccagaatggaatcaggctggacgggaagaacctggtgcaggaatggctggcaaagcaccagggtgcctggtatgtgtggaaccgcactgagctcatgcaggcgtccctggaccagtctgtgacccatctcatgggcctctttgagcccggagacacgaaatatgagatccwccgagaccccacactggacccctccctgatggagatgacagaggctgccctgcgcctgctgagcaggaacccccgcggcttctacctctttgtggagggcggccgcatcgaccatggtcatcatgagggtgtggcttaccaggcactcactgaggcggtcatgttcgacgacgccattgagagggcgggccagctcaccagcgaggaggacacgctgaccctcgtcaccgctgaccactcccatgtcttctcctttggtggctacaccttgcgagggagctccatcttcgggttggcccccagcaaggctcaggacagcaaagcctacacgtccatcctgtacggcaatggcccgggctacgtgttcaactcaggcgtgcgaccagacgtgaatgaragcgagagcgggagccccgattaccagcagcaggcggcggtgcccctgtcgtccgagacccacggaggcgaagacgtggcggtgtttgcgcgcggcccgcaggcgcacctggtgcatggtgtgcaggagcagagcttcgtagcgcatgtcatggccttcgctgcctgtctggagccctacacggcctgcgacctggcgcctcccgcctgcaccaccgacgccgcgcacccagttgccgcgtcgctgccactgctggccgggaccctgctgctgctgggggcgtccgctgctccctgaactgcagatttgtgccatgcggctgcctgcaccccagacaataaagggaccaaaaccacccaacccccaccctgcctctakcctaaggaagaccaagcaggcctggacccagagacgtcccccatcgtgggacacgacacacccagaccgcgtgccccaccgtcttagcttcaatcctggcagcacctggtagacccaaggacttgggtggatcaggacacctgaagaagagaagcttccggcaaccctgcaacccacccaaggaggctactggatcggggattcccaggggggctttgacacagtcctctgctgtctccccactaggatcattccacacccctgcacctgaccaagggaccmatgaggcagaggcttgccccaagtcacagccactcagatgcttcctgccccccagtgcccattccaggtcaccagatccaaggagcgcttgaggagctctgggtacagggcagcaacccagagcccatgggccctcccgggacatctggatgctgggcatagatttctcaacaaggaagactcccctgcctcctcaaggtctccattctcctaggagacaaagcaataataaaaggtgttagacaatgt

SEQ ID NO: 6027 - DNA, 2287 bp, Homo sapiens
ggttgggggtgcccacggtgacagccaccaggatcctaaaggggcagaagaatggcaaactggggcctgagacgcccctggccatggacygcttcccatacctggctctgtccaagacatacaatgtggacagacaggtgccagacagygcagccacagccacggcctacctgtgcggggtcaaggccaacttccagaccatcggcttgagtgcagccgcccgctttaaccagtgcaacacgacacrcggcaawgaggtcatctccgtgatgaaccgggccaagcaagcaggaaagtcagtrggagtggtraccaccacacgggtgcagcacgcctcgccagccggcacctacgcacacacagtgaaccgcaactggtactcagatgctgacatgcctgcctcagcccgccaggaggggtgccaggacatcgccactcagctcatctccaacatggacattgacgtgatccttggcggaggccgcaagtacatgtttcccatggggaccccagaccctgagtacccagctgatgccagccagaatggaatcaggctggacgggaagaacctggtgcaggaatggctggcaaagcaccagggtgcctggtatgtgtggaaccgcactgagctcatgcaggcgtccctggaccagtctgtgacccatctcatgggcctctttgagcccggagacacgaaatatgagatccwccgagaccccacactggacccctccctgatggagatgacagaggctgccctgcgcctgctgagcaggaacccccgcggcttctacctctttgtggagggcggccgcatcgaccatggtcatcatgagggtgtggcttaccaggcactcactgaggcggtcatgttcgacgacgccattgagagggcgggccagctcaccagcgaggaggacacgctgaccctcgtcaccgctgaccactcccatgtcttctcctttggtggctacaccttgcgagggagctccatcttcgggttggcccccagcaaggctcaggacagcaaagcctacacgtccatcctgtacggcaatggcccgggctacgtgttcaactcaggcgtgcgaccagacgtgaatgaragcgagagcgggagccccgattaccagcagcaggcggcggtgcccctgtcgtccgagacccacggaggcgaagacgtggcggtgtttgcgcgcggcccgcaggcgcacctggtgcatggtgtgcaggagcagagcttcgtagcgcatgtcatggccttcgctgcctgtctggagccctacacggcctgcgacctggcgcctcccgcctgcaccaccgacgccgcgcacccagttgccgcgtcgctgccactgctggccgggaccctgctgctgctgggggcgtccgctgctccctgagtgccccactccggagttatcctgctccccacctccgggcgtcctgccctgttccccgtcctgagccgccacttccagcgaacacacacaggtgtcctgccgttggaccttcacctcctagagataaaccagcctcagctggcgcagcggggcccttcttccctccgcatccccttcagggagcaggagcccagggcgccctgggagctgagcctgggacttccaggacctcccctcaggttgttctctgattcttcctcccaaccccagagactgcagatttgtgccatgcggctgcctgcaccccagacaataaagggaccaaaaccacccaacccccaccctgcctctakcctaaggaagaccaagcaggcctggacccagagacgtcccccatcgtgggacacgacacacccagaccgcgtgccccaccgtcttagcttcaatcctggcagcacctggtagacccaaggacttgggtggatcaggacacctgaagaagagaagcttccggcaaccctgcaacccacccaaggaggctactggatcggggattcccaggggggctttgacacagtcctctgctgtctccccactaggatcattccacacccctgcacctgaccaagggaccmatgaggcagaggcttgccccaagtcacagccactcagatgcttcctgccccccagtgcccattccaggtcaccagatccaaggagcgcttgaggagctctgggtacagggcagcaacccagagcccatgggccctcccgggacatctggatgctgggcatagatttctcaacaaggaagactcccctgcctcctcaaggtctccattctcctaggagacaaagcaataataaaaggtgttagacaatgt

SEQ ID NO: 6028 - DNA, 2545 bp, Homo sapiens
ttaaacccaggcagcctgcgctgcagccggttcctggtgtccccacttcrcctccctcctgctgcccccaagacatgcaggggccctgggtgctgctgctgctgggcctgaggctacagctctccctgggcrtcatcccagctgaggaggagaacccggccttctggaacckccaggcagctgaggccctggatgctgccaagaagctgcagcccatccagaaggtcgccaagaacctcatcctcttcctgggcgatgggttgggggtgcccacggtgacagccaccaggatcctaaaggggcagaagaatggcaaactggggcctgagacgcccctggccatggacygcttcccatacctggctctgtccaagacatacaatgtggacagacaggtgccagacagygcagccacagccacggcctacctgtgcggggtcaaggccaacttccagaccatcggcttgagtgcagccgcccgctttaaccagtgcaacacgacacrcggcaawgaggtcatctccgtgatgaaccgggccaagcaagcaggaaagtcagtrggagtggtraccaccacacgggtgcagcacgcctcgccagccggcacctacgcacacacagtgaaccgcaactggtactcagatgctgacatgcctgcctcagcccgccaggaggggtgccaggacatcgccactcagctcatctccaacatggacattgacgtgatccttggcggaggccgcaagtacatgtttcccatggggaccccagaccctgagtacccagctgatgccagccagaatggaatcaggctggacgggaagaacctggtgcaggaatggctggcaaagcaccagggtgcctggtatgtgtggaaccgcactgagctcatgcaggcgtccctggaccagtctgtgacccatctcatgggcctctttgagcccggagacacgaaatatgagatccwccgagaccccacactggacccctccctgatggagatgacagaggctgccctgcgcctgctgagcaggaacccccgcggcttctacctctttgtggagggcggccgcatcgaccatggtcatcatgagggtgtggcttaccaggcactcactgaggcggtcatgttcgacgacgccattgagagggcgggccagctcaccagcgaggaggacacgctgaccctcgtcaccgctgaccactcccatgtcttctcctttggtggctacaccttgcgagggagctccatcttcgggttggcccccagcaaggctcaggacagcaaagcctacacgtccatcctgtacggcaatggcccgggctacgtgttcaactcaggcgtgcgaccagacgtgaatgaragcgagagcgggagccccgattaccagcagcaggcggcggtgcccctgtcgtccgagacccacggaggcgaagacgtggcggtgtttgcgcgcggcccgcaggcgcacctggtgcatggtgtgcaggagcagagcttcgtagcgcatgtcatggccttcgctgcctgtctggagccctacacggcctgcgacctggcgcctcccgcctgcaccaccgacgccgcgcacccagttgccgcgtcgctgccactgctggccgggaccctgctgctgctgggggcgtccgctgctccctgagtgccccactccggagttatcctgctccccacctccgggcgtcctgccctgttccccgtcctgagccgccacttccagcgaacacacacaggtgtcctgccgttggaccttcacctcctagagataaaccagcctcagctggcgcagcggggcccttcttccctccgcatccccttcagggagcaggagcccagggcgccctgggagctgagcctgggacttccaggacctcccctcaggttgttctctgattcttcctcccaaccccagagactgcagatttgtgccatgcggctgcctgcaccccagacaataaagggaccaaaaccacccaacccccaccctgcctctakcctaaggaagaccaagcaggcctggacccagagacgtcccccatcgtgggacacgacacacccagaccgcgtgccccaccgtcttagcttcaatcctggcagcacctggtagacccaaggacttgggtggatcaggacacctgaagaagagaagcttccggcaaccctgcaacccacccaaggaggctactggatcggggattcccaggggggctttgacacagtcctctgctgtctccccactaggatcattccacacccctgcacctgaccaagggaccmatgaggcagaggcttgccccaagtcacagccactcagatgcttcctgccccccagtgcccattccaggtcaccagatccaaggagcgcttgaggagctctgggtacagggcagcaacccagagcccatgggccctcccgggacatctggatgctgggcatagatttctcaacaaggaagactcccctgcctcctcaaggtctccattctcctaggagacaaagcaataataaaaggtgttagacaatgt

SEQ ID NO: 6029 - DNA, 1143 bp, Homo sapiens
atggcgtcccttcctgtcctgcagaaggagagmgtgttccagtcgggagcccatgcctacagaatccctgccctgctctacctgcctgggcagcagtccctgctggccttcgcggaacagcrggcaagcaagaaggatgagcaygcagagctgattgtcctgcgcagaggagactacgacgcacccacccaccaggttcagtggcaagctcaggaggtggtggcccaggcccggctggatggccaccggtccatgaacccatgccccttgtatgacgcrcagacggggaccctyttcctcttcttcattgccatccctgggcaagtmacggagcaacagcagctgcagaccagggccaatgtgacgcggctgtgccaagtcaccagcactgaccacgggaggacctggagctcccccagagacctcactgatrcggccatcggcccagcctaccgggagtggtccacctttgcagtgggcccggggcattgtttgcagcttmaygacagggcccggagcctggtggtgcccgcctacgcctaccrgaaasttcaccccatccaaaggccgatcccctctgccttctgcttcctcagccatgaccatgggcgcacgtgggsgcgagggcactttgtggcccaggacaccctggagtgccaggtggccgaagtcgagactggggagcagagggtggtgaccctcaacgcgagaagccacctccgagccagggtccaggcccagagcaccaatgaygggcttgatttccaggagtctcagctggtgaagaagctggtggagccrccgccccagggctgccaggggagcgtcatcagcttccccagcccccgctcggggcctggctccccagcccagtggctgctctacactcaccccacacactcctggcagagggccgacctgggtgcctacctcaacccgcgacctccagcccctgaggcctggtcagagccggtactgctggccaagggcagctgtgcctactcagacctccagagcatgggcaccggccctgatgggtcccccttgtttgggtgtctgtacgaagccaatgattacgaggagattgtctttctcatgttcaccctgaagcaagccttcccagctgagtacctgcctcagtga

SEQ ID NO: 6030 - DNA, 2517 bp, Homo sapiens
atgaagaaactgaggttcagagaggttaagagactccactgaggtcacacagccgatgacagacaaccttctgtgccttcatcaagctggttgtgtacccaccatgtccctggcgacaggatgggaaagaaaaagccctaattaaggatmgtcagaaaccacagttggaggaggacggcagagacagtttccctccccgctataccaacacccttccttcgaggtcctcgctcctgagggaccctggactgtcacagagattaatgaccccttatyttctttggatgtgaaaggaaatcactggttaaagcttgatcgagagacattatcagctctttaaggattgcagragaataggctactttattttctgaaaaggtaaatatatgcaagcaaagccaacatgccacgaatgrcgttggtctaccacacagccgtgtctgggacacagttgggggtcatcccccagcaggagtgaagtcgagcttagcggcccttgtgtcctcccttggaattcctgccatcccttttgattgagcctccacctctgggatttttcttccatttttctcctctcttaggagggagttcctgctacccatcgtgggaggccaccatcaggactgcgaagatggtgaccctgcggaagaggaccctgaaagtgctcaccttcctcgtgctcttcatcttcctcacctccttcttcctgaactactcccacaccatggtggccaccacctggttccccaagcagatggtcctggagctctccgagaacctgaagagactgatcaagcacaggccttgcacctgcacccactgcatcgggcagcgcaagctctcggcctggttcgatgagaggttcaaccagaccatgcagccgctgctgacygcccagaacgcgctcttggaggacgacacctaccgatggtggctgaggctccagcgggagaagaagcccartaacttgaatgacaccatcaaggagctgttcagagtggtgcctgggaatgtggaccctatgctggagaagaggtcggtgggctgccggcgctgcgccgttgtgggcaactcgggcaacctgagggagtcttcttatgggcctgagatagacagtcacgactttgtcctcaggatgaacaaggcgcccacggcagggtttgaagctgatgttgggaccaagaccacccaccatctggtgtaccctgagagcttccgggagctgggagataatgtcagcatgatcctggtgcccttcaagaccatcgacttggagtgggtggtgagcgccatcaccacgggcaccatttcccacacctacatcccggttcctgcaaagatcagagtgaaacaggataagatcctgatctaccacccagccttcatcaagtatgtctttgacaactggctgcaagggcaygggcgatacccatctaccggcatcctctcrgtcatcttctcaatgcatgtctgcgatgaggtggacttgtacggcttcggggcagacagcaaagggaactggcaccactactgggagaacaacccatccgcgggggcttttcgcaagacgggggtgcacgatgcagactttgagtctaacgtgacggccaccttggcctccatcaataaaatccggatcttcaaggggagatgacgcagtgaagggctgaggatggacgcactgtcacacctctgcatttccagccccagcatcttgctggagccgttccatcccggagcttggaggggcagcctcaggtgtgtgcctgggcaccgctcacagcctcttgcacccagccgttggcagcatctactcagcaaggtcactaagctctgccagcgtggcagagcatgtcttggaacctgtcttgagtggggacaacgtccccccactgctgccctagagctggggagacgctgggaaaggttcaacctccacacactaaaatcattttggctcctggggcaagcttggggaatgaatgtggaagatgcctatattctgagagacaggacagtttcccaggaagatgggcagagacttgagtggcgattacctccagcacagagacgtgccaggcggtgttggcgctcggggcgagatgctgcccttctttgcacgaagcctggcctcttgcttggcgtgataaccctgtcatcttcccaaagctcatttatgagccaccagaggctcctaccccaaagattttcacagaaacttgaggccaggtgccrtggctcacacctgtaatctgaacactttgggaggccgaggcgggaggatcacttgagcccaggagttcaagaccagcctgggcaacatagtgagactcctgtctctacaaaaataaaagatttaaaaaaattagccaggcacggtggcacacacttgtagccccagctactagggaggctgaggagggaggatctcttgtgcctaggagttcgaggctgcagtgggctgtgatcacaccactgcactccagcctgggcaacagagtgagaccctgtctctga

SEQ ID NO: 6031 - DNA, 3591 bp, Homo sapiens
cccgggggaaggtgttcccgagccctctcccaccctcatcccgcctcctcgcttcctcggctccagcctccgccggcggagcccactatgccagacagtttcgacactttgcaaagacaaagagccctagaccggagggaggaggaggaggaagaagagcggagagagaaggaagaggcgatgtgagctgggaagggggcaagtgtccgggacacccacacccctgtattctcctccgaaccccttcatgcccaaatcccggaaactccagcgtgtctccagccgtggtgagtgcgcgcgcggaggcgaaccctgctcggggtgcgcgggggctgcgtccgcctgagttggggctcgggcagtttcctgtggattctcggagtggaaggttgattgtctggacccgggaactgaaggggtggggaggggactaggagggtgtgacagtggagctgggactgaagaccccgggattctagtggaagacattcgaagggagaccccttccttggcagcggcgaccacccagggctttgggagaggaagaaggtcggggtggaggttcgggcttaggggtcttcggccgacactggaggagctgcctggagctctgtggggaacctacgccaagtcccgggcagcggttcccgaaagcagccccagtgacattgcacccggcgccgggctgggatctcctccgctggggccgcccgtgggaggagacctcgctgggtggccgggctcaggcgctctcgagcggatttggggtcacaggctgggacaccgcggaggccgccagtgttctggacgagcggccgtgggacagtatccggatcgagtcccccaatccgctgcaagcaggcgcagatccgggaggtggctatcggccccggggacgccgtcagagcgcgctgctccggatctgggggtgaagttgacacccgggacaagagagctgaacgcggcgtggcggacattggtaccattttcagatttcatcttcctaaactggaaatgtcaatgagaggaaattaacacccccaagagctgcagtgagcaaatgcattgagcttgggtcaggacaattccatttggggaccagagatggacggtcactcagcctatggagatgacagacaaccttctgtgccttcatcaagctggttgtgtacccaccatgtccctggcgacaggatgggaaagaaaaagccctaattaaggatmgtcagaaaccacagttggaggaggacggcagagacagtttccctccccgctataccaacacccttccttcgaggtcctcgctcctgagggaccctggactgtcacagagattaatgaccccttatyttctttggatgtgaaaggaaatcactggttaaagcttgatcgagagacattatcagctctttaaggattgcagragaataggctactttattttctgaaaaggtaaatatatgcaagcaaagccaacatgccacgaatgrcgttggtctaccacacagccgtgtctgggacacagttgggggtcatcccccagcaggagtgaagtcgagcttagcggcccttgtgtcctcccttggaattcctgccatcccttttgattgagcctccacctctgggatttttcttccatttttctcctctcttaggagggagttcctgctacccatcgtgggaggccaccatcaggactgcgaagatggtgaccctgcggaagaggaccctgaaagtgctcaccttcctcgtgctcttcatcttcctcacctccttcttcctgaactactcccacaccatggtggccaccacctggttccccaagcagatggtcctggagctctccgagaacctgaagagactgatcaagcacaggccttgcacctgcacccactgcatcgggcagcgcaagctctcggcctggttcgatgagaggttcaaccagaccatgcagccgctgctgacygcccagaacgcgctcttggaggacgacacctaccgatggtggctgaggctccagcgggagaagaagcccartaacttgaatgacaccatcaaggagctgttcagagtggtgcctgggaatgtggaccctatgctggagaagaggtcggtgggctgccggcgctgcgccgttgtgggcaactcgggcaacctgagggagtcttcttatgggcctgagatagacagtcacgactttgtcctcaggatgaacaaggcgcccacggcagggtttgaagctgatgttgggaccaagaccacccaccatctggtgtaccctgagagcttccgggagctgggagataatgtcagcatgatcctggtgcccttcaagaccatcgacttggagtgggtggtgagcgccatcaccacgggcaccatttcccacacctacatcccggttcctgcaaagatcagagtgaaacaggataagatcctgatctaccacccagccttcatcaagtatgtctttgacaactggctgcaagggcaygggcgatacccatctaccggcatcctctcrgtcatcttctcaatgcatgtctgcgatgaggtggacttgtacggcttcggggcagacagcaaagggaactggcaccactactgggagaacaacccatccgcgggggcttttcgcaagacgggggtgcacgatgcagactttgagtctaacgtgacggccaccttggcctccatcaataaaatccggatcttcaaggggagatgacgcagtgaagggctgaggatggacgcactgtcacacctctgcatttccagccccagcatcttgctggagccgttccatcccggagcttggaggggcagcctcaggtgtgtgcctgggcaccgctcacagcctcttgcacccagccgttggcagcatctactcagcaaggtcactaagctctgccagcgtggcagagcatgtcttggaacctgtcttgagtggggacaacgtccccccactgctgccctagagctggggagacgctgggaaaggttcaacctccacacactaaaatcattttggctcctggggcaagcttggggaatgaatgtggaagatgcctatattctgagagacaggacagtttcccaggaagatgggcagagacttgagtggcgattacctccagcacagagacgtgccaggcggtgttggcgctcggggcgagatgctgcccttctttgcacgaagcctggcctcttgcttggcgtgataaccctgtcatcttcccaaagctcatttatgagccaccagaggctcctaccccaaagattttcacagaaacttgaggccaggtgccrtggctcacacctgtaatctgaacactttgggaggccgaggcgggaggatcacttgagcccaggagttcaagaccagcctgggcaacatagtgagactcctgtctctacaaaaataaaagatttaaaaaaattagccaggcacggtggcacacacttgtagccccagctactagggaggctgaggagggaggatctcttgtgcctaggagttcgaggctgcagtgggctgtgatcacaccactgcactccagcctgggcaacagagtgagaccctgtctctga

SEQ ID NO: 6032 - DNA, 2728 bp, Homo sapiens
cgatgtgagctgggaagggggcaagtgtccgggacacccacacccctgtattctcctccgaaccccttcatgcccaaatcccggaaactccagcgtgtctccagccgtggaaattaacacccccaagagctgcagtgagcaaatgcattgagcttgggtcaggacaattccatttggggaccagagatggacggtcactcagcctatggagatgaagaaactgaggttcagagaggttaagagactccactgaggtcacacagccgatgacagacaaccttctgtgccttcatcaagctggttgtgtacccaccatgtccctggcgacaggatgggaaagaaaaagccctaattaaggatmgtcagaaaccacagttggaggaggacggcagagacagtttccctccccgctataccaacacccttccttcgaggtcctcgctcctgagggaccctggactgtcacagagattaatgaccccttatyttctttggatgtgaaaggaaatcactggttaaagcttgatcgagagacattatcagctctttaaggattgcagragaataggctactttattttctgaaaaggtaaatatatgcaagcaaagccaacatgccacgaatgrcgttggtctaccacacagccgtgtctgggacacagttgggggtcatcccccagcaggagtgaagtcgagcttagcggcccttgtgtcctcccttggaattcctgccatcccttttgattgagcctccacctctgggatttttcttccatttttctcctctcttaggagggagttcctgctacccatcgtgggaggccaccatcaggactgcgaagatggtgaccctgcggaagaggaccctgaaagtgctcaccttcctcgtgctcttcatcttcctcacctccttcttcctgaactactcccacaccatggtggccaccacctggttccccaagcagatggtcctggagctctccgagaacctgaagagactgatcaagcacaggccttgcacctgcacccactgcatcgggcagcgcaagctctcggcctggttcgatgagaggttcaaccagaccatgcagccgctgctgacygcccagaacgcgctcttggaggacgacacctaccgatggtggctgaggctccagcgggagaagaagcccartaacttgaatgacaccatcaaggagctgttcagagtggtgcctgggaatgtggaccctatgctggagaagaggtcggtgggctgccggcgctgcgccgttgtgggcaactcgggcaacctgagggagtcttcttatgggcctgagatagacagtcacgactttgtcctcaggatgaacaaggcgcccacggcagggtttgaagctgatgttgggaccaagaccacccaccatctggtgtaccctgagagcttccgggagctgggagataatgtcagcatgatcctggtgcccttcaagaccatcgacttggagtgggtggtgagcgccatcaccacgggcaccatttcccacacctacatcccggttcctgcaaagatcagagtgaaacaggataagatcctgatctaccacccagccttcatcaagtatgtctttgacaactggctgcaagggcaygggcgatacccatctaccggcatcctctcrgtcatcttctcaatgcatgtctgcgatgaggtggacttgtacggcttcggggcagacagcaaagggaactggcaccactactgggagaacaacccatccgcgggggcttttcgcaagacgggggtgcacgatgcagactttgagtctaacgtgacggccaccttggcctccatcaataaaatccggatcttcaaggggagatgacgcagtgaagggctgaggatggacgcactgtcacacctctgcatttccagccccagcatcttgctggagccgttccatcccggagcttggaggggcagcctcaggtgtgtgcctgggcaccgctcacagcctcttgcacccagccgttggcagcatctactcagcaaggtcactaagctctgccagcgtggcagagcatgtcttggaacctgtcttgagtggggacaacgtccccccactgctgccctagagctggggagacgctgggaaaggttcaacctccacacactaaaatcattttggctcctggggcaagcttggggaatgaatgtggaagatgcctatattctgagagacaggacagtttcccaggaagatgggcagagacttgagtggcgattacctccagcacagagacgtgccaggcggtgttggcgctcggggcgagatgctgcccttctttgcacgaagcctggcctcttgcttggcgtgataaccctgtcatcttcccaaagctcatttatgagccaccagaggctcctaccccaaagattttcacagaaacttgaggccaggtgccrtggctcacacctgtaatctgaacactttgggaggccgaggcgggaggatcacttgagcccaggagttcaagaccagcctgggcaacatagtgagactcctgtctctacaaaaataaaagatttaaaaaaattagccaggcacggtggcacacacttgtagccccagctactagggaggctgaggagggaggatctcttgtgcctaggagttcgaggctgcagtgggctgtgatcacaccactgcactccagcctgggcaacagagtgagaccctgtctctga

SEQ ID NO: 6033 - DNA, 3388 bp, Homo sapiens
cccgggggaaggtgttcccgagccctctcccaccctcatcccgcctcctcgcttcctcggctccagcctccgccggcggagcccactatgccagacagtttcgacactttgcaaagacaaagagccctagaccggagggaggaggaggaggaagaagagcggagagagaaggaagaggcgatgtgagctgggaagggggcaagtgtccgggacacccacacccctgtattctcctccgaaccccttcatgcccaaatcccggaaactccagcgtgtctccagccgtggtgagtgcgcgcgcggaggcgaaccctgctcggggtgcgcgggggctgcgtccgcctgagttggggctcgggcagtttcctgtggattctcggagtggaaggttgattgtctggacccgggaactgaaggggtggggaggggactaggagggtgtgacagtggagctgggactgaagaccccgggattctagtggaagacattcgaagggagaccccttccttggcagcggcgaccacccagggctttgggagaggaagaaggtcggggtggaggttcgggcttaggggtcttcggccgacactggaggagctgcctggagctctgtggggaacctacgccaagtcccgggcagcggttcccgaaagcagccccagtgacattgcacccggcgccgggctgggatctcctccgctggggccgcccgtgggaggagacctcgctgggtggccgggctcaggcgctctcgagcggatttggggtcacaggctgggacaccgcggaggccgccagtgttctggacgagcggccgtgggacagtatccggatcgagtcccccaatccgctgcaagcaggcgcagatccgggaggtggctatcggccccggggacgccgtcagagcgcgctgctccggatctgggggtgaagttgacacccgggacaagagagctgaacgcggcgtggcggacattggtaccattttcagatttcatcttcctaaactggaaatgtcaatgagaggaaattaacacccccaagagctgcagtgagcaaatgcattgagcttgggtcaggacaattccatttggggaccagagatggacggtcactcagcctatggagatgacagacaaccttctgtgccttcatcaagctggttgtgtacccaccatgtccctggcgacaggatgggaaagaaaaagccctaattaaggatmgtcagaaaccacagttggaggaggacggcagagacagtttccctccccgctataccaacacccttccttcgaggtcctcgctcctgagggaccctggactgtcacagagattaatgaccccttatyttctttggatgtgaaaggaaatcactggttaaagcttgatcgagagacattatcagctctttaaggattgcagragaataggctactttattttctgaaaaggagggagttcctgctacccatcgtgggaggccaccatcaggactgcgaagatggtgaccctgcggaagaggaccctgaaagtgctcaccttcctcgtgctcttcatcttcctcacctccttcttcctgaactactcccacaccatggtggccaccacctggttccccaagcagatggtcctggagctctccgagaacctgaagagactgatcaagcacaggccttgcacctgcacccactgcatcgggcagcgcaagctctcggcctggttcgatgagaggttcaaccagaccatgcagccgctgctgacygcccagaacgcgctcttggaggacgacacctaccgatggtggctgaggctccagcgggagaagaagcccartaacttgaatgacaccatcaaggagctgttcagagtggtgcctgggaatgtggaccctatgctggagaagaggtcggtgggctgccggcgctgcgccgttgtgggcaactcgggcaacctgagggagtcttcttatgggcctgagatagacagtcacgactttgtcctcaggatgaacaaggcgcccacggcagggtttgaagctgatgttgggaccaagaccacccaccatctggtgtaccctgagagcttccgggagctgggagataatgtcagcatgatcctggtgcccttcaagaccatcgacttggagtgggtggtgagcgccatcaccacgggcaccatttcccacacctacatcccggttcctgcaaagatcagagtgaaacaggataagatcctgatctaccacccagccttcatcaagtatgtctttgacaactggctgcaagggcaygggcgatacccatctaccggcatcctctcrgtcatcttctcaatgcatgtctgcgatgaggtggacttgtacggcttcggggcagacagcaaagggaactggcaccactactgggagaacaacccatccgcgggggcttttcgcaagacgggggtgcacgatgcagactttgagtctaacgtgacggccaccttggcctccatcaataaaatccggatcttcaaggggagatgacgcagtgaagggctgaggatggacgcactgtcacacctctgcatttccagccccagcatcttgctggagccgttccatcccggagcttggaggggcagcctcaggtgtgtgcctgggcaccgctcacagcctcttgcacccagccgttggcagcatctactcagcaaggtcactaagctctgccagcgtggcagagcatgtcttggaacctgtcttgagtggggacaacgtccccccactgctgccctagagctggggagacgctgggaaaggttcaacctccacacactaaaatcattttggctcctggggcaagcttggggaatgaatgtggaagatgcctatattctgagagacaggacagtttcccaggaagatgggcagagacttgagtggcgattacctccagcacagagacgtgccaggcggtgttggcgctcggggcgagatgctgcccttctttgcacgaagcctggcctcttgcttggcgtgataaccctgtcatcttcccaaagctcatttatgagccaccagaggctcctaccccaaagattttcacagaaacttgaggccaggtgccrtggctcacacctgtaatctgaacactttgggaggccgaggcgggaggatcacttgagcccaggagttcaagaccagcctgggcaacatagtgagactcctgtctctacaaaaataaaagatttaaaaaaattagccaggcacggtggcacacacttgtagccccagctactagggaggctgaggagggaggatctcttgtgcctaggagttcgaggctgcagtgggctgtgatcacaccactgcactccagcctgggcaacagagtgagaccctgtctctga

SEQ ID NO: 6034 - DNA, 735 bp, Homo sapiens
atggctgagagggaagaggacgacracactgaggaagcctggatgcagctacggcccacagaacccttgccttcccagtgctgcggcagtggctgctcaccctgtgtgtttgacctctatcaccgagatctggcaaragggatagtagatgacttagaaattcagagagcctatacgcccatcagccctgccaacgcagaaggatactttgaagtgttaattaagtgctaccagatggggctgatgtcccggtatgttgagtcctggagagtaggagacacagctttctggcgaggacctttcggagatttcttctataaaccaaaccagtatggtgagctcctcttgctggctgcgggcacgggcctggcccccatggtgcctatcctgcagagcatcacagacaatgagaatgacgagacttttgtcactctggtcggttgcttcaagacctttsagagcatctacctgaaaaccttcctccaagagcaggcccrtttctggaatgtccgtaccttctttgtactcagccaggagagctcctcagagcagcttccctggagttaccaagagaaaacccactttggccacctgggccaggacctaattaaagagctggtcagctgctgtcggagaaagccattcgcactggtctgtggctcggctgagttcaccaaagacatagccaggtgcttactgtgygcaggcctcrctgaggactcctatttcctcttc

SEQ ID NO: 6035 - DNA, 1466 bp, Homo sapiens
atgtctatctgtacttttcaatcaactgagaaagacgagaaaaaagaagctcacactgggaatgtaatgactaatttatcaaatgcttatgcttcagatttgttgctatgcaaagatgacaaagacttaacaaaatattttctgctgcaagtggtagatattcttctacagtatgcaaaaacacctttgatggtaagagtgaaatattggacttccatcatcctcatcaactacttgaaggtttggttgggtttaccttagaactgcctgaccaccctgaatctctggaacagttacttgctgattgcacagataccttaaaatacagtgttaaaacaggacatcctcgctattttaaccagctgtccagtgggttagatatgactggacttgcaggggaatggttgacagccactgcaaataccaacctgtttacatatgaaatagccccagtttttactgtcatggagacaattcttctcaagaaaatgtatgaaattattggctgggaagaaacaagcagatggaatattttcacctgtatatcaagcctttatggtattttagtagctcactataaacaatatccagagataaaaacaaaaggcatgactgcacttccatgcattrtattatttgtttctgagcaaggccaaactccattctgtgtctgtgccacagccggaagcacagtgtacggagccttcgaccctctccctgacatcgctgatatttgtgagaagcacaaactctggatgcatgtggatgcagcttggggaggtggactgctgctatccagaaactattcctataaactcagtggyattgaaagttctgagggaatctttattcattttctcatacctagtgcattatcagctctgctgactggaactgttaacattatctctgcttcagctcctgctaagttggctgcatggcagcaatatcccatccacaaaatggcagatgctcaaagcctgcagggccttctagatgcatgtaatcagatgcaagctgaatatcttttccagtcaggtaaactctacaatgttgactttgacacggcggataaaactattcagtgtggccgacatgttgatatcttcaagcagtggttaatgtggaaagcaaagggaacccttggctttgaggaacaaatcaacaaatatatggaacttgcaaaatacttctataaggttttaaagaaaaaagataactttaagcttgtgtttgatgcagagagtaggcaattgcatttccagacagtagataatataagagaagcaaggcttaaacatattccaaaaggttttgaaagagatcaagaactccgaaagattgctccaaagattaaagcacagatgatgatggaaggcacaatcatgataagctaccagccatgtggagacaaaaaagatgttgactatcttattgatgaaattgaaaggcttgggaaggattta

SEQ ID NO: 6036 - DNA, 3677 bp, Homo sapiens
gctctcgcttacacagtatggccggcgacattagctagcgctcgctctactctctctaacgggaaagcagcggaatacaagagactgaactgtatctgcctctatttccaaaagactcacgttcaactttcgctcacacaaagccgggaaaattttattagtcctttttttaaaaaaagttaatataaaattatagcaaaaaaaaaaaggaacctgaactttagtaacacagctggaacaatccgcagcggcggcggcagcggcgggagaagaggtttaatttagttgattttctgtggttgttggttgttcgctagtctcacggtgatggaagctgcacattttttcgaagggaccgagaagctgctggaggtttggttctcccggcagcagcccgacgcaaaccaaggatctggggatcttcgcactatcccaagatctgagtgggacatacttttgaaggatgtgcaatgttcaatcataagtgtgacaaaaactgacaagcaggaagcttatgtactcagtgagagtagcatgtttgtctccaagagacgtttcattttgaagacatgtggtaccaccctcttgctgaaagcactggttcccctgttgaagcttgctagggattacagtgggtttgactcaattcaaagcttcttttattctcgtaagaatttcatgaagccttctcaccaagggtacccacacyrgaatttccaggaagaaatagagtttcttaatgcaattttcccaaatggagcagcatattgtatgggacgtatgaattctgactgttggtacttatatactctggatttcccagagagtcgggtaatcagtcagccagatcaaaccytggaaattctgatgagtgagcttgacccagcagttatggaccagttctacatgaaagatggtgttactgcaaaggatgtcactcgtgagagtggaattcgtgacctgataccaggttctgtcattgatgccacaatgttcaatccttgtgggtattcgatgaatggaatgaaatcggatggaacttattggactattcacatcactccagaaccagaattttcttatgttagctttgaaacaaacttaagtcagacctcctatgatgacctgatcaggaaagttgtagaagtcttcaagccaggaaaatttgtgaccaccttgtttgttaatcagagttctaaatgtcgcacagtgcttgcttcgccccagaagattgaaggttttaagcgtcttgattgccagagtgctatgttcaatgattacaattttgtttttaccagttttgctaagaagcagcaacaacagcagagttgattaagaaaaatgaagaaaaaacgcaaaaagagaacacatgtagaaggtggtggatgcttyctagatgtcgatgctgggggcagtgctttccataaccaccactgtgtagttgcagaaagccctagatgtaatgatagtgtaatcattttgaattgtatgcattattatatcaaggagttagatatcttgcatgaatgctctcttctgtgtttaggtattctctgccactcttgctgtgaaattgaagtgcatgtagaaaaaaccttttactatatgaaactttacaacacttgtgaaagcaactcaatttggtttatgcacagtgtaatatttctccaagtatcatccaaaattccccacagacaaggctttcgtcctcattaggtgttggcctcagcctaaccctctaggactgttctattaaaytgctgccagaattttacatccagttacctccactttctagaacatattctttactaatgttattgaaaccaatttctacttcatactgatgtttttggaaacagcaattaaagtttttcttcyatgagttgagtccttaagaaaatgattccagttactcattttgcatatttgctattttaacattattggaccctgcatttatagtcctttgatttcttccctctccctggtgtctcccccaagaccccaaataaagcaatacactgttaacactgtgggtttatatactaattctataccccagatggggaatgggggagatggtccctgggcttaatattctttaaagggcatgggaatttagcctctcttttattgtaatgtgctcttttggaaaatagttggttagcagggaagacccagagttgtagattgagattagggtgtactggctgaactgtggaaaacatacaattctgtgttcctcagtaaatgagattagcgtctaatgagtagcacccctttactaacttagtagtagtataaaatcatttttatttagttaattaccagagagatttagcataattttgttctggattcagtaaatcaagtcagcttggatcattcaccttaacttttcctttagcagccatttccactagtttccattaagtagtgttctataaactttgatccaaagcagaatcaatgtcttttccatctcgtgacttaaagttctgtgactgtgatgcatgtgagtgttccgacttcatctgttcctcttaactacggtgtttcccttaccatggcattcataggatgaaatgaatgactgcccagaatgagaatttgtccagattattcagataaacatcataaagcagaatacattataaataagtagaatatgaataaatagaataataaaattccaaaatactcaatgggaaatgactagtwatataggctttcaagagttggtaccttttagctatatttgcagattctctgggattttaaggaactgagaaaacagcaaagttgactaaattttatatttcttgtcctctaaatattttgataatttctggattgatgcagtgatgtttttgttccttccgtatttataaatgaaacacctttttttagtgtttctaaacctaaaatctacttggtttgaaatcaagtggttggaacactgtttgacttttatttgaagcatgttgttgattgaaaatttcattgaggaagttttcaatcagtgtgatcagtttgattctgtaatgagcacagcacctaatattttgaggagctctgttttgaggaccaatgcttaaggtggactttgttcgtaaacaatatcccaatagatttgttgacttgaggtctggtttggttttgtttttgttttgttttgttttgttttgtttccaatagaattaagaattctaatgttgaaaaactgcmcaaatttttatgggacaaagcctagaaaagagaaatgtagtttgaatcataatctaaatcatcgtatgatagaagagggaaagttttggtgccataatttctcctttcactggtgttggacttaaatcagttgaaatgtatttctgtaccacaatttacgcttcaataaaagtttaattgtctagtgacattcagaaacttttctgttgccctgttttttaagtagcctacttgaccaaatactacatgtctgaagtttaaaatcaatacaacaatgtgtatttatgagtttggagttagacagaagtttaaaagtgttaggtcccaacctttattatagactagactcttaaaacattggttgaggatgatcaaactcaaataagtttccttatttcattcatggttatttctattaagtagaaaaaaatttataaccttgatca

SEQ ID NO: 6037 - DNA, 3328 bp, Homo sapiens
cattagctagcgctcgctctactctctctaacgggaaagcagcggaatacaagagactgaactgtatctgcctctatttccaaaagactcacgttcaactttcgctcacacaaagccgggaaaattttattagtcctttttttaaaaaaagttaatataaaattatagcaaaaacggcgggagaagaggtttaatttagttgattttctgtggttgttggttgttcgctagtctcacggtgatggaagctgcacattttttcgaagggaccgagaagctgctggaggtttggttctcccggcagcagcccgacgcaaaccaaggatctggggatcttcgcactatcccaagatctgagtgggacatacttttgaaggatgtgcaatgttcaatcataagtgtgacaaaaactgacaagcaggaagcttatgtactcagtgagagtagcatgtttgtctccaagagacgtttcattttgaagacatgtggtaccaccctcttgctgaaagcactggttcccctgttgaagcttgctagggattacagtgggtttgactcaattcaaagcttcttttattctcgtaagaatttcatgaagccttctcaccaagggtacccacacyrgaatttccaggaagaaatagagtttcttaatgcaattttcccaaatggagcagcatattgtatgggacgtatgaattctgactgttggtacttatatactctggatttcccagagagtcgggtaatcagtcagccagatcaaaccytggaaattctgatgagtgagcttgacccagcagttatggaccagttctacatgaaagatggtgttactgcaaaggatgtcactcgtgagagtggaattcgtgacctgataccaggttctgtcattgatgccacaatgttcaatccttgtgggtattcgatgaatggaatgaaatcggatggaacttattggactattcacatcactccagaaccagaattttcttatgttagctttgaaacaaacttaagtcagacctcctatgatgacctgatcaggaaagttgtagaagtcttcaagccaggaaaatttgtgaccaccttgtttgttaatcagagttctaaatgtcgcacagtgcttgcttcgccccagaagattgaaggttttaagcgtcttgattgccagagtgctatgttcaatgattacaattttgtttttaccagttttgctaagaagcagcaacaacagcagagttgattaagaaaaatgaagaaaaaacgcaaaaagagaacacatgtagaaggtggtggatgcttyctagatgtcgatgctgggggcagtgctttccataaccaccactgtgtagttgcagaaagccctagatgtaatgatagtgtaatcattttgaattgtatgcattattatatcaaggagttagatatcttgcatgaatgctctcttctgtgtttaggtattctctgccactcttgctgtgaaattgaagtgcatgtagaaaaaaccttttactatatgaaactttacaacacttgtgaaagcaactcaatttggtttatgcacagtgtaatatttctccaagtatcatccaaaattccccacagacaaggctttcgtcctcattaggtgttggcctcagcctaaccctctaggactgttctattaaaytgctgccagaattttacatccagttacctccactttctagaacatattctttactaatgttattgaaaccaatttctacttcatactgatgtttttggaaacagcaattaaagtttttcttcyatgagttgagtccttaagaaaatgattccagttactcattttgcatatttgctattttaacattattggaccctgcatttatagtcctttgatttcttccctctccctggtgtctcccccaagaccccaaataaagcaatacactgttaacactgtgggtttatatactaattctataccccagatggggaatgggggagatggtccctgggcttaatattctttaaagggcatgggaatttagcctctcttttattgtaatgtgctcttttggaaaatagttggttagcagggaagacccagagttgtagattgagattagggtgtactggctgaactgtggaaaacatacaattctgtgttcctcagtaaatgagattagcgtctaatgagtagcacccctttactaacttagtagtagtataaaatcatttttatttagttaattaccagagagatttagcataattttgttctggattcagtaaatcaagtcagcttggatcattcaccttaacttttcctttagcagccatttccactagtttccattaagtagtgttctataaactttgatccaaagcagaatcaatgtcttttccatctcgtgacttaaagttctgtgactgtgatgcatgtgagtgttccgacttcatctgttcctcttaactacggtgtttcccttaccatggcattcataggatgaaatgaatgactgcccagaatgagaatttgtccagattattcagataaacatcataaagcagaatacattataaataagtagaatatgaataaatagaataataaaattccaaaatactcaatgggaaatgactagtwatataggctttcaagagttggtaccttttagctatatttgcagattctctgggattttaaggaactgagaaaacagcaaagttgactaaattttatatttcttgtcctctaaatattttgataatttctggattgatgcagtgatgtttttgttccttccgtatttataaatgaaacacctttttttagtgtttctaaacctaaaatctacttggtttgaaatcaagtggttggaacactgtttgacttttatttgaagcatgttgttgattgaaaatttcattgaggaagttttcaatcagtgtgatcagtttgattctgtaatgagcacagcacctaatattttgaggagctctgttttgaggaccaatgcttaaggtggactttgttcgtaaacaatatcccaatagatttgttgacttgaggtctggtttggttttgtttttttttgtttccaatagaattaagaattctaatgttgaaaaactgcmcaaatttttatgggacaaagcctagaaaagagaaatgtagtttgaatcataatctaaatcatcgtatgatagaagagggaaagttttggtgccataatttctcctttcactggtgttggacttaaatcagttgaaatgtatttctgtaccacaatttacgcttcaataaaagtttaattgtctagtgacattcagaaac

SEQ ID NO: 6038 - DNA, 2020 bp, Homo sapiens
atcttagaaggcagggggctcgcaccgagacgctcctagcaagcccctcacgcgagcgaatgactggcgccaggagaaacgcataggacctcccgaagccgccgagagcaaaaggacccatcagagctgtgctgagacccgcygcgggccgggctcgcactcgagattctcgcccgtgggattccagtcctgagctgaacgagagataagtctttgtcaccccccagtctttactgtttcgagaaaccctaagattttttaaaaaaaagcccaaracgtcaagtcggggaactccaacattggggtgtccagaaacactggggtttcaggcgctctgtaaatgcgtccgaggtccgcggttctgcccgcargcccagaccccggcctcacttccgccccgcgccccgcgccccggcctcacgtcccgcccgcggcaggcctgtgggctgcgaggaggagctttgcctagcttgcaggcagcgcagggcagacggcggcaggagaagcaagatgaatgcaggctcagatcctgtggtcatcgtctcggcggcgcggaccatcataggttccttcaatggtgccttagctgctgttcctgtccaggacctgggctccactgtcatcaaagaagtcttgaagagggccactgtggctccggaagatgtgtctgaggtcatctttggacatgtcttggcagcaggctgtgggcagaatcctgttagacaagccagtgtgggtgcaggaattccctactctgttccagcatggagctgccagatgatctgtgggtcaggcctaaaagctgtgtgccttgcagtccagtcaatagggataggagactccagcattgtggttgcaggaggcatggaaaatatgagcaaggctcctcacttggcttacttgagaacaggagtaaagataggtgagatgccactgactgacagtatactctgtgatggtcttacagatgcatttcacaactgtcatatgggtattacagctgaaaatgtagccaaaaaatggcaagtgagtagagaagatcaggacaaggttgcagttctgtcccagaacaggacagagaatgcacagaaagctggccattttgacaaagagattgtaccagttttggtgtcaactagaaraggtcttattgaagttaaaacagatgagtttcctcgccatgggagcaacatagaagccatgtccaagctaaagccttactttcttactgatggaacgggaacagtcaccccagccaatgcttcaggaataaatgatggtgctgcagctgtygttcttatgaagaagtcagaagctgataaacgtggrcttacacctttagcacggatagtttcctggtcccaagtgggtgtggagccttccattatgggaataggaccaattccagccataaagcaagctgttacaaaagcaggttggtcactggaagatgttgacatatttgaaatcaatgaagcctttgcagctgtctctgctgcaatagttaaagaacttggattaaacccagagaaggtcaatattgaaggaggggctatagccttgggccaccctcttggagcatctggctgtcgaattcttgtgaccctgttacacacactggagagaatgggcagaartcgtggtgttgcagccctgtgcattgggggtgggatgggaatagcaatgtgtgttcagagagaatgaattgcttaaactttgaacaacctcaatttctttttaaactaataaagtactaggttgcaatatgtgaaatcagaggaccaaagtacagatggaaaccatttcctacatcacaaaaacccaagtttacagcttgtactttactttaatgtgtaatactcaactcamggtacaagacaattgcatytaacattgttataaataaaaggaacatcagatcaatcawwaagggctccagagtgaacagcatcttcataacttccatgtttatcatctttactttctggatgtaatttaataagatcatcaattcgaagaa

SEQ ID NO: 6039 - DNA, 2639 bp, Homo sapiens
atcttagaaggcagggggctcgcaccgagacgctcctagcaagcccctcacgcgagcgaatgactggcgccaggagaaacgcataggacctcccgaagccgccgagagcaaaaggacccatcagagctgtgctgagacccgcygcgggccgggctcgcactcgagattctcgcccgtgggattccagtcctgagctgaacgagagataagtctttgtcaccccccagtctttactgtttcgagaaaccctaagattttttaaaaaaaagcccaaracgtcaagtcggggaactccaacattggggtgtccagaaacactggggtttcaggcgctctgtaaatgcgtccgaggtccgcggttctgcccgcargcccagaccccggcctcacttccgccccgcgccccgcgccccggcctcacgtcccgcccgcggcaggcctgtgggctgcgaggaggagctttgcctagcttgcaggcagcgcagggcagacggcggcaggagaagcaagatgaatgcaggctcagatcctgtggtcatcgtctcggcggcgcggaccatcataggttccttcaatggtgccttagctgctgttcctgtccaggacctgggctccactgtcatcaaagaagtcttgaagagggccactgtggctccggaagatgtgtctgaggtcatctttggacatgtcttggcagcaggctgtgggcagaatcctgttagacaagccagtgtgggtgcaggaattccctactctgttccagcatggagctgccagatgatctgtgggtcaggcctaaaagctgtgtgccttgcagtccagtcaatagggataggagactccagcattgtggttgcaggaggcatggaaaatatgagcaaggctcctcacttggcttacttgagaacaggagtaaagataggtgagatgccactgactgacagtatactctgtgatggtcttacagatgcatttcacaactgtcatatgggtattacagctgaaaatgtagccaaaaaatggcaagtgagtagagaagatcaggacaaggttgcagttctgtcccagaacaggacagagaatgcacagaaagctggccattttgacaaagagattgtaccagttttggtgtcaactagaaraggtcttattgaagttaaaacagatgagtttcctcgccatgggagcaacatagaagccatgtccaagctaaagccttactttcttactgatggaacgggaacagtcaccccagccaatgcttcaggaataaatgatggtgctgcagctgtygttcttatgaagaagtcagaagctgataaacgtggrcttacacctttagcacggatagtttcctggtcccaagtgggtgtggagccttccattatgggaataggaccaattccagccataaagcaagctgttacaaaagcaggttggtcactggaagatgttgacatatttgaaatcaatgaagcctttgcagctgtctctgctgcaatagttaaagaacttggattaaacccagagaaggtcaatattgaaggaggggctatagccttgggccaccctcttggagcatctggctgtcgaattcttgtgaccctgttacacacactggagagaatgggcagaartcgtggtgttgcagccctgtgcattgggggtgggatgggaatagcaatgtgtgttcagagagaatgaattgcttaaactttgaacaacctcaatttctttttaaactaataaagtactaggttgcaatatgtgaaatcagaggaccaaagtacagatggaaaccatttcctacatcacaaaaacccaagtttacagcttgtactttactttaatgtgtaatactcaactcamggtacaagacaattgcatytaacattgttataaataaaaggaacatcagatcaatcawwaagggctccagagtgaacagcatcttcataacttccatgtttatcatctttactttctggcattttagatttttacgttctgggttaacctgggcctcattatgaaaagctcttaattttgcaaccagatctgtggagtcctgggcagcattaactgctagtgtattgggaataacaagaagtgatcttgcaaactctgcaatcgcaagctgttcccgagaccccatgctggttgcatagttttcaaggtatatggaaagggctgcttctacagcacccccaccgggaaccacagattttgactccaaaactctcttcactacacaaagtgcatcatgtaaagagcgctccatctcatcacacatgaaatcatttgccccacgtaagataatcgatgcagacgtacgagccttagtatttttgattaagatcagctcatcatcacaaattctctcctgtaccacttcttctgcctgtcccaacattgcagcttcaaaagtttcttcaccttccaaattggccagggttgacagaatagttgctccagaagctttggcaatgcgtttaaggtccctttttaaaactcttctaactgccatagcaccagcctccacaaaatacttcagacacatatcatcaattccaccagtggttagaataacattggcaccagttgccaggatcttctgaattctctccttggtgatatct

SEQ ID NO: 6040 - DNA, 1599 bp, Homo sapiens
gtcccgcccgcggcaggcctgtgggctgcgaggaggagctttgcctagcttgcaggcagcgcagggcagacggcggcaggagaagcaagatgaatgcaggctcagatcctgtggtcatcgtctcggcggcgcggaccatcataggttccttcaatggtgccttagctgctgttcctgtccaggacctgggctccactgtcatcaaagaagtcttgaagagggccactgtggctccggaagatgtgtctgaggtcatctttggacatgtcttggcagcaggctgtgggcagaatcctgttagacaagccagtgtgggtgcaggaattccctactctgttccagcatggagctgccagatgatctgtgggtcaggcctaaaagctgtgtgccttgcagtccagtcaatagggataggagactccagcattgtggttgcaggaggcatggaaaatatgagcaaggctcctcacttggcttacttgagaacaggagtaaagataggtgagatgccactgactgacagtatactctgtgatggtcttacagatgcatttcacaactgtcatatgggtattacagctgaaaatgtagccaaaaaatggcaagtgagtagagaagatcaggacaaggttgcagttctgtcccagaacaggacagagaatgcacagaaagctggccattttgacaaagagattgtaccagttttggtgtcaactagaaraggtcttattgaagttaaaacagatgagtttcctcgccatgggagcaacatagaagccatgtccaagctaaagccttactttcttactgatggaacgggaacagtcaccccagccaatgcttcaggaataaatgatggtgctgcagctgtygttcttatgaagaagtcagaagctgataaacgtggrcttacacctttagcacggatagtttcctggtcccaagtgggtgtggagccttccattatgggaataggaccaattccagccataaagcaagctgttacaaaagcaggttggtcactggaagatgttgacatatttgaaatcaatgaagcctttgcagctgtctctgctgcaatagttaaagaacttggattaaacccagagaaggtcaatattgaaggaggggctatagccttgggccaccctcttggagcatctggctgtcgaattcttgtgaccctgttacacacactggagagaatgggcagaartcgtggtgttgcagccctgtgcattgggggtgggatgggaatagcaatgtgtgttcagagagaatgaattgcttaaactttgaacaacctcaatttctttttaaactaataaagtactaggttgcaatatgtgaaatcagaggaccaaagtacagatggaaaccatttcctacatcacaaaaacccaagtttacagcttgtactttactttaatgtgtaatactcaactcamggtacaagacaattgcatytaacattgttataaataaaaggaacatcagatcaatcawwaagggctccagagtgaacagcatcttcataacttccatgtttatcatctttactttctggatgtaatttaataagatcatcaattcgaagaa

SEQ ID NO: 6041 - DNA, 819 bp, Homo sapiens
ggcggtgcccttgcggcgcagctggggtcgcggccctgctccccgcgctttcttaaggcccgcgggcggcgcaggagcggcactcgtggctgtggtggcttcggcagcggcttcagcagatcggcggcatcagcggtagcaccagcactagcagcatgttgagccgggcagtgtgcggcaccagcaggcagctggctccggytttggggtatctgggctccaggcagaagcacagcctccccgacctgccctacgactacggcgccctggaacctcacatcaacgckcagatcatgcagctgcaccacagcaagcaccacgcggcctacgtgaacaacctgaacgtcaccgaggagaagtaccaggaggcgttggccaagrgtaggttccaggctgagcggcgggaggcagtccccggcagaggcgaccccagggagccaggccccatacggacgggcctctccgtggaggagaactcgcttcgtatttgtaccggttccgagttttccaggcacgatagtctctcttttaaacacatggtctacctcattgtagaaggagtgcctcgatgggtttgaacacacttctgtcatctcagggaacttggggtcctgcgaaggagcttgccttactgttgtgagccacattccgttacacatattgccagcactggtgaattgtagggcctgaaaagaaagctctactgtgtcactcgttttttttgcaaattgaaattgttcttgttgtataatrygctttggggaaatgtttggtctctcaggtaggtgtgccagccgtttgcaggagggctgagagcgc

SEQ ID NO: 6042 - DNA, 2506 bp, Homo sapiens
ggcggtgcccttgcggcgcagctggggtcgcggccctgctccccgcgctttcttaaggcccgcgggcggcgcaggagcggcactcgtggctgtggtggcttcggcagcggcttcagcagatcggcggcatcagcggtagcaccagcactagcagcatgttgagccgggcagtgtgcggcaccagcaggcagctggctccggytttggggtatctgggctccaggcagaagcacagcctccccgacctgccctacgactacggcgccctggaacctcacatcaacgckcagatcatgcagctgcaccacagcaagcaccacgcggcctacgtgaacaacctgaacgtcaccgaggagaagtaccaggaggcgttggccaagrgagatgttacagcccagatagctcttcagcctgcactgaagttcaatggtggtggtcatatcaatcatagcattttctggacaaacctcagccctaacggtggtggagaacccaaaggggagttgctggaagccatcaaacgtgactttggttcctttgacaagtttaaggagaagctgacggctgcatctgttggtgtccaaggctcaggttggggttggcttggtttcaataaggaacggggacacttacaaattgctgcttgtccaaatcaggatccactgcaaggaacaacaggccttattccactgctggggattgatgtgtgggagcacgcttactaccttcagtataaaaatgtcaggcctgattatctaaaagctatttggaatgtaatcaactgggagaatgtaactgaaagatacatggcttgcaaaaagtaaaccacgatcgttatgctgagtatgttaagctctttatgactgtttttgtagtggtatagagtactgcagaatacagtaagctgctctattgtagcatttcttgatgytgcttagtcacttatttcataaacaacttaatgttctgaataatttcttactaaacattttgttattgggcaagtgattgaaaatagtaaatgctttgtgtgattgaatctgattggacattttcttcagagagctaaattacaattgtcatttataaaaccatcaaaaatattccatccatatactttsgggacttgtagggatgcctttctagtcctattctattgcagttatagaaaatctagtcttttgccccagttacttaaaaataaaatattaacactttcccaagggaaacactcggctttctatagaaaattgcactttttgtcgagtaatcctctgcagtgatacttctggtagatgtcacccagtggtttttgttaggtcaaatgttcctgtatagtttttgcaaatagagctgtatactgtttaaatgtagcaggtgaactgaactggggtttgctcacctgcacagtaaaggcaaacttcaacagcaaaactgcaaaaaggtggtttttgcagtaggagaaaggaggatgtttatttgcagggcgccaagcaaggagaattgggcagctcatgcttgagacccaatctccatgatgacctacaagctagagtatttaaaggcagtggtaaatttcaggaaagcagaagttaaaggcaaaattgtaaatcagtcgagatcgggtgccttcagggtggtatggctgtataccaaaattgtaaatcactacatgaagcttatatattggtttggcctgaaaggtgaagtggggtaggcagggggcgggcttacaggttatggtggattcaaagactccctgatttgtgattggttaaggaagcaaagctttgtctaaaaacttggggtccgcagaaaggaacattaaggtctggccaggcccctcaggaagaaactgagagcaaagaatggaggtcagagtttagtccctggtgttcccccttatctgacgtctgtgtgaatccatttggtgggggtctgggtttctgaaaagtagctcaggggcacgtgttaaggatgtctctaggtgactctaacttccctggctattgtttgaaactgttatgaccttcttgcttatcagcttgctggtttccttctcggggcgagctgggtgcctggagttttcggtgaaggaaactcaagattctcctttatttctgtgcttgtgggaatccccctggcacaccccaaagaggggtccctgctccgtctcacagggatctttttgtatatttggcttagcatcatacatttgccatgttgtttcatcatctgcctaatttactgtttttgaatatttcatttgtttctaattgttactacagataatgctggggtgagcaactctgtgtacataggtttatctcctattggaatattttctttatataggcgttttttttttttctttttttttggagacagagtcttgctctgttgcccaggctggagtgcagtggcgygacyggagctcactgcaacctccacttcccgggttcaagtgattgtcccacctcagcctcctgaatagctgggattayag

SEQ ID NO: 6043 - DNA, 1403 bp, Homo sapiens
ggcggtgcccttgcggcgcagctggggtcgcggccctgctccccgcgctttcttaaggcccgcgggcggcgcaggagcggcactcgtggctgtggtggcttcggcagcggcttcagcagatcggcggcatcagcggtagcaccagcactagcagcatgttgagccgggcagtgtgcggcaccagcaggcagctggctccggytttggggtatctgggctccaggcagaagcacagcctccccgacctgccctacgactacggcgccctggaacctcacatcaacgckcagatcatgcagctgcaccacagcaagcaccacgcggcctacgtgaacaacctgaacgtcaccgaggagaagtaccaggaggcgttggccaagrgagatgttacagcccagatagctcttcagcctgcactgaagttcaatggtggtggtcatatcaatcatagcattttctggacaaacctcagccctaacggtggtggagaacccaaaggggagttgctggaagccatcaaacgtgactttggttcctttgacaagtttaaggagaagctgacggctgcatctgttggtgtccaaggctcaggttggggttggcttggtttcaataaggaacggggacacttacaaattgctgcttgtccaaatcaggatccactgcaaggaacaacaggccttattccactgctggggattgatgtgtgggagcacgcttactaccttcagtataaaaatgtcaggcctgattatctaaaagctatttggaatgtaatcaactgggagaatgtaactgaaagatacatggcttgcaaaaagtaaaccacgatcgttatgctgagtatgttaagctctttatgactgtttttgtagtggtatagagtactgcagaatacagtaagctgctctattgtagcatttcttgatgytgcttagtcacttatttcataaacaacttaatgttctgaataatttcttactaaacattttgttattgggcaagtgattgaaaatagtaaatgctttgtgtgattgaatctgattggacattttcttcagagagctaaattacaattgtcatttataaaaccatcaaaaatattccatccatatactttsgggacttgtagggatgcctttctagtcctattctattgcagttatagaaaatctagtcttttgccccagttacttaaaaataaaatattaacactttcccaagggaaacactcggctttctatagaaaattgcactttttgtcgataatcccagcactttgggaggccaaggcaggcagaacacttgaaggagttcaagaccagcgtggccaacgtggtgaaaccctgtctctactaaaaatacaaaaattgtttagctctgtttttcataatagaaataga

SEQ ID NO: 6044 - DNA, 3757 bp, Homo sapiens
ggcggtgcccttgcggcgcagctggggtcgcggccctgctccccgcgctttcttaaggcccgcgggcggcgcaggagcggcactcgtggctgtggtggcttcggcagcggcttcagcagatcggcggcatcagcggtagcaccagcactagcagcatgttgagccgggcagtgtgcggcaccagcaggcagctggctccggytttggggtatctgggctccaggcagaagcacagcctccccgacctgccctacgactacggcgccctggaacctcacatcaacgckcagatcatgcagctgcaccacagcaagcaccacgcggcctacgtgaacaacctgaacgtcaccgaggagaagtaccaggaggcgttggccaagrgagatgttacagcccagatagctcttcagcctgcactgaagttcaatggtggtggtcatatcaatcatagcattttctggacaaacctcagccctaacggtggtggagaacccaaaggggagttgctggaagccatcaaacgtgactttggttcctttgacaagtttaaggagaagctgacggctgcatctgttggtgtccaaggctcaggttggggttggcttggtttcaataaggaacggggacacttacaaattgctgcttgtccaaatcaggatccactgcaaggaacaacaggccttattccactgctggggattgatgtgtgggagcacgcttactaccttcagtataaaaatgtcaggcctgattatctaaaagctatttggaatgtaatcaactgggagaatgtaactgaaagatacatggcttgcaaaaagtaaaccacgatcgttatgctgagtatgttaagctctttatgactgtttttgtagtggtatagagtactgcagaatacagtaagctgctctattgtagcatttcttgatgytgcttagtcacttatttcataaacaacttaatgttctgaataatttcttactaaacattttgttattgggcaagtgattgaaaatagtaaatgctttgtgtgattgaatctgattggacattttcttcagagagctaaattacaattgtcatttataaaaccatcaaaaatattccatccatatactttsgggacttgtagggatgcctttctagtcctattctattgcagttatagaaaatctagtcttttgccccagttacttaaaaataaaatattaacactttcccaagggaaacactcggctttctatagaaaattgcactttttgtcgagtaatcctctgcagtgatacttctggtagatgtcacccagtggtttttgttaggtcaaatgttcctgtatagtttttgcaaatagagctgtatactgtttaaatgtagcaggtgaactgaactggggtttgctcacctgcacagtaaaggcaaacttcaacagcaaaactgcaaaaaggtggtttttgcagtaggagaaaggaggatgtttatttgcagggcgccaagcaaggagaattgggcagctcatgcttgagacccaatctccatgatgacctacaagctagagtatttaaaggcagtggtaaatttcaggaaagcagaagttaaaggcaaaattgtaaatcagtcgagatcgggtgccttcagggtggtatggctgtataccaaaattgtaaatcactacatgaagcttatatattggtttggcctgaaaggtgaagtggggtaggcagggggcgggcttacaggttatggtggattcaaagactccctgatttgtgattggttaaggaagcaaagctttgtctaaaaacttggggtccgcagaaaggaacattaaggtctggccaggcccctcaggaagaaactgagagcaaagaatggaggtcagagtttagtccctggtgttcccccttatctgacgtctgtgtgaatccatttggtgggggtctgggtttctgaaaagtagctcaggggcacgtgttaaggatgtctctaggtgactctaacttccctggctattgtttgaaactgttatgaccttcttgcttatcagcttgctggtttccttctcggggcgagctgggtgcctggagttttcggtgaaggaaactcaagattctcctttatttctgtgcttgtgggaatccccctggcacaccccaaagaggggtccctgctccgtctcacagggatctttttgtatatttggcttagcatcatacatttgccatgttgtttcatcatctgcctaatttactgtttttgaatatttcatttgtttctaattgttactacagataatgctggggtgagcaactctgtgtacataggtttatctcctattggaatattttctttatataggcgttttttttttttctttttttttggagacagagtcttgctctgttgcccaggctggagtgcagtggcgygacyggagctcactgcaacctccacttcccgggttcaagtgattgtcccacctcagcctcctgaatagctgggattayaggtgtgagccactgcacctggcctatataggcttttttcttaaacctatttagtaatgttttcccaagtttattttttatttttaattttttccccaagtttatttttctatttttttttcatggaaaaatggggtaacttagcagtttcaatattgaagactgaagtttaaaaaamatttaaattcaaggtacttttaaaattcagttagaaaagtaggctttaaaaattattagagacaagagtaccaaagcggtgtgtgtatgtgtgtgtgtgtatgcatgcttgtggattggaaaaactttggagactgattacttttcattatatatgtgtcacagtgaaacagcttttatgtgtcatgtaagattaytgcttgcctctctaaggaaggtcgtgactgtttaaatagacgggcaaggtggaaccttttgaaagatgagcttttgaatataagttgtctgctagatcatggtttgtattgaactaacaaggtttgcagatctgctgacttatataaagctttttgattcctactaagctttaagatttaaaaaatgttcaatgttgaaatttctgtggggctctatttttgctttggctttctggtgagagagtgaggaagcattctttccttcactaagtttgtctttcttgtcttctggatagattgattttaagagactaagggaatttacaaactaaagattttagtcatctggtggaaaaggagactttaagattgtttagggctgggcggggtgactcacatctgtaatcccagcactttgggaggccaaggcaggcagaacacttgaaggagttcaagaccagcgtggccaacgtggtgaaaccctgtctctactaaaaatacaaaaattgtttagctctgtttttcataatagaaatagaaaaggtaaaattgcttttcttctgaaaagaacaagtattgttcatccaagaagggtttttgtgactgaatcagcagtgcctgccctagtcatagctgtgcttcaaaaacctcagcatgattagtgttggagcaaaacaaggaagcaaagcaaatacwgtttttgaaattctatctgttgcttgaactattttgtaataattaaactttgatgttgagaaatcacaactttattgtacacttcattgcaacttgaaattcatggtcttaaagtgagatttgaatttctattgagcgcctttaaaaaagtaataccaaaccataaagttaaaatctatgtat

SEQ ID NO: 6045 - DNA, 1219 bp, Homo sapiens
atggtgaaggtgaaggtcagggtcagtggatttggtcgtattgggcgcctggtcagcagggctattttaactctggtaaagtggatattatcaccatcagtgaccccttcattgatctcaagtacatggtctacatgttcctgtatgattccacccatggcaaattccatggcaccatcaaggctgagaacgggaaacttgtcatcaatggaaatcccatcaccatcttccaggagcgagatccctccaaaatcaaatggggcactgctggtgctgagtacatcgtggagcccaccggcacctttaccaccatggagaagactggggctcacttgcagggaggagccaaaagggtcatcatctctgccccctctgctgatgcctccgtgttcataatgggtgtgaacaatgagaagtatgacaacagcctcaagatcatcagcaatgcctcctgtaccaccaactgcttagcgccccgggccaaggtcctccatgacaactttggtatcgtgaaaggactcatgaccacagtccatgccatcaccgccacccagaagactgtggatggcccctccaggaaactgtggcatgacggtggtgggactctccagaacatcatccctgcctctactggcactgccaaggctgtgggcaaggtcatccctgagctgaacgggaarctcactggcatggccttctgtgtccccactgccaatgtgtcagtcgtggacctgatctaccatctggaaaaacctaccaaatatcatggcatcaagaagggcatcctgggctacaacaccgagcaccaggttgtctccttcgacttcaacagcgacatccattcttccacctttgatgttggggctggcattgccctcaacaaccactgtgtcaagctcatttcctggtatgagaatgaatttggctacagcaacagggtggtggacgtcatggcccacaagtcctccaaggagtaagacccctgaaccaccagccccagtgacagcacaagaggaaaagagaggccctcactgctggggagtccctgccacactcagtcccctgccacaatgagaatctcccctcctcacagtttccatgcagaccccctgaagagggagtggcctagggagccccaccttgtcttgtaccatcaacaaagtcccctgtgctcagccaaaaaaataaatamataaaatttttttctataaagtttcta

SEQ ID NO: 6046 - DNA, 1301 bp, Homo sapiens
cagacagccgcatcttctctcacatcgccagccacatccctgagacaccatggtgaaggtgaaggtcagggtcagtggatttggtcgtattgggcgcctggtcagcagggctattttaactctggtaaagtggatattatcaccatcagtgaccccttcattgatctcaagtacatggtctacatgttcctgtatgattccacccatggcaaattccatggcaccatcaaggctgagaacgggaaacttgtcatcaatggaaatcccatcaccatcttccaggagcgagatccctccaaaatcaaatggggcactgctggtgctgagtacatcgtggagcccaccggcacctttaccaccatggagaagactggggctcacttgcagggaggagccaaaagggtcatcatctctgccccctctgctgatgcctccgtgttcataatgggtgtgaacaatgagaagtatgacaacagcctcaagatcatcagcaatgcctcctgtaccaccaactgcttagcgccccgggccaaggtcctccatgacaactttggtatcgtgaaaggactcatgaccacagtccatgccatcaccgccacccagaagactgtggatggcccctccaggaaactgtggcatgacggtggtgggactctccagaacatcatccctgcctctactggcactgccaaggctgtgggcaaggtcatccctgagctgaacgggaarctcactggcatggccttctgtgtccccactgccaatgtgtcagtcgtggacctgatctaccatctggaaaaacctaccaaatatcatggcatcaagaaggtggtgaaggaggcatcagagggctccctctagggcatcctgggctacaacaccgagcaccaggttgtctccttcgacttcaacagcgacatccattcttccacctttgatgttggggctggcattgccctcaacaaccactgtgtcaagctcatttcctggtatgagaatgaatttggctacagcaacagggtggtggacgtcatggcccacaagtcctccaaggagtaagacccctgaaccaccagccccagtgacagcacaagaggaaaagagaggccctcactgctggggagtccctgccacactcagtcccctgccacaatgagaatctcccctcctcacagtttccatgcagaccccctgaagagggagtggcctagggagccccaccttgtcttgtaccatcaacaaagtcccctgtgctcagccaaaaaaataaatamataaaatttttttctataaagtttcta

SEQ ID NO: 6047 - DNA, 752 bp, Homo sapiens
gtgaaggtcagggtcagtggatttggtcgtattgggcgcctggtcagcagggctaagactgtggatggcccctccaggaaactgtggcatgacggtggtgggactctccagaacatcatccctgcctctactggcactgccaaggctgtgggcaaggtcatccctgagctgaacgggaarctcactggcatggccttctgtgtccccactgccaatgtgtcagtcgtggacctgatctaccatctggaaaaacctaccaaatatcatggcatcaagaaggtggtgaaggaggcatcagagggctccctctagggcatcctgggctacaacaccgagcaccaggttgtctccttcgacttcaacagcgacatccattcttccacctttgatgttggggctggcattgccctcaacaaccactgtgtcaagctcatttcctggtatgagaatgaatttggctacagcaacagggtggtggacgtcatggcccacaagtcctccaaggagtaagacccctgaaccaccagccccagtgacagcacaagaggaaaagagaggccctcactgctggggagtccctgccacactcagtcccctgccacaatgagaatctcccctcctcacagtttccatgcagaccccctgaagagggagtggcctagggagccccaccttgtcttgtaccatcaacaaagtcccctgtgctcagccaaaaaaataaatamataaaatttttttctataaagtttcta

SEQ ID NO: 6048 - DNA, 5153 bp, Homo sapiens
cggcccaggcggcggcggccaaactccgcggcgtccccagggcgccagcttcgccctcgccgccgcggccgcgctgctcttcggctccgacatggaagatggaccttctaataatgcgagctgcttccgaaggctgaccgagtgcttcctgagccccaaagctaatggtatagatatagaagtcatccacagagatgttacagttgaagagatgggggtagagaagactttgaaggaaaagaatgtagaatgaggatagaagagaggaaatcccaacatttaacaggtttgacagatgaaaaagtgaaggcatatctttctcttcacccccaggtattagatgaatttgtatctgaaagtgttagtgcagagacagtagagaartggctgaagaggaagaacaacaaatcagaagatgaatcrgctcctaaggaagtcagcaggtaccaagatacgaatatgcagggagttgtatatgaactaaacagctatatagaacaacggttggacacaggaggagacaaccagctactcctctatgaactgagcagcatcattaaaatagccacaaaagccgatggatttgcactgtatttccttggagagtgcaataatagcctgtgtatattcacgccacctgggataaaggaaggaaaaccccgcctcatccctgctgggcccatcactcagggcaccaccgtctctgcttatgtggccaagtccaggaaaacactgctagtagaagacatccttggagatgaacgatttccaagaggtactggactggaatcagggactcgtatccagtctgttctttgcttaccaattgtcactgcaattggtgacttgattggtattctcgagctgtatcggcactggggcaaagaagccttctgtcttagtcaccaggaggttgcaacagcaaatcttgcctgggcttcagtagcaatacatcaggtgcaggtatgcagaggccttgccaaacagacagaattgaatgacttcctactcgaygtatcaaaaacatattttgataacatagttgcaatagattctctacttgaacacataatgatatatgcaaaaaacctggtgaatgccgatcgttgtgcrcttttccaggtggaccataagaacaaggagttatattcagacctttttgatattggagaggaaaaggaaggaaaacctgtcttcaagaagaccaaagagataagattttcaattgagaaaggaattgctggccaagtagcaagaacaggggaagtcctgaacattccagatgcctatgcagacccacgctttaacagagaagtagacttgtacacaggctacaccacgcggaacatcctgtgcatgcccatcgtcagccgaggcagcgtgataggtgtggtgcagatggtcaacaaaatcagtggcagtgccttctctaaaacagatgaaaacaacttcaaaatgtttgccgtcttttgtgctttagccttacactgtgctaatatgtatcatagaattcgccactcagagtgcatttaccgggtaacgatggaaaagctgtcctaccatagcatttgtacttcagaagagtggcaaggtctcatgcaattcacccttcccgtgcgtctctgcaaagaaattgaattattccactttgacattggtccttttgaaaacatgtggsctggaatttttgtctacatggttcatcggtcmtgtgggacatcctgctttgagcttgaaaagttgtgtcgttttattatgtctgtgaagaagaactatcggcgggttccttatcacaactggaagcatgcggtcactgtagcacactgcatgtatgccatacttcagaacaatcacacgcttttcacagaccttgagcgcaaaggactgctgattgcgtgtctgtgtcatgacctggaccacaggggcttcagtaacagctacctgcagaagttcgaccaccctctggccgctctctactccacttccaccatggagcagcaccacttctcccagactgtgtccatcctycagttggaagggcacaatatcttctccactctgagctccagtgaatatgagcaggtgcttgagatcatccgcaaagccatcattgccacagaccttgctttatactttggaaacaggaagcagttggaagagatgtaccagaccggatcactaaaccttaataatcaatcacatagagaccgtgtaattggtttgatgatgactgcctgtgacctttgttctgtgacaaaactgtggcccgttacaaaattgacggcaaatgatatatatgcagaattctgggctgagggtgatgaaatgaagaaattgggaatacagcctattcctatgatggacararacaagaaggatgaagtcccccaaggccagcttgggttctacaatgcygtggccattccctgctatacaacccttacccagatcctccctcccacggagcctcttctgaaagcatgcagggataatctcagtcagtgggagaaggtgattcgaggggaggagactgcaacctggatttcatccccatccgtggctcagaaggcagctgcatctgaagattgagcactggtcaccctgacacgctgtcccacctacagatcctcatcttgcttctttgacattcttttcctttttttkgggggggtggggggaacctgcacctggtaactggggtgcaaacctcttcaagaaggtaacatcaaataaataagtcaagcagaggacttcctgccaatctcttctgtgaggcatcatagacactgagcaaccaggaccacccccacgttcagaaatcagctggccaagtgactccatttgacttgcaaaccagccttttctaataggctaatattgctgaggccttaaaggaaatggacaaaaattatccagaaggggtacttttccattgtatctttctaataagggtttaaaatggtactattatggtattgtacttgggctttaacatcaatgttgctttgatgttgttggatataaataggaatttttacacattactattgtgaatggtgaatgttcatgtatgacctacttgtaattaacttgagttgtagtccacagcctcaggacaaatgtcgttgaggttacagagtaagaaatgatggcaaaacgtcaaactcttatttcagagcttcatgaatttagttagactaaacataattctttaagttcaacctaaagggctgagatcaataaatttaacactagacgaagtagacttcctgtctttttgagaagagatgaggtatatgttacaataaatctcagaacttcaagtagcagttcaaaagatgtcagtttttaaaattgtttttgttgttgtcttggcagttttactgaaccctttgcataaagaacaaaataaaagctcggcattgtaatttttttaatggacaagtcttatggatacgaagggtacatttttcataatgattcctttatattttcactttgtgtcattgcagaattttagactctcattcacaatgaaaagtttattttaaacattgtttaattaaaataccatacagttctcttttaaacatcaaaccataaaaagtgtattttgtaattttactctgacctgccgcagtcacctctcacttatctcttccacgtactgcacggtcgtatttcatgagctttctgtccatagcacagaaacagagcagaaagtagtacaatcatgttggaccttctttctgttctctttactcttctcacagatcagatcactccatagaagcctgtgggtttcgayggtttcttctatacacctttttggttgaccagtattactatacaatgtaagtgttttaaaaaatacgaaagtaatactctgcaccccttcctacaaagatgataaagcagtcacttctggcgcattttaataatttaaagatttttagtgcaatggcacggtaacctccaaacctgaattagacagagactcactcaggaagtgacaggcccatcatatcaaataacttattcacttttcatgtggcaggaaactggaatatcgcttttaataaaatggaaaaatatgcttctacatatttaccaccataggcgttttgttcatatgagcctggtttgtgcaaaattaaatcagaggcttctacaacatggtttatttatgttgtagcaaagttggctctacataaacattgttcttattttaaaattaacactatgtgttcagttttcttgtgggcttctgaaagttgccatcttccctccgtggagctccatttgctattttcattatacactatgaggtaaaatgtaataacaaaagagagagaagtaccactgtggctagatatatacacacacatatatatatggatggatgtaatatatgtagaacacacacatagatgtatataggatacacactcatgtatgtaaacgtatacatatgtgtatatatgatacatacacatacacacacacgagagacagaaggaaagagaggaagagagaagcaaacatgtaggaaaaaatataaatcagccccattctcccattctttaagaacaatgatttttcttgatggaaaatgcatatcacttgacagttgacaagaaagtgtcatttttgtgttagtgtatcatataattgaatttgaacaagatacatatttttctgcatacaaatttatgaagctggagtctaccaaacacagctttagtcacaaaagttagtttagttatctcatttcgcttggagatggaatttcaggaagggatatattatttaagattattgtttaattacaagaattttaaaagaatgtatgaattctgttttttaatatagaaaataattatggagttaggaatctcatggctacatttacatttttaggttattacagaaaattctcttaatttattatagtcaagtgtattatgtaatctctatttagaacagtttcccaaaggaatgtgattggatttactggttggttaatttcttgtgaaatattgtcataatagaagcacagcttgaacaaaagactgaattctgatataaactgtcaatattgcttttaccatgtgtaagatttacttagtaatcacagatttacctaaaataaa

SEQ ID NO: 6049 - DNA, 2437 bp, Homo sapiens
ggctcctcctcttcccctccgccgcggcccgccccggcccgcaaacccaaacactccaggcgcccgcccgccgcgcgtgattctcgcctcgccgcmgcccagccctgcgcgccttgcccggcggcccccgcccggccgctccgggcccctggccccgcggagcgatgctgctgctggctgccgccttcctcgtggccttcgtgctgctgctgtacatggtgtctccgctcatcagccccaagcccctcgccctgcccggggcgcatgtggtggttacaggaggttccagtggcatcgggaagtgcattgctatcgagtgctataaacaaggagcttttataactctggttgcacgaaatgaggataagctgctgcaggcaaagaaagaaattgaaatgcactctattaatgacaaacaggtggtrctttgcatatcagttgatgtatctcaagactataaccaagtagagaatgtcataaaacaagcacaggagaaactgggtccagtggacatgctggtaaattgtgcaggaatggcagtgtcaggaaaatttgaagatcttgaagttagtacctttgaaaggttaatgagcatcaattacctgggcagcgtgtaccccagccgggccgtgatcaccaccatgaaggagcgccgggtgggcaggatcgtgtttgtgtcctcccaggcaggacagttgggattattcggtttcacagcctactctgcatccaagtttgccataaggggattggcagaagctttgcagatggaggtgaagccatataatgtctacatcacagttgcttacccaccagacacagacacacctggctttgccgaagaaaacagaacaaagcctttggagactcgacttatttcagagaccacatctgtgtgcaaaccagaacaggtggccaaacaaattgttaaagatgccatacaaggaaatttcaacagttcccttggctcagatgggtacatgctctcggccctgacctgtgggatggctccagtaacttctattactgaggggctccagcaggtggtcaccatgggccttttccgcactattgctttgttttaccttggaagttttgacagcatagttcgtcgctgcatgatgcagagagaaaaatctgaaaatgcagacaaaactgcctaatcttcttaccccttggaagaagactgtttccaaataatttgaacagcttgctgctaaatgggacccaatttttggcctatagacacttatgtattgttttcgaatacgtmagattggaccagtgctcttcaggaatgtggctgcaagcaaggggctagaagttcacctcctgacagtattattaatactatgcaaatatggaataggagaccatttgattttctaggctttgtggtagagaggtgaaggtatgagaattaatagcgtgtgaacaaagtaaagaacaggattccagaatgatcattaaatttgtttctatttattcttttttgcccccctagagattaagtccagaaatgtactttctggcacataaagaaatcttgaggactttgtttaaaccttccataaaaaaacaattttcggtttctcgggttctctctctctctctctctgtctctctgtctctctgtctctctgtctctctgtctctctstctctctctctctctctctttctttctttgtgtattttattcaagatgagttggacccattgccagtgagtctgaatgtcactgacagccctgtgttgtgctcaggactcactctgcygctggtggaaactcatggcttctctctctctttgatcccataaagctacgagggggacgggagagggcagtgcaatgggaagtaaagagatattttccagtaggaaaagcaatgctttcttgtctttagactcaaatgcttagggaacgtttcatttctcattcatggggaaaggcagcctccttaaatgttttctgaagagcggtaaaatctagaagcttaagaatttacagttccttcaataaccatgatgacctgaagttcacctatcccattttagcatctacttgtttttcccatctcttcctttccaattttgcttatactgctgtaatatttttgtaaaaaaaaaaaaaaaggaaaaaaaagaccagctaaaatttycgacttgactttttaacttaactcatgaattaattaaagcaaatgaaaaaattaaaaagtgtgactttttctcggagcatatatgtagcttttaggaaaggctgatgatggtataaagtttgctcattaagaaaaaaagacaaggctgattttgaagagagttgcttttgaaataaaatgatcacctgttctttatgtgactctcccactgaacctgcagacattatttttataccacrtgctaaggaagcccactcatctaactctgtagccctg

SEQ ID NO: 6050 - DNA, 2421 bp, Homo sapiens
ggctcctcctcttcccctccgccgcggcccgccccggcccgcaaacccaaacactccaggcgcccgcccgccgcgcgtgattctcgcctcgccgcmgcccagccctgcgcgccttgcccggcggcccccgcccggccgctccgggcccctggccccgcggagcgatgctgctgctggctgccgccttcctcgtggccttcgtgctgctgctgtacatggtgtctccgctcatcagccccaagcccctcgccctgcccggggcgcatgtggtggttacaggaggttccagtggcatcgggaagtgcattgctatcgagtgctataaacaaggagcttttataactctggttgcacgaaatgaggataagctgctgcaggcaaagaaagaaattgaaatgcactctattaatgacaaacaggtggtrctttgcatatcagttgatgtatctcaagactataaccaagtagagaatgtcataaaacaagcacaggagaaactgggtccagtggacatgctggtaaattgtgcaggaatggcagtgtcaggaaaatttgaagatcttgaagttagtacctttgaaaggttaatgagcatcaattacctgggcagcgtgtaccccagccgggccgtgatcaccaccatgaaggagcgccgggtgggcaggatcgtgtttgtgtcctcccaggcaggacagttgggattattcggtttcacagcctactctgcatccaagtttgccataaggggattggcagaagctttgcagatggaggtgaagccatataatgtctacatcacagttgcttacccaccagacacagacacacctggctttgccgaagaaaacagaacaaagcctttggagactcgacttatttcagagaccacatctgtgtgcaaaccagaacaggtggccaaacaaattgttaaagatgccatacaaggaaatttcaacagttcccttggctcagatgggtacatgctctcggccctgacctgtgggatggctccagtaacttctattactgaggggctccagcaggtggtcaccatgggccttttccgcactattgctttgttttaccttggaagttttgacagcatagttcgtcgctgcatgatgcagagagaaaaatctgaaaatgcagacaaaactgcctaatcttcttaccccttggaagaagactgtttccaaataatttgaacagcttgctgctaaatgggacccaatttttggcctatagacacttatgtattgttttcgaatacgtmagattggaccagtgctcttcaggaatgtggctgcaagcaaggggctagaagttcacctcctgacagtattattaatactatgcaaatatggaataggagaccatttgattttctaggctttgtggtagagaggtgaaggtatgagaattaatagcgtgtgaacaaagtaaagaacaggattccagaatgatcattaaatttgtttctatttattcttttttgcccccctagagattaagtccagaaatgtactttctggcacataaagaaatcttgaggactttgtttaaaccttccataaaaaaacaattttcggtttctcggtctctgtctctctgtctctctgtctctctgtctctctgtctctctstctctctctctctctctctttctttctttgtgtattttattcaagatgagttggacccattgccagtgagtctgaatgtcactgacagccctgtgttgtgctcaggactcactctgcygctggtggaaactcatggcttctctctctctttgatcccataaagctacgagggggacgggagagggcagtgcaatgggaagtaaagagatattttccagtaggaaaagcaatgctttcttgtctttagactcaaatgcttagggaacgtttcatttctcattcatggggaaaggcagcctccttaaatgttttctgaagagcggtaaaatctagaagcttaagaatttacagttccttcaataaccatgatgacctgaagttcacctatcccattttagcatctacttgtttttcccatctcttcctttccaattttgcttatactgctgtaatatttttgtaaaaaaaaaaaaaaaggaaaaaaaagaccagctaaaatttycgacttgactttttaacttaactcatgaattaattaaagcaaatgaaaaaattaaaaagtgtgactttttctcggagcatatatgtagcttttaggaaaggctgatgatggtataaagtttgctcattaagaaaaaaagacaaggctgattttgaagagagttgcttttgaaataaaatgatcacctgttctttatgtgactctcccactgaacctgcagacattatttttataccacrtgctaaggaagcccactcatctaactctgtagccctg

SEQ ID NO: 6051 - DNA, 3347 bp, Homo sapiens
accagaacctagagggcctcgggattgcggaagtttggtggggagggtcggagctctggtggagagagtgttgtctaaaacaagttccggaagggaggctgcccttcgcggtccgagaaccaccggcctccccagtttgagggctgttaccccgtgcgcgcttcgacgttgctgctgttggctctcctcgcccctcgttcccttgggaaccgcctgggaactccgccatgtcatccacttcgcccaacctccagaaagcgatagatctggctagcaaagcagcgcaagaagacaaggctgggaactaygaagaagcccttcagctctatcagcatgctgtgcagtattttcttcatgtcgttaaatatgaagcacagggtgataaagccaagcaaagtatcagggcaaagtgyacagaatatcttgatagagcagaaaaactaaaggagtacctgaaaaataaagagaaaaaagcacagaagccagtgaaagaaggacagccgagtccagcagatgagaaggggaatgacagtgatggggaaggagaatctgatgatcctgaaaaaaagaaactacagaatcaacttcaaggtgccattgttatagaacgaccaaatgtgaaatggagtgacgttgctggacttgaaggagccaaagaagcactgaaagaggctgtgatactgcctattaaatttcctcatctttttacaggcaagagaacaccttggaggggaatcctattatttgggccgcctggaacaggaaagtcctacttagccaaagctgtagcaacagaagccaacaactcaacatttttttcaatatcttcytctgatcttgtttctaagtggctaggtgaaagtgaaaaactggttaagaatttattccaacttgccagagagaacaagccctccattatcttcattgatgaaattgattctctctgtggttcaagaagtgaaaatgaaagtgaagccgcacgtagaattaagacggagttcctagtgcaaatgcaaggggttggtgtagacaatgatggaattttggttctgggagctacaaatataccctgggttctggattctgccattaggcgaagatttgagaaacgaatttatattcccttgccggaaccccatgcccgagcagcaatgtttaaactgcacctagggaccactcagaacagtctcacggaagcagactttcgggaacttgggaggaaaacagatggttattcaggggcagatataagtatcattgtacgtgatgcccttatgcagcctgttaggaaagtacagtcagctactcattttaaaaaggttcgcggaccttcccgagctgatcctaaccatcttgtagatgatctgctaacaccttgctctccaggtgaccctggtgccattgaaatgacrtggatggatgtccctggagataaacttttggagccagttgtttccatgtcggatatgttgcggtcactatctaacacaaaacctacagtcaatgaacatgacttgttgaaattaaagaagtttacagaagattttggtcaagaaggctaagccaaagacaaggaagatgcttaccatatgtattctttctttcatagatatttttgtctatttggatcgcattaattgtttccagtaaaactcttttaccacagggaaatacacatctcacttcagagttccattaggttttatattgtacttttcctccattacttattaaatactcctrttaacaaaaggtacaaaataacaggttatgaggaaatgagcgatatatgaacggcataaaaacagaaattacccagtaaaaaggatgtcagaaattgacatacaaatatttacaatttttatgaatggtggtctttgcaaagagcatttatattttcttttttttttactaaaatgatatagggtttattttatattttcaaaaaaattgttaaacatcattcttatcaatgtwaaatttacgttattaaaaaattacaaatgatagaatctttactcagggatgggcaataaaacagcaaagagctttgtgattgggtttgaaagattttgaattayagacagtgctcttaatagtttttaataagttgatatttttttctgtgtagatttaaataatttctttaaaagcgtaagctttggctgggcatggtggcttatgcctgtaatcccagcactttgggaggctacgatgggtggatcacctgaggtcaggagttcaagaccagtctggccaacatggtgaaatgccgtctctactaaaaatacaaaaattagctgggcatgatggcgagtgtctgtaatcccagctactcaggaggctgaggcgggagaatcacttgaacctgggaggcagaggttgcagtgagctgagatcgcgctactgcattccagcctgggcgccgagatagcgccattgcactccagcctgggcgactgaataaaactctgtctcaaaaaaaaacaaaaacggtaagcttttatatttaattaactgatacctttcactgtgcaatctcaagaggaagattttctaaattagacattgtctttaccttaaagaagaaaattgtctatttcagtgtcttttttagcaagattgaccaaaacaggtggtaggtgtgtaatttttaactgtcatgaaatactgtaatgcgcacctttgctaataaggaaatggtctccctttgaattatgggaagtttcttgtctgtgatatggggtgtctgtgtacatatatgtatatttccttttttaatacaggataataatatggggtcttgtccttcaccttttaagttcagggaacagtttgtcctgaccacacatatgttatcagtgtaatgctttatgaagctttagaaatgagctcatgactcattaaaaaataataaacgatgctattttaatattttcaaataaataatctgaggatgtgtttcatactttagcatcaacgctgagttgtgccttgtagaattgcattgtctatacatgcaaaagactattaagttaggatgaactagattccctaattacagtgaaattctatcttgcaaatgctatagaataacttgcattttaaagtgtatttgcacattttacatatgctatgtggttgcctttgggttttctgtacagattgtttttgttattaaatggaaaaggcctgaattatgctcttatgtgaagtaaattgatataacctattgactgtattctgtgtattattctttattttgggaccttctgtgtaaaagaaaatattacctaaattggttagatacaaagaaatcattaaaattattaatgtatatatgaaaa

SEQ ID NO: 6052 - DNA, 2370 bp, Homo sapiens
accagaacctagagggcctcgggattgcggaagtttggtggggagggtcggagctctggtggagagagtgttgtctaaaacaagttccggaagggaggctgcccttcgcggtccgagaaccaccggcctccccagtttgagggctgttaccccgtgcgcgcttcgacgttgctgctgttggctctcctcgcccctcgttcccttgggaaccgcctgggaactccgccatgtcatccacttcgcccaacctccagaaagcgatagatctggctagcaaagcagcgcaagaagacaaggctgggaactaygaagaagcccttcagctctatcagcatgctgtgcagtattttcttcatgtcgttaaatatgaagcacagggtgataaagccaagcaaagtatcagggcaaagtgyacagaatatcttgatagagcagaaaaactaaaggagtacctgaaaaataaagagaaaaaagcacagaagccagtgaaagaaggacagccgagtccagcagatgagaaggggaatgacagtgatggggaaggagaatctgatgatcctgaaaaaaagaaactacagaatcaacttcaaggtgccattgttatagaacgaccaaatgtgaaatggagtgacgttgctggacttgaaggagccaaagaagcactgaaagaggctgtgatactgcctattaaatttcctcatctttttacaggcaagagaacaccttggaggggaatcctattatttgggccgcctggaacaggaaagtcctacttagccaaagctgtagcaacagaagccaacaactcaacatttttttcaatatcttcytctgatcttgtttctaagtggctaggtgaaagtgaaaaactggttaagaatttattccaacttgccagagagaacaagccctccattatcttcattgatgaaattgattctctctgtggttcaagaagtgaaaatgaaagtgaagccgcacgtagaattaagacggagttcctagtgcaaatgcaaggggttggtgtagacaatgatggaattttggttctgggagctacaaatataccctgggttctggattctgccattaggcgaagatttgagaaacgaatttatattcccttgccggaaccccatgcccgagcagcaatgtttaaactgcacctagggaccactcagaacagtctcacggaagcagactttcgggaacttgggaggaaaacagatggttattcaggggcagatataagtatcattgtacgtgatgcccttatgcagcctgttaggaaagtacagtcagctactcattttaaaaaggttcgcggaccttcccgagctgatcctaaccatcttgtagatgatctgctaacaccttgctctccaggtgaccctggtgccattgaaatgacrtggatggatgtccctggagataaacttttggagccagttgtttccatgtcggatatgttgcggtcactatctaacacaaaacctacagtcaatgaacatgacttgttgaaattaaagaagtttacagaagattttggtcaagaaggctaagccaaagacaaggaagatgcttaccatatgtattctttctttcatagatatttttgtctatttggatcgcattaattgtttccagtaaaactcttttaccacagggaaatacacatctcacttcagagttccattaggttttatattgtacttttcctccattacttattaaatactcctrttaacaaaaggtacaaaataacaggttatgaggaaatgagcgatatatgaacggcataaaaacagaaattacccagtaaaaaggatgtcagaaattgacatacaaatatttacaatttttatgaatggtggtctttgcaaagagcatttatattttcttttttttttactaaaatgatatagggtttattttatattttcaaaaaaattgttaaacatcattcttatcaatgtwaaatttacgttattaaaaaattacaaatgatagaatctttactcagggatgggcaataaaacagcaaagagctttgtgattgggtttgaaagattttgaattayagacagtgctcttaatagtttttaataagttgatatttttttctgtgtagatttaaataatttctttaaaagcgtaagctttggctgggcatggtggcttatgcctgtaatcccagcactttgggaggctacgatgggtggatcacctgaggtcaggagttcaagaccagtctggccaacatggtgaaatgccgtctctactaaaaatacaaaaattagctgggcatgatggcgagtgtctgtaatcccagctactcagcctcccgagtagctgggattacaggcaccc

SEQ ID NO: 6053 - DNA, 1659 bp, Homo sapiens
cggcgcgcgggcggccgcgaccgccggggacgagcttggaggaaaaggaaccgggagccgcccacccgggggcgctctccggacccccagggtcctagcgcgcggcccttaccgagcctgggcgcccggatttcggyagcggatcgcctttccgggttggcggcccgcctgattgggaacagccggccgsttgccgggggaacgcgggagtcgggcccgacctgagccacgcrggcttggtgcccacctgtgcgcgccgcctgcgaagaaggaacggtctrgggagaaggcgccgccggccgcccccgtycccaccgcggccgtcgctggagagttcgagccgcctagcgcccctggagctccccaaccatgaagcycaacttctccctgcgactgcggatcttcaacctcaactgctggggcattccgtacttgagcaagcaccgggccgaccgcatgmggcgcctgggagactttctgaaccaggagagcttcgacctggctttgctggaggaggtgtggagtgagcaggacttccagtacctgagacagaagctgtcacctacctacccagctgcacaccacttccggagcggaatcattggcagtggcctctgtgtcttctccaaacatccaatccaggagcttacccagcacatctacactctcaatggctacccctacatgatccatcatggtgactggttcagtgggaaggctgtggggctgctggtgctccatctaagtggcatggtgctcaacgcctatgtgacccatctccatgccgaatacaatcgacagaaggacatctacctagcacatcgtgtggcccaagcttgggaattggcccagttcatccaccacacatccaagaaggcagacgtggttctgttgtgtggagacctcaacatgcacccagaagacctgggctgctgcctgctgaaggagtggacagggcttcatgatgcctatcttgaaactcgggacttcaagggctctgaggaaggcaacacaatggtacccaagaactgctacgtcagccagcaggagctgaagccatttccctttggtgtccgcattgactacgtgctttacaaggcagtttctgggttttacatctcctgtaagagttttgaaaccactacaggctttgaccctcacagkggcacccccctctctgatcatgaagccctgatggctactctgtttgtgaggcacagccccccacagcagaaccccagctctacccacggaccagcagagaggtcgccgttgatgtgtgtgctaaaggaggcctggacggagctgggtctgggcatggctcaggctcgctggtgggccaccttcgctagctatgtgattggcctggggctgcttctcctggcactgctgtgtgtcctggcggctggaggaggggccggggaagctgccatactgctctggacccccagtgtagggctggtgctgtgggcaggtgcattctacctcttccacgtacaggaggtcaatggcttatatagggcccaggctgagctccagcatgtgctaggaagggcaagggaggcccaggatctgggcccagagcctcagccagccctactcctggggcagcaggagggggacagaactaaagaacaataaagcttggccctttagtgg

SEQ ID NO: 6054 - DNA, 1223 bp, Homo sapiens
gctcgtccccggcggtcgcggccgcccgcgcgccggcggcccagcaacaggcgcaaagttgaggaaaggcccagccgccacgggccgccctcgacccgcccctgggccccgcctcctgcgagcggcggaggcgggsccgcgcggttgccggagcgacgcgcagtgtttggggtcaccgggcgtccccgggcgcggccatggcaaggccgcagccgtgcgggcccccgcacgctaggtgcggctcgccgtcgctgccggagcggccgctgcaggtgaaggtggtggggctcttcagctgccccaactttcagattgcgaagagcgccgctgagaatctgaagaataatcatccatccaaatttgaagatcctatattagttcctcttcaagaatttgcatggcatcaatatctacaggagaaaaaaagggaactcaaaaatgaaacctgggaatattcttcctctgtgatttcttttgttaatggtcagtttctgggtgatgcattggatctgcagaaatgggcccacgaggtgtgggatatagttgacattaaaccctctgcactttatgacgcactcactgaggatttttccgctaagttcttaagagacaccaagcatgatttcgtgtttttggacatttgtattgattcttctccaattggaagattgatttttgagctatactgtgatgtgtgtcccaaaacatgtaaaaattttcaggtcttgtgcacaggaaaagcagggttttctcaacgtggcataagactacattacaaaaattccatttttcatcgaatagtacagaatggctggatacaaggaggggatatagtgtatggaaaaggagataatggagagtcgatttatggtccaacatttgaagatgaaaacttttcagttcctcataataaaagaggagtacttggaatggccaacaaaggccgtcacagcaacgggtcacaattctatatcacactgcaagcaactccttatctagatagaaaatttgtggcttttgggcaactgattgaaggaacagaagtgcttaaacaactagaattagttccaacacagaatgaaagaccaatacatatgtgtagaattactgacagtggagatccttatgcttgattttcatatcaatattttctgtgataatttattactttgtatctgatcagctgtttgtggatttaattaaaaagtacttgataaattgta

SEQ ID NO: 6055 - DNA, 3573 bp, Homo sapiens
tttgtytgtttatttttctatatagagacgaggtctcactgtgttgcccagcctggtatcgaacctctgggctcaagcgatcctcccgcttcggcctcccgaagtactgggattacaagcgtgagccaccgcgccctgcccagtggaatactttcaacggtgcttctgcattgacttcccattttccaacccatccacaaactgcagccaaaatgatgttactacagtaacaacttggagaaagcagtgtggyttaatctggaaggagcagaagctgtggagtccaaaggacccgtgttcctatccttgttgtgccacttgacacgtttagcacaagggtccccacagtgttagttcaccgtctccagcaatcackatgactccctgragggctgtcaaacgaaacaaaggcgcaaactgagacaattccattgtttacgtaactttcgccaaatcggctcyttcctacgaaatatscagctcatagagcaggctgagatgctttgttgctttaattctctttaagagtcacagctgtccattttccacgtgcggctgaagaatggatttcagagcgctctccctccggcmgtgttcacctagtaaccccttcsggataaggacctgcagcccgggcgcgacccggaaagggaatccgcccttttcgcctccttcgcgccaatcgcctggagttggcgtttccgcagccgggacacagcccaccctctaagagccgcggagtcggggacggtagaaggggccgcgcgtgcgcagtggcgtccgctgtgcttccggtgcgccgggygcggacgcgggcacgcacacacgcaagcacgcctccacttaactcgcgccgccgcggcagctcgagtccaccagcagcgccgtccgcttgaccgagatgctgcgggcctgtcagttatcgggtgtgaccgccgccgcccagagttgtctctgtgggaagtttgtcctccgtccattgcgaccatgccgcagatactctacttcaggcagctctgggttgactactggcaaaattgctggagctggccttttgtttgttggtggaggtattggtggcactatcctatatgccaaatgggattcccatttccgggaaagtgtagagaaaaccataccttactcagacaaactcttcgagatggttcttggtcctgcagcttataatgttccattgccaaagaaatcgattcagtcgggtccactaaaaatctctagtgtatcagaagtaatgaaagaatctaaacagyctgcctcacaactccaaaaacaaaagggagatactccagcttcagcaacagcacctacagaagcggctcaaattatttctgcagcaggtgataccctgtcggtcccagcccctgcagttcagcctgaggaatctttaaaaactgatcaccctgaaattggtgaaggaaaacccacacctgcactttcagaagaagcatcctcatcttctataagggagcgaccacctgaagaagttgcagctcgccttgcacaacaggaaaaacaagaacaagttaaaattgagtctctagccaagagcttagaagatgctctgaggcaaactgcaagtgtcactctgcaggctattgcagctcagaatgctgcggtccaggctgtcaatgcacactccaacatattgaaagccgccatggacaattctgagattgcaggcgagaagaaatctgctcagtggcgcacagtggagggtgcattgaaggaacgcagaaaggcagtagatgaagctgccgatgyccttctcaaagccaaagaagagttagagaagatgaaaagtgtgattgaaaatgcaaagaaaaaagaggttgctggggccaagcctcatataactgctgcagagggtaaacttcacaacatgatagttgatctggataatgtggtcaaaaaggtccaagcagctcagtctgaggctaaggttgtrtctcagtatcatgagctggtggtccaagctcgggatgactttaaacgagagctggacagtattactccagaagtccttcctggrtggaaaggaatgaatgctcttttgcttagctgacaagctctctactgatgatctgaactccctcattgctcatgcacatcgtcgtattgatcagctgaacagagagctggcagaacagaaggccaccgaaaagcagcacatcacgttagccttgragaaacaaaagctggaagaaaagcgggcatttgactctgcagtagcaaaagcattagaacatcacagaagtgaaatacaggctgaacaggacagaaagatagaagaagtcagagatgccatggaaaatgaaatgagaacccagcttcgccgacaggcagctgcccacactgatcacttgcgagatgtccttagggtacaagaacaggaattgaagtctgaatttgagcagaacctgtctgagaaactctctgaacaagaattacaatttcgtcgtctcagtcaagagcaagttgacaactttactctggatataaatactgcctatgccagactcagaggaatcgaacaggctgttcagagccatgcagttgctgaagaggaagccagaaaagcccaccaactctggctttcagtggaggcattaaagtacagcatgaagacctcatctgcagaaacacctactatcccgctgggtagtgcrgttgaggccatcaaagccaactgttctgataatgaattcacccaagctttaaccgcagctatccctccagagtccctgacccgtggggtgtacagtgaagagacccttagagcccgtttctatgctgttcaaaaactggcccgaagggtagcaatgattgatgaaaccakaaatagcttgtaccagtacttcctctcctacctacagtccctgctcctattcccacctcagcaactgaagccgcccccagagctctgccctgaggatataaacacatttaaattactgtcatatgcttcctattgcattgagcatggtgatctggagctagcagcaaagtttgtcaatcagctgaagggggaatccagacgagtggcacaggactggctgaaggaagcccgaatgaccctagaaacgaaacagatagtggaaatcctgacagcatatgccagcgccgtaggaataggaaccactcaggtgcagccagagtgaggtttaggaagattttcataaagtcatatttcatgtcaaaggaaatcagcagtgatagatgaagggttcgcagcgagagtcccggacttgtctagaaatgagcaggtttacaagtactgttctaaatgttaacacctgttgcatttatattctttccwtttgctatcatgtcagtgaacgccaggagtgctttctttgcaacttgtgtaacattttctgttttttcaggttttactgatgaggcttgtgaggccaatcaaaataatgtttgtgatctctactactgttgattttgccctcggagcaaactgaataaagcaacaagatgaaaactgagtatcttatcccttttcaaaaagtacagttctggccaggtgcrgtagctcacgcctgt

SEQ ID NO: 6056 - DNA, 3557 bp, Homo sapiens
tttgtytgtttatttttctatatagagacgaggtctcactgtgttgcccagcctggtatcgaacctctgggctcaagcgatcctcccgcttcggcctcccgaagtactgggattacaagcgtgagccaccgcgccctgcccagtggaatactttcaacggtgcttctgcattgacttcccattttccaacccatccacaaactgcagccaaaatgatgttactacagtaacaacttggagaaagcagtgtggyttaatctggaaggagcagaagctgtggagtccaaaggacccgtgttcctatccttgttgtgccacttgacacgtttagcacaagggtccccacagtgttagttcaccgtctccagcaatcackatgactccctgragggctgtcaaacgaaacaaaggcgcaaactgagacaattccattgtttacgtaactttcgccaaatcggctcyttcctacgaaatatscagctcatagagcaggctgagatgctttgttgctttaattctctttaagagtcacagctgtccattttccacgtgcggctgaagaatggatttcagagcgctctccctccggcmgtgttcacctagtaaccccttcsggataaggacctgcagcccgggcgcgacccggaaagggaatccgcccttttcgcctccttcgcgccaatcgcctggagttggcgtttccgcagccgggacacagcccaccctctaagagccgcggagtcggggacggtagaaggggccgcgcgtgcgcagtggcgtccgctgtgcttccggtgcgccgggygcggacgcgggcacgcacacacgcaagcacgcctccacttaactcgcgccgccgcggcagctcgagtccaccagcagcgccgtccgcttgaccgagatgctgcgggcctgtcagttatcgggtgtgaccgccgccgcccagagttgtctctgtgggaagtttgtcctccgtccattgcgaccatgccgcagatactctacttcaggcagctctgggttgactactggcaaaattgctggagctggccttttgtttgttggtggaggtattggtggcactatcctatatgccaaatgggattcccatttccgggaaagtgtagagaaaaccataccttactcagacaaactcttcgagatggttcttggtcctgcagcttataatgttccattgccaaagaaatcgattcagtcgggtccactaaaaatctctagtgtatcagaagtaatgaaagaatctaaacagyctgcctcacaactccaaaaacaaaagggagatactccagcttcagcaacagcacctacagaagcggctcaaattatttctgcagcaggtgataccctgtcggtcccagcccctgcagttcagcctgaggaatctttaaaaactgatcaccctgaaattggtgaaggaaaacccacacctgcactttcagaagaagcatcctcatcttctataagggagcgaccacctgaagaagttgcagctcgccttgcacaacaggaaaaacaagaacaagttaaaattgagtctctagccaagagcttagaagatgctctgaggcaaactgcaagtgtcactctgcaggctattgcagctcagaatgctgcggtccaggctgtcaatgcacactccaacatattgaaagccgccatggacaattctgagattgcaggcgagaagaaatctgctcagtggcgcacagtggagggtgcattgaaggaacgcagaaaggcagtagatgaagctgccgatgyccttctcaaagccaaagaagagttagagaagatgaaaagtgtgattgaaaatgcaaagaaaaaagaggttgctggggccaagcctcatataactgctgcagagggtaaacttcacaacatgatagttgatctggataatgtggtcaaaaaggtccaagcagctcagtctgaggctaaggttgtrtctcagtatcatgagctggtggtccaagctcgggatgactttaaacgagagctggacagtattactccagaagtccttcctggrtggaaaggaatgactgacaagctctctactgatgatctgaactccctcattgctcatgcacatcgtcgtattgatcagctgaacagagagctggcagaacagaaggccaccgaaaagcagcacatcacgttagccttgragaaacaaaagctggaagaaaagcgggcatttgactctgcagtagcaaaagcattagaacatcacagaagtgaaatacaggctgaacaggacagaaagatagaagaagtcagagatgccatggaaaatgaaatgagaacccagcttcgccgacaggcagctgcccacactgatcacttgcgagatgtccttagggtacaagaacaggaattgaagtctgaatttgagcagaacctgtctgagaaactctctgaacaagaattacaatttcgtcgtctcagtcaagagcaagttgacaactttactctggatataaatactgcctatgccagactcagaggaatcgaacaggctgttcagagccatgcagttgctgaagaggaagccagaaaagcccaccaactctggctttcagtggaggcattaaagtacagcatgaagacctcatctgcagaaacacctactatcccgctgggtagtgcrgttgaggccatcaaagccaactgttctgataatgaattcacccaagctttaaccgcagctatccctccagagtccctgacccgtggggtgtacagtgaagagacccttagagcccgtttctatgctgttcaaaaactggcccgaagggtagcaatgattgatgaaaccakaaatagcttgtaccagtacttcctctcctacctacagtccctgctcctattcccacctcagcaactgaagccgcccccagagctctgccctgaggatataaacacatttaaattactgtcatatgcttcctattgcattgagcatggtgatctggagctagcagcaaagtttgtcaatcagctgaagggggaatccagacgagtggcacaggactggctgaaggaagcccgaatgaccctagaaacgaaacagatagtggaaatcctgacagcatatgccagcgccgtaggaataggaaccactcaggtgcagccagagtgaggtttaggaagattttcataaagtcatatttcatgtcaaaggaaatcagcagtgatagatgaagggttcgcagcgagagtcccggacttgtctagaaatgagcaggtttacaagtactgttctaaatgttaacacctgttgcatttatattctttccwtttgctatcatgtcagtgaacgccaggagtgctttctttgcaacttgtgtaacattttctgttttttcaggttttactgatgaggcttgtgaggccaatcaaaataatgtttgtgatctctactactgttgattttgccctcggagcaaactgaataaagcaacaagatgaaaactgagtatcttatcccttttcaaaaagtacagttctggccaggtgcrgtagctcacgcctgt

SEQ ID NO: 6057 - DNA, 6451 bp, Homo sapiens
cgcacgttgaatcgcgtggtgactccgggcttgaggttgaattaagaatagtcaggtggtgagtggaacgtctcttggggtgtcggaattcaaaacggacctggaggatgttgatctccaagaacatgccctggcggcggctgcagggcatttccttcgggatgtattcggctgaagagctcaagaaattaagtgttaaatccattacgaaccctcgatacctggacagcctggggaacccatcggcaaacggcctgtacgatttagctttgggccctgcagattccaaagaggtgtgctccacctgcgtgcaggacttcagcaactgttctgggcacctgggccacattgagctcccactcacagtgtataaccctctcctcttcgataagctgtacctgctgcttcggggctcytgtttaaactgccacatgctgacttgtccccgggccgtgattcacctcttactctgccagctgagggttctggaagtcggggccctacaagcagtctacgagcttgagagaattctgaacaggtttctggaagaaaatsccgatccctctgcctctgaaattcgggaggaattagaacaatacacaactgaaattgtgcagaacaacctcctggggtcccagggcgcacatgtaaagaacgtgtgtgagagcaagagcaagctcattgctctcttctggaaggcacatatgaatgctaagcgctgtccccactgcaagaccgggcgatccgttgtccgaaaggaacacaacagcaagttgactatcacrtttccagccatggtgcacaggacagctggccagaaggactctgagcccctgggaattgaggaagctcagataggaaaacgaggatacttaacacccaccagtgcccgcgaacacctttctgccctgtggaagaatgaaggattctttctgaactaccttttttcgggaatggatgatgatggtatggaatccagattcaatcccagtgtgttctttctagatttcttggtggtgccgccctcaaggtatcgcccagtcagtcgcctaggagaccagatgtttactaatggccagacggtgaacttgcaggctgtcatgaaggatgtagttctgattcgaaaacttctggcattgatggcccaagaacagaagttgccagaggaagtggccacacccactacagatgaggaaraagactctttgattgctattgaccgatcctttttgagtacacttccaggccagtccctcatagacaaactttacaacatttggattcgccttcagarccacgtcaatattgtgtttgatagcgagatggacaaactaatgatggacaagtacccaggcattaggcagatcctggagaagaaagaaggcctgttccgaaaacacatgatgggaaagcgagtggactacgctgcgcgctcagtcatctgcccagacatgtacatcaacaccaacgaaattggaattcccatggtgtttgccacaaaactgacctacccacagccagttaccccatggaatgttcaggaacttaggcaagcggtcatcaacggccctaatgtgcacccaggagcctccatggtcatcaatgaggacggcagccgcacagccctgagcgctgtggacatgacccagcgagaggccgtggccaagcagcttctgaccccagccacgggggcacctaagccccaggggacaaaaattgtgtgccggcatgtgaagaatggggacattctgctactgaaccgacagcccacactgcacagaccctccatccaggcccaccgtgcccgcatcctgcctgaagagaaagtgctgcgrctccactatgccaactgcaaggcctataatgccgactttgatggagacgagatgaatgcccatttcccccagagtgagctgggccgggccgaggcctacgtcctggcctgcactgatcagcagtaccttgttcccaaggatggccaaccattggcgggactgatccaggatcacatggtttcaggggcaagcatgactactcggggttgctttttcacccgggagcactatatggagctggtgtaccgaggactcacggacaaagtggggcgcgtgaagctcctttctccttccatcctgaagccctttccgctgtggacaggaaaacaggttgtgtcaacgctgctcataaatataatcccagaggaccacatcccactgaacttatctggaaaggcgaaaatcactgggaaagcctgggtgaaggaaactcctcgatccgttcctggctttaaccctgactcgatgtgcgagtcccaggtgatcatcagggaaggggagctgctctgcggagtgctggacaaggcgcactatgggagctccgcytacggcctggtccactgctgctatgagatctatggaggcgagaccagcggcaaggttctaacctgcctggcccgcctcttcaccgcctacctgcagctctacagaggcttcaccttgggcgtggaagacattttggtgaagccaaaggcagatgtcaagaggcaacgtrtcattgaagaatccacccactgcgggccccaggctgtcagggctgcattaaacctgccagaagccgcatcatatgatgaggtccgaggaaaatggcaggatgcccatctgggcaaggaccagagggattttaacatgattgatctgaagttcaaggaggaagtgaaccattacagcaatgagattaacaaggcatgcatgccttttggcctacacagacagttcccagagaacagcctgcagatgatggtgcagtcgggagccaaaggttcaactgtgaacacgatgcagatctcgtgcctgctgggccagattgaactggaaggtcggagacccccgctgatggcgtctggcaagtcactgccctgctttgagccttatgagttcacccccagggctggtggctttgtcactggcaggttcctyaccggcatcaaacctcctgagttcttcttccactgcatggcaggacgagagggcctggtggacactgctgtgaaaaccagccgctcaggctatctccaaaggtgcatcatcaagcacctagaggggctggtcgtgcagtatgatctcacggtccgtgacagtgacggcagtgtggtgcagttcctgtatggggaggatggcctggacatccccaagacacagttcctgcagcccaagcagttccccttcctggccagcaactacgaggtgataatgaaatcacagcatctccatgaagttttatccagagcagatcccaaaaaagctctccaccacttcagagctatcaaaaaatggcaaagcaagcaccccaacaccctgctgagaagaggcgccttcttgagttattcccagaaaattcaggaagctgtgaaagccctgaaacttgagagtgaaaaccgcaatggccgcagccctgggactcaggagatgctgaggatgtggtatgagttggatgaggaaagccgaaggaaataccagaagaaggcggccrcttgtcctgaccccagtctgtctgtctggcgtcctgacatctactttgcatcagtgtcagaaacatttgaaacaaaggttgatgactacagtcaagagtgggcagctcaaacagagaagagttatgagaaatcagagctttctctcgacaggttgaggaccttgctgcagctgaagtggcagcgctcactgtgtgagccgggcgaggctgtgggcctgctggctgcccagagcatcggagagccctcyacccagatgaccctcaacaccttccactttgcaggcagaggcgagatgaacgtcaccctgggcattccaaggttgcgggagattctcatggtggccagcgccaacatcaagacacccatgatgagcgtgcccgtgctcaacaccaagaaagccctgaagagagtgaaaagcctgaagaagcaactcaccagggtgtgcttgggggaggtgttgcagaaaattgacgtccaggagtccttctgtatggaagaaaaacasaacaaattccaggtgtaccagctgcggtttcagttcctgccacatgcatattaccagcaggagaagtgcctgagacccgaggacatcctgcgcttcatggaaacaagattctttaaacttctgatggaatccatcaaaaagaagaataataaagcatcagctttcaggaacgtaaacactcgaagagctacacagcgggatctggacaacgctggggagttggggaggagtcggggagagcaggagggtgatgaggaagaggaggggcacattgtggatgctgaagctgaggagggrgacgccgatgcctctgatgccaaacgcaaggagaagcaggaggaggaggttgattatgagagtgaggaagaggaggagagggagggcgaggagaacgacgatgaagacatgcaggaggaacgaaatccccacagggaaggtgctcgaaagacccaagagcaagatgaagaggtgggcttaggcactgrggaggacccgtcccttcccgccctcctgacgcagccccggaaacccacccacagccaggrgccccaggggcccgaggccatggagcgccgggtccaggctgtgcgtgagatccacccgttcatagatgactaccagtacgacaccgaggagagcctgtggtgccaggtgacagtgaagctccctctgatgaagatcaactttgacatgagctccctggtagtatctttggcccatggtgccgtcatctatgcgaccaagggcatcactcggtgcctcctgaatgaaacaaccaacaataagaacgagaaggagcttgtgctaaacacagaaggaatcaacctcccagagctattcaagtatgcagaggtcctggatctgcgccgcctctactccaacgacatccacgccatrgccaacacgtatggcattgaggccgcgctgcgggtgatcgagaaggagatcaaggatgtgtttgccgtgtatggcatcgcrgtcgaccctcgccatctctccctggttgctgattatatgtgcttcgagggtgtttacaagccactgaatcgctttgggatccggtcaaactcttccccgctacagcagatgacatttgaaaccagcttccagtttctgaagcaagccaccatgctgggatcccacgatgagctgaggtctccttctgcctgccttgtggtcgggaaggtcgtcaggggcgggacaggcctgttcgagctcaagcagcctctgagatagcagctaccccggcaccatctgcccagctccaaggacccttggtgagggcgtggcccagcctgccttctgcatgagaggaccaggagactggaatccagggcagttccaagtgacagtacagagcacagcagcgaccttgggcctgaaagcagtgggcctctgagctgggccagcttcacctggaaagtgacagagttgctcatccttgcccctccctgtctctggatttttatcaaggtttaccaagcctctgtggcataacccctaaggagaagtcctgattcacgattcactgagaagaccaaggggaagccatgctttgctgctggggaccccaggcacctccagagtagggaagcggggttcttttgctgtgagtggccagggacaacagacaagattcctgggggctcccgatgagcaggaacgtggagcctgctgcccaaggcctgctccttccggctgctccagcccctgggggcagagtccacaaagagtccccatcaagacttcttccctgagtcaagtacagcgtagcatagtcctccacccacccaacctctctgcctggccagggtcctggccctgccactgtgtggcgaggtgtccttctagaccacatcagccccaaggctgggagcagtcgctccagggccgcagcagttcactcccacacatagaacccaggtcactgctggggcgattgaacaggttgcctggcttttctctgctgtcagtttggtgtggaggcctatgttctgccccatacaccccacaggccctgcttatgggaaggaacacaggcctccagcccagaggactgtgccgccctgttcttggccgtccacgtttcctctccctctagcaccagcaatacatttccctggcatggacagaaaagacagagaggacttgtacaaaggctttgtaaaaccagaggctagcttctatctttgtctactgttatttcagctcagggcgggtaatwaacatcattggaactagctattaggaaagaaaaaaaacttggttttttttacaacaattttttcccttggtttgcagtttctgcatttggatttgagaacccagggcggggattttcttggcacagtcaggtcttgggtccctcttcctgtgctttcttgtctgaggccttagggggaagagctcakcctctg

SEQ ID NO: 6058 - DNA, 3625 bp, Homo sapiens
cgcacgttgaatcgcgtggtgactccgggcttgaggttgaattaagaatagtcaggtggtgagtggaacgtctcttggggtgtcggaattcaaaacggacctggaggatgttgatctccaagaacatgccctggcggcggctgcagggcatttccttcgggatgtattcggctgaagagctcaagaaattaagtgttaaatccattacgaaccctcgatacctggacagcctggggaacccatcggcaaacggcctgtacgatttagctttgggccctgcagattccaaagaggtgtgctccacctgcgtgcaggacttcagcaactgttctgggcacctgggccacattgagctcccactcacagtgtataaccctctcctcttcgataagctgtacctgctgcttcggggctcytgtttaaactgccacatgctgacttgtccccgggccgtgattcacctcttactctgccagctgagggttctggaagtcggggccctacaagcagtctacgagcttgagagaattctgaacaggtttctggaagaaaatsccgatccctctgcctctgaaattcgggaggaattagaacaatacacaactgaaattgtgcagaacaacctcctggggtcccagggcgcacatgtaaagaacgtgtgtgagagcaagagcaagctcattgctctcttctggaaggcacatatgaatgctaagcgctgtccccactgcaagaccgggcgatccgttgtccgaaaggaacacaacagcaagttgactatcacrtttccagccatggtgcacaggacagctggccagaaggactctgagcccctgggaattgaggaagctcagataggaaaacgaggatacttaacacccaccagtgcccgcgaacacctttctgccctgtggaagaatgaaggattctttctgaactaccttttttcgggaatggatgatgatggtatggaatccagattcaatcccagtgtgttctttctagatttcttggtggtgccgccctcaaggtatcgcccagtcagtcgcctaggagaccagatgtttactaatggccagacggtgaacttgcaggctgtcatgaaggatgtagttctgattcgaaaacttctggcattgatggcccaagaacagaagttgccagaggaagtggccacacccactacagatgaggaaraagactctttgattgctattgaccgatcctttttgagtacacttccaggccagtccctcatagacaaactttacaacatttggattcgccttcagarccacgtcaatattgtgtttgatagcgagatggacaaactaatgatggacaagtacccaggcattaggcagatcctggagaagaaagaaggcctgttccgaaaacacatgatgggaaagcgagtggactacgctgcgcgctcagtcatctgcccagacatgtacatcaacaccaacgaaattggaattcccatggtgtttgccacaaaactgacctacccacagccagttaccccatggaatgttcaggaacttaggcaagcggtcatcaacggccctaatgtgcacccaggagcctccatggtcatcaatgaggacggcagccgcacagccctgagcgctgtggacatgacccagcgagaggccgtggccaagcagcttctgaccccagccacgggggcacctaagccccaggggacaaaaattgtgtgccggcatgtgaagaatggggacattctgctactgaaccgacagcccacactgcacagaccctccatccaggcccaccgtgcccgcatcctgcctgaagagaaagtgctgcgrctccactatgccaactgcaaggcctataatgccgactttgatggagacgagatgaatgcccatttcccccagagtgagctgggccgggccgaggcctacgtcctggcctgcactgatcagcagtaccttgttcccaaggatggccaaccattggcgggactgatccaggatcacatggtttcaggggcaagcatgactactcggggttgctttttcacccgggagcactatatggagctggtgtaccgaggactcacggacaaagtggggcgcgtgaagctcctttctccttccatcctgaagccctttccgctgtggacaggaaaacaggttgtgtcaacgctgctcataaatataatcccagaggaccacatcccactgaacttatctggaaaggcgaaaatcactgggaaagcctgggtgaaggaaactcctcgatccgttcctggctttaaccctgactcgatgtgcgagtcccaggtgatcatcagggaaggggagctgctctgcggagtgctggacaaggcgcactatgggagctccgcytacggcctggtccactgctgctatgagatctatggaggcgagaccagcggcaaggttctaacctgcctggcccgcctcttcaccgcctacctgcagctctacagaggcttcaccttgggcgtggaagacattttggtgaagccaaaggcagatgtcaagaggcaacgtrtcattgaagaatccacccactgcgggccccaggctgtcagggctgcattaaacctgccagaagccgcatcatatgatgaggtccgaggaaaatggcaggatgcccatctgggcaaggaccagagggattttaacatgattgatctgaagttcaaggaggaagtgaaccattacagcaatgagattaacaaggcatgcatgccttttggcctacacagacagttcccagagaacagcctgcagatgatggtgcagtcgggagccaaaggttcaactgtgaacacgatgcagatctcgtgcctgctgggccagattgaactggaaggtcggagacccccgctgatggcgtctggcaagtcactgccctgctttgagccttatgagttcacccccagggctggtggctttgtcactggcaggttcctyaccggcatcaaacctcctgagttcttcttccactgcatggcaggacgagagggcctggtggacactgctgtgaaaaccagccgctcaggctatctccaaaggtgcatcatcaagcacctagaggggctggtcgtgcagtatgatctcacggtccgtgacagtgacggcagtgtggtgcagttcctgtatggggaggatggcctggacatccccaagacacagttcctgcagcccaagcagttccccttcctggccagcaactacgaggtgataatgaaatcacagcatctccatgaagttttatccagagcagatcccaaaaaagctctccaccacttcagagctatcaaaaaatggcaaagcaagcaccccaacaccctgctgagaagaggcgccttcttgagttattcccagaaaattcaggaagctgtgaaagccctgaaacttgagagtgaaaaccgcaatggccgcagccctgggactcaggagatgctgaggatgtggtatgagttggatgaggaaagccgaaggaaataccagaagaaggcggccrcttgtcctgaccccagtctgtctgtctggcgtcctgacatctactttgcatcagtgtcagaaacatttgaaacaaaggttgatgactacagtcaaga

SEQ ID NO: 6059 - DNA, 6474 bp, Homo sapiens
cgcacgttgaatcgcgtggtgactccgggcttgaggttgaattaagaatagtcaggtggtgagtggaacgtctcttggggtgtcggaattcaaaacggacctggaggatgttgatctccaagaacatgccctggcggcggctgcagggcatttccttcgggatgtattcggctgaagagctcaagaaattaagtgttaaatccattacgaaccctcgatacctggacagcctggggaacccatcggcaaacggcctgtacgatttagctttgggccctgcagattccaaagaggtgtgctccacctgcgtgcaggacttcagcaactgttctgggcacctgggccacattgagctcccactcacagtgtataaccctctcctcttcgataagctgtacctgctgcttcggggctcytgtttaaactgccacatgctgacttgtccccgggccgtgattcacctcttactctgccagctgagggttctggaagtcggggccctacaagcagtctacgagcttgagagaattctgaacaggtttctggaagaaaatsccgatccctctgcctctgaaattcgggaggaattagaacaatacacaactgaaattgtgcagaacaacctcctggggtcccagggcgcacatgtaaagaacgtgtgtgagagcaagagcaagctcattgctctcttctggaaggcacatatgaatgctaagcgctgtccccactgcaagaccgggcgatccgttgtccgaaaggaacacaacagcaagttgactatcacrtttccagccatggtgcacaggacagctggccagaaggactctgagcccctgggaattgaggaagctcagataggaaaacgaggatacttaacacccaccagtgcccgcgaacacctttctgccctgtggaagaatgaaggattctttctgaactaccttttttcgggaatggatgatgatggtatggaatccagattcaatcccagtgtgttctttctagatttcttggtggtgccgccctcaaggtatcgcccagtcagtcgcctaggagaccagatgtttactaatggccagacggtgaacttgcaggctgtcatgaaggatgtagttctgattcgaaaacttctggcattgatggcccaagaacagaagttgccagaggaagtggccacacccactacagatgaggaaraagactctttgattgctattgaccgatcctttttgagtacacttccaggccagtccctcatagacaaactttacaacatttggattcgccttcagarccacgtcaatattgtgtttgatagcgagatggacaaactaatgatggacaagtacccaggcattaggcagatcctggagaagaaagaaggcctgttccgaaaacacatgatgggaaagcgagtggactacgctgcgcgctcagtcatctgcccagacatgtacatcaacaccaacgaaattggaattcccatggtgtttgccacaaaactgacctacccacagccagttaccccatggaatgttcaggaacttaggcaagcggtcatcaacggccctaatgtgcacccaggagcctccatggtcatcaatgaggacggcagccgcacagccctgagcgctgtggacatgacccagcgagaggccgtggccaagcagcttctgaccccagccacgggggcacctaagccccaggggacaaaaattgtgtgccggcatgtgaagaatggggacattctgctactgaaccgacagcccacactgcacagaccctccatccaggcccaccgtgcccgcatcctgcctgaagagaaagtgctgcgrctccactatgccaactgcaaggcctataatgccgactttgatggagacgagatgaatgcccatttcccccagagtgagctgggccgggccgaggcctacgtcctggcctgcactgatcagcagtaccttgttcccaaggatggccaaccattggcgggactgatccaggatcacatggtttcaggggcaagcatgactactcggggttgctttttcacccgggagcactatatggagctggtgtaccgaggactcacggacaaagtggggcgcgtgaagctcctttctccttccatcctgaagccctttccgctgtggacaggaaaacaggttgtgtcaacgctgctcataaatataatcccagaggaccacatcccactgaacttatctggaaaggcgaaaatcactgggaaagcctgggtgaaggaaactcctcgatccgttcctggctttaaccctgactcgatgtgcgagtcccaggtgatcatcagggaaggggagctgctctgcggagtgctggacaaggcgcactatgggagctccgcytacggcctggtccactgctgctatgagatctatggaggcgagaccagcggcaaggttctaacctgcctggcccgcctcttcaccgcctacctgcagctctacagaggcttcaccttgggcgtggaagacattttggtgaagccaaaggcagatgtcaagaggcaacgtrtcattgaagaatccacccactgcgggccccaggctgtcagggctgcattaaacctgccagaagccgcatcatatgatgaggtccgaggaaaatggcaggatgcccatctgggcaaggaccagagggattttaacatgattgatctgaagttcaaggaggaagtgaaccattacagcaatgagattaacaaggcatgcatgccttttggcctacacagacagttcccagagaacagcctgcagatgatggtgcagtcgggagccaaaggttcaactgtgaacacgatgcagatctcgtgcctgctgggccagattgaactggaaggtcggagacccccgctgatggcgtctggcaagtcactgccctgctttgagccttatgagttcacccccagggctggtggctttgtcactggcaggttcctyaccggcatcaaacctcctgagttcttcttccactgcatggcaggacgagagggcctggtggacactgctgtgaaaaccagccgctcaggctatctccaaaggtgcatcatcaagcacctagaggggctggtcgtgcagtatgatctcacggtccgtgacagtgacggcagtgtggtgcagttcctgtatggggaggatggcctggacatccccaagacacagttcctgcagcccaagcagttccccttcctggccagcaactacgaggtgataatgaaatcacagcatctccatgaagttttatccagagcagatcccaaaaaagctctccaccacttcagagctatcaaaaaatggcaaagcaagcaccccaacaccctgctgagaagaggcgccttcttgagttattcccagaaaattcaggaagctgtgaaagccctgaaacttgagagtgaaaaccgcaatggccgcagccctgggactcaggagctgagacccatccttctgttcagatgctgaggatgtggtatgagttggatgaggaaagccgaaggaaataccagaagaaggcggccrcttgtcctgaccccagtctgtctgtctggcgtcctgacatctactttgcatcagtgtcagaaacatttgaaacaaaggttgatgactacagtcaagagtgggcagctcaaacagagaagagttatgagaaatcagagctttctctcgacaggttgaggaccttgctgcagctgaagtggcagcgctcactgtgtgagccgggcgaggctgtgggcctgctggctgcccagagcatcggagagccctcyacccagatgaccctcaacaccttccactttgcaggcagaggcgagatgaacgtcaccctgggcattccaaggttgcgggagattctcatggtggccagcgccaacatcaagacacccatgatgagcgtgcccgtgctcaacaccaagaaagccctgaagagagtgaaaagcctgaagaagcaactcaccagggtgtgcttgggggaggtgttgcagaaaattgacgtccaggagtccttctgtatggaagaaaaacasaacaaattccaggtgtaccagctgcggtttcagttcctgccacatgcatattaccagcaggagaagtgcctgagacccgaggacatcctgcgcttcatggaaacaagattctttaaacttctgatggaatccatcaaaaagaagaataataaagcatcagctttcaggaacgtaaacactcgaagagctacacagcgggatctggacaacgctggggagttggggaggagtcggggagagcaggagggtgatgaggaagaggaggggcacattgtggatgctgaagctgaggagggrgacgccgatgcctctgatgccaaacgcaaggagaagcaggaggaggaggttgattatgagagtgaggaagaggaggagagggagggcgaggagaacgacgatgaagacatgcaggaggaacgaaatccccacagggaaggtgctcgaaagacccaagagcaagatgaagaggtgggcttaggcactgrggaggacccgtcccttcccgccctcctgacgcagccccggaaacccacccacagccaggrgccccaggggcccgaggccatggagcgccgggtccaggctgtgcgtgagatccacccgttcatagatgactaccagtacgacaccgaggagagcctgtggtgccaggtgacagtgaagctccctctgatgaagatcaactttgacatgagctccctggtagtatctttggcccatggtgccgtcatctatgcgaccaagggcatcactcggtgcctcctgaatgaaacaaccaacaataagaacgagaaggagcttgtgctaaacacagaaggaatcaacctcccagagctattcaagtatgcagaggtcctggatctgcgccgcctctactccaacgacatccacgccatrgccaacacgtatggcattgaggccgcgctgcgggtgatcgagaaggagatcaaggatgtgtttgccgtgtatggcatcgcrgtcgaccctcgccatctctccctggttgctgattatatgtgcttcgagggtgtttacaagccactgaatcgctttgggatccggtcaaactcttccccgctacagcagatgacatttgaaaccagcttccagtttctgaagcaagccaccatgctgggatcccacgatgagctgaggtctccttctgcctgccttgtggtcgggaaggtcgtcaggggcgggacaggcctgttcgagctcaagcagcctctgagatagcagctaccccggcaccatctgcccagctccaaggacccttggtgagggcgtggcccagcctgccttctgcatgagaggaccaggagactggaatccagggcagttccaagtgacagtacagagcacagcagcgaccttgggcctgaaagcagtgggcctctgagctgggccagcttcacctggaaagtgacagagttgctcatccttgcccctccctgtctctggatttttatcaaggtttaccaagcctctgtggcataacccctaaggagaagtcctgattcacgattcactgagaagaccaaggggaagccatgctttgctgctggggaccccaggcacctccagagtagggaagcggggttcttttgctgtgagtggccagggacaacagacaagattcctgggggctcccgatgagcaggaacgtggagcctgctgcccaaggcctgctccttccggctgctccagcccctgggggcagagtccacaaagagtccccatcaagacttcttccctgagtcaagtacagcgtagcatagtcctccacccacccaacctctctgcctggccagggtcctggccctgccactgtgtggcgaggtgtccttctagaccacatcagccccaaggctgggagcagtcgctccagggccgcagcagttcactcccacacatagaacccaggtcactgctggggcgattgaacaggttgcctggcttttctctgctgtcagtttggtgtggaggcctatgttctgccccatacaccccacaggccctgcttatgggaaggaacacaggcctccagcccagaggactgtgccgccctgttcttggccgtccacgtttcctctccctctagcaccagcaatacatttccctggcatggacagaaaagacagagaggacttgtacaaaggctttgtaaaaccagaggctagcttctatctttgtctactgttatttcagctcagggcgggtaatwaacatcattggaactagctattaggaaagaaaaaaaacttggttttttttacaacaattttttcccttggtttgcagtttctgcatttggatttgagaacccagggcggggattttcttggcacagtcaggtcttgggtccctcttcctgtgctttcttgtctgaggccttagggggaagagctcakcctctg

SEQ ID NO: 6060 - DNA, 6928 bp, Homo sapiens
cgcacgttgaatcgcgtggtgactccgggcttgaggttgaattaagaatagtcaggtggtgagtggaacgtctcttggggtgtcggaattcaaaacggacctggaggatgttgatctccaagaacatgccctggcggcggctgcagggcatttccttcgggatgtattcggctgaagagctcaagaaattaagtgttaaatccattacgaaccctcgatacctggacagcctggggaacccatcggcaaacggcctgtacgatttagctttgggccctgcagattccaaagaggtgtgctccacctgcgtgcaggacttcagcaactgttctgggcacctgggccacattgagctcccactcacagtgtataaccctctcctcttcgataagctgtacctgctgcttcggggctcytgtttaaactgccacatgctgacttgtccccgggccgtgattcacctcttactctgccagctgagggttctggaagtcggggccctacaagcagtctacgagcttgagagaattctgaacaggtttctggaagaaaatsccgatccctctgcctctgaaattcgggaggaattagaacaatacacaactgaaattgtgcagaacaacctcctggggtcccagggcgcacatgtaaagaacgtgtgtgagagcaagagcaagctcattgctctcttctggaaggcacatatgaatgctaagcgctgtccccactgcaagaccgggcgatccgttgtccgaaaggaacacaacagcaagttgactatcacrtttccagccatggtgcacaggacagctggccagaaggactctgagcccctgggaattgaggaagctcagataggaaaacgaggatacttaacacccaccagtgcccgcgaacacctttctgccctgtggaagaatgaaggattctttctgaactaccttttttcgggaatggatgatgatggtatggaatccagattcaatcccagtgtgttctttctagatttcttggtggtgccgccctcaaggtatcgcccagtcagtcgcctaggagaccagatgtttactaatggccagacggtgaacttgcaggctgtcatgaaggatgtagttctgattcgaaaacttctggcattgatggcccaagaacagaagttgccagaggaagtggccacacccactacagatgaggaaraagactctttgattgctattgaccgatcctttttgagtacacttccaggccagtccctcatagacaaactttacaacatttggattcgccttcagarccacgtcaatattgtgtttgatagcgagatggacaaactaatgatggacaagtacccaggcattaggcagatcctggagaagaaagaaggcctgttccgaaaacacatgatgggaaagcgagtggactacgctgcgcgctcagtcatctgcccagacatgtacatcaacaccaacgaaattggaattcccatggtgtttgccacaaaactgacctacccacagccagttaccccatggaatgttcaggaacttaggcaagcggtcatcaacggccctaatgtgcacccaggagcctccatggtcatcaatgaggacggcagccgcacagccctgagcgctgtggacatgacccagcgagaggccgtggccaagcagcttctgaccccagccacgggggcacctaagccccaggggacaaaaattgtgtgccggcatgtgaagaatggggacattctgctactgaaccgacagcccacactgcacagaccctccatccaggcccaccgtgcccgcatcctgcctgaagagaaagtgctgcgrctccactatgccaactgcaaggcctataatgccgactttgatggagacgagatgaatgcccatttcccccagagtgagctgggccgggccgaggcctacgtcctggcctgcactgatcagcagtaccttgttcccaaggatggccaaccattggcgggactgatccaggatcacatggtttcaggggcaagcatgactactcggggttgctttttcacccgggagcactatatggagctggtgtaccgaggactcacggacaaagtggggcgcgtgaagctcctttctccttccatcctgaagccctttccgctgtggacaggaaaacaggttgtgtcaacgctgctcataaatataatcccagaggaccacatcccactgaacttatctggaaaggcgaaaatcactgggaaagcctgggtgaaggaaactcctcgatccgttcctggctttaaccctgactcgatgtgcgagtcccaggtgatcatcagggaaggggagctgctctgcggagtgctggacaaggcgcactatgggagctccgcytacggcctggtccactgctgctatgagatctatggaggcgagaccagcggcaaggttctaacctgcctggcccgcctcttcaccgcctacctgcagctctacagaggcttcaccttgggcgtggaagacattttggtgaagccaaaggcagatgtcaagaggcaacgtrtcattgaagaatccacccactgcgggccccaggctgtcagggctgcattaaacctgccagaagccgcatcatatgatgaggtccgaggaaaatggcaggatgcccatctgggcaaggaccagagggattttaacatgattgatctgaagttcaaggaggaagtgaaccattacagcaatgagattaacaaggcatgcatgccttttggcctacacagacagttcccagagaacagcctgcagatgatggtgcagtcgggagccaaaggttcaactgtgaacacgatgcagatctcgtgcctgctgggccagattgaactggaaggtcggagacccccgctgatggcgtctggcaagtcactgccctgctttgagccttatgagttcacccccagggctggtggctttgtcactggcaggttcctyaccggcatcaaacctcctgagttcttcttccactgcatggcaggacgagagggcctggtggacactgctgtgaaaaccagccgctcaggctatctccaaaggtgcatcatcaagcacctagaggggctggtcgtgcagtatgatctcacggtccgtgacagtgacggcagtgtggtgcagttcctgtatggggaggatggcctggacatccccaagacacagttcctgcagcccaagcagttccccttcctggccagcaactacgaggtgataatgaaatcacagcatctccatgaagttttatccagagcagatcccaaaaaagctctccaccacttcagagctatcaaaaaatggcaaagcaagcaccccaacaccctgctgagaagaggcgccttcttgagttattcccagaaaattcaggaagctgtgaaagccctgaaacttgagagtgaaaaccgcaatggccgcagccctgggactcaggagatgctgaggatgtggtatgagttggatgaggaaagccgaaggaaataccagaagaaggcggccrcttgtcctgaccccagtctgtctgtctggcgtcctgacatctactttgcatcagtgtcagaaacatttgaaacaaaggttgatgactacagtcaagagtgggcagctcaaacagagaagagttatgagaaatcagagctttctctcgacaggttgaggaccttgctgcagctgaagtggcagcgctcactgtgtgagccgggcgaggctgtgggcctgctggctgcccagagcatcggagagccctcyacccagatgaccctcaacaccttccactttgcaggcagaggcgagatgaacgtcaccctgggcattccaaggttgcgggagattctcatggtggccagcgccaacatcaagacacccatgatgagcgtgcccgtgctcaacaccaagaaagccctgaagagagtgaaaagcctgaagaagcaactcaccagggtgtgcttgggggaggtgttgcagaaaattgacgtccaggagtccttctgtatggaagaaaaacasaacaaattccaggtgtaccagctgcggtttcagttcctgccacatgcatattaccagcaggagaagtgcctgagacccgaggacatcctgcgcttcatggaaacaagattctttaaacttctgatggaatccatcaaaaagaagaataataaagcatcagctttcaggaacgtaaacactcgaagagctacacagcgggatctggacaacgctggggagttggggaggagtcggggagagcaggagggtgatgaggaagaggaggggcacattgtggatgctgaagctgaggagggrgacgccgatgcctctgatgccaaacgcaaggagaagcaggaggaggaggttgattatgagagtgaggaagaggaggagagggagggcgaggagaacgacgatgaagacatgcaggaggaacgaaatccccacagggaaggtgctcgaaagacccaagagcaagatgaagaggtgggcttaggcactgrggaggacccgtcccttcccgccctcctgacgcagccccggaaacccacccacagccaggrgccccaggggcccgaggccatggagcgccgggtccaggctgtgcgtgagatccacccgttcatagatgactaccagtacgacaccgaggagagcctgtggtgccaggtgacagtgaagctccctctgatgaagatcaactttgacatgagctccctggtagtatctttggcccatggtgccgtcatctatgcgaccaagggcatcactcggtgcctcctgaatgaaacaaccaacaataagaacgagaaggagcttgtgctaaacacagaaggaatcaacctcccagagctattcaagtatgcagaggtcctggatctgcgccgcctctactccaacgacatccacgccatrgccaacacgtatggcattgaggccgcgctgcgggtgatcgagaaggagatcaaggatgtgtttgccgtgtatggcatcgcrgtcgaccctcgccatctctccctggttgctgattatatgtgcttcgagggtgtttacaagccactgaatcgctttgggatccggtcaaactcttccccgctacagcagatgacatttgaaaccagcttccagtttctgaagcaagccaccatgctgggatcccacgatgagctgaggtctccttctgcctgccttgtggtcgggaaggtcgtcaggggcgggacaggcctgttcgagctcaagcagcctctgagatagcagctaccccggcaccatctgcccagctccaaggacccttggtgagggcgtggcccagcctgccttctgcatgagaggaccaggagactggaatccagggcagttccaagtgacagtacagagcacagcagcgaccttgggcctgaaagcagtgggcctctgagctgggccagcttcacctggaaagtgacagagttgctcatccttgcccctccctgtctctggatttttatcaaggtttaccaagtcttctgagtccccctgagatggctggggcytcacctgtgctgcaggaggcctctgtggcataacccctaaggagaagtcctgattcacgattcactgagaagaccaaggggaagccatgctttgctgctggggaccccaggcacctccagagtagggaagcggggttcttttgctgtgagtggccagggacaacagacaagattcctgggggctcccgatgagcaggaacgtggagcctgctgcccaaggcctgctccttccggctgctccagcccctgggggcagagtccacaaagagtccccatcaagacttcttccctgagtcaagtacagcgtagcatagtcctccacccacccaacctctctgcctggccagggtcctggccctgccactgtgtggcgaggtgtccttctagaccacatcagccccaaggctgggagcagtcgctccagggccgcagcagttcactcccacacatagaacccaggtcactgctggggcgattgaacaggttgcctggcttttctctgctgtcagtttggtgtggaggcctatgttctgccccatacaccccacaggccctgcttatgggaaggaacacaggcctccagcccagaggactgtgccgccctgttcttggccgtccacgtttcctctccctctagcaccagcaatacatttccctggcatggacagaaaagacagagaggacttgtacaaaggctttgtaaaaccagaggctagcttctatctttgtctactgttatttcagctcagggcgggtaatwaacatcattggaactagctattaggaaagaaaaaaaacttggttttttttacaacaattttttcccttggtttgcagtttctgcatttggatttgagaacccagggcggggattttcttggcacagtcaggtcttgggtccctcttcctgtgctttcttgtctgaggccttagggggaagagctcakcctctgcagcctcctccacctctgcccctggcctgcctctgctgtgacctccttccagagctagctgctggccctgtggccaggagaagcagaggggagaagcctttatgcagaagctgtgctagccttggtctggggtggggaggctgctgctgtgaccttaggggtagggttggggatcaagggaggctttgtcaagggagagtgaccatgttgctccctacatccatgcaataggacccagcctgcacctcctaggcctacactggggaaagcctgacagaaatcagtacctcctaacggggtctgccaggttcaccaaggcatgggcacagaggaatatgacagttttgaggcaggcaggaagggcccagcctgcagggtaagacattcattctttgagttaaaggccatattcacttgatgatttcta

SEQ ID NO: 6061 - DNA, 4624 bp, Homo sapiens
ggccgtggagcggcggctcctgtacccccggcgcggacctaaaggggctcgagccgctcgggccgggaatggggcggcgccgagcccggggcccgcgcctggctgggcgcggctccccgcgccccggcagcccggcctgcagccccgtgctgggctcaggaggccgcgcgcgcccggggccggggccggggccgggacccgagcgggcgggcgtcagagccccgggccccgctgccgcgccgggacacagcttccggaaggtgacgctcaccaagcccaccttctgccacctctgctccgacttcatctgggggctggccggcttcctgtgcgacgtctgcaatttcatgtctcatgagaagtgcctgaagcacgtgaggatcccgtgcacgagtgtggcacccagcctggtccgggttcctgtagcccactgcttcggcccccgggggctccacaagcgcaagttctgtgctgtctgccgcaaggtcctggaggcaccggcgctccactgcgaagtgtgtgagctgcacctccacccagactgtgtgcccttcgcctgcagtgactgccgccagtgccaccaggatgggcaccaggatcacgacacccatcaccaccactggcgggaggggaacctgccctcgggagcgcgctgcgaggtctgcaggaagacgtgcggctcctctgacgtgctggccggcgtgcgctgcgagtggtgcggggtccaggcgcactccctctgctccgcggcgctggctcccgagtgtggcttcgggcgtctgcgctccctggtcctgcctcccgcgtgcgtgcgccttctgcccggcggcttcagcaagacgcagagcttccgcatcgtggaggccgcggagccgggcgaggggggcgacggcgccgacgggagcgctgccgtgggtccaggcagagagacacaggcaactccggagtccgggaagcaaacgctgaagatctttgatggcgacgacgcggtragaagaagccagttccgcctcgtyacggtgtcccgcctggccggtgccgaggaggtgctggaggccgcactgcgggcccaccacatccccgaggaccctggccacctggagctgtgccggctgcccccttcctctcaggcctgtgacgcctgggctgggggcaaggctgggagtgctgtgatctcggaggagggcagaagccccgggtccggcgaggccacgccagaggcctgggtcatccgggctctgccgcgggcccaggaggtcctgaagatctaccctggctggctcaaggtgggcgtggcctacgtgtccgtgcgagtgaccccgaagagcacggcccgctctgtggtgctggaggtcctgccgctgctcggccgycaggccgagagtcccgagagcttccagctggtggaggtggcgatgggctgcmggcacgtccagcggacgatgctgatggacgaacagcccctgctggaccggctacaggacatccggcagatgtctgtgcggcaggtgagccagacgcggttctacgtggcagagagcagggatgtagccccgcacgtctccctgtttgttggcggcctgcctcccggcctgtctcccgaggagtacagcagcctgctgcatgaggccggggctaccaaagccaccgtggtgtccgtgagtcacatctactcctcccaaggcgcggtagtgttggacgttgcctgctttgcggaggccgagcggctgtacatgctgctgaaggacatggctgtgcggggccggctgctcactgccctggtgctccccgacctgctgcacgcgaagctgcccccagacagctgtcccctccttgtgttcgtgaaccccaagagtggaggcctcaagggccgagacctgctctgcagcttccggaagctactgaaccctcatcaggtcttcgacctgaccaacggaggtcctcttcccgggctccacctgttctcccaggtgccctgcttccgggtgctggtgtgtggtggcgatggcactgtgggctgggtgcttggcgccctggaggagacacggtaccgactggcctgcccggagccttctgtggccatcctgcccctgggcacagggaatgaccttggtcgagtcctccgctggggggcgggctacagcggcgaggacccgttctccgtactgctgtctgtggacgaggccgacgccgtgctcatggaccgctggaccatcctgctggatgcccacgaggctggcagtgcagagaacgayacggcagacgcagagccccccaagatcgtgcagatgagtaactactgtggcattggcatcgaygcggagctgagcctggacttccaccaggcacgggaagaggagcctggcaagttcacaagcaggctgcacaacaagggtgtgtacgtgcgggtggggctgcagaagatcagtcactctcggagcctgcacaagcagatccggctgcaggtggagcggcaggaggtggagctgcccagtattgaaggcctcatcttcatcaacatccccagctggggctcgggggccgacctgtggggctccgacagcgacaccaggtttgagaagccacgcatggacgacgggctgctggaggttgtgggcgtgacgggcgtcgtgcacatgggccaggtccagggtgggctgcgctccggaatccggattgcccagggttcctacttccgagtcacgctcctcaaggccaccccggtgcaggtggacggggagccctgggtccaggccccggggcacatgatcatctcagctgctggccctaaggtgcacatgctgaggaaggccaagcagaagccgaggagggccgggaccaccagggatgcccgggcggatgctgcgcctgcccctgagagcgatcctaggtaggggtggctggggcagcccaaggkctcgagccatctctgctcccgccagccttgttttcaggtggtctggaggcagctccacgtccacacagtggccrgccctgtggtcgracctggctacagccctgaccrcrgcatcttcccagtgacggagcgggaccmgccctcatcccattggtgacacatgttggtgtcacagccctcatcccactggagactggtgtgcgggtggcagtgttaccccgtgtcccgggtgggcgcagggctctggatggtgagccctctgccctgtgggggcctggtcctctcctcaggggtgggcacccatccctctccccactgagccccttgagctggacagtgctggatgcaggccgtccaggtgggtctgatctcactttgtgcccctcgggccgtccccctggccagtccttmagagcagcaggctccctggtgtgtccctgccccagcagacacaggctgccagtccctccagcctcacctccccgccctgggcagcaggtgtgggcagcgtgtgaggctgccgggtggtggtgactggtgacttccttgtgttcagggaagggagaaggtgccttcccttgttttctggccttgttatatacagatggcagcttggatctcaggtacagctccaggggcaggcagtgcccagctggacctggtggccctttcctagtgcctctgctkggggaggagaacctctgtccacgtggaggctaggaggtctcaggtgctgccctggcagcaccagagtgtgggccgggcccgagtgtctgcccctcggccctcagggtggggcacttagcacccagaagggaccaaaagcagggcatggcggtgcagaggagtttgggaggtgtaaacagcccatgcacgtggaggaggagctggctttcagccccagaccccacgctagcactttccacgctgcttgcccgctgttgatgtgcagttcccagtgcctgtgtgagccgacatctgctcagtcctatccctcgtcagcgtgtggagacccagctcctgcagccctcctgctcccacgcccccagacagcttggtggagggtcctgcatctgggccaggctggggtgcacccagccaaagacaaagctgcctccacgtgcccaaggattcagatggtgcactggccccgggaggagtctgaccaaaaatggagcccgctctgtggggaagccccgactcccccacgagaaacggtcccacggtgcggatctcccccttcccttgtggggcacagctggcctgggcctccaatcctgcggagctttcctgggtgtggctttgacctcagaagtggctctggtttggcctcaggagtgtggcctggcccagcctgctgcagcctcctggggggcccttgatgccactaatcccccgaccccccgcatctgccaaactgcacagacacacgcattgtaaggccgcttgtggcctccagcgtgcactcttgtttacgtcattgtcatcttcaagaccagtcctttgtgattagttttgcttcgcgagccctggtgtggactgtggtctgtatgaatcgtgtgtaactgtggtgaggggcttgtcctgtatgtgagtctgtacccaggtggggtctgtgccctgcacaccgggcccctctgtatttatcgctgcctgaatgcaacagtaatttatatccaggacaaatacagtctgggcgtcactatc

SEQ ID NO: 6062 - DNA, 4562 bp, Homo sapiens
ggccgtggagcggcggctcctgtacccccggcgcggacctaaaggggctcgagccgctcgggccgggaatggggcggcgccgagcccggggcccgcgcctggctgggccgcccggggccggggccggggccgggacccgagcgggcgggcgtcagagccccgggccccgctgccgcgccgggacacagcttccggaaggtgacgctcaccaagcccaccttctgccacctctgctccgacttcatctgggggctggccggcttcctgtgcgacgtctgcaatttcatgtctcatgagaagtgcctgaagcacgtgaggatcccgtgcacgagtgtggcacccagcctggtccgggttcctgtagcccactgcttcggcccccgggggctccacaagcgcaagttctgtgctgtctgccgcaaggtcctggaggcaccggcgctccactgcgaagtgtgtgagctgcacctccacccagactgtgtgcccttcgcctgcagtgactgccgccagtgccaccaggatgggcaccaggatcacgacacccatcaccaccactggcgggaggggaacctgccctcgggagcgcgctgcgaggtctgcaggaagacgtgcggctcctctgacgtgctggccggcgtgcgctgcgagtggtgcggggtccaggcgcactccctctgctccgcggcgctggctcccgagtgtggcttcgggcgtctgcgctccctggtcctgcctcccgcgtgcgtgcgccttctgcccggcggcttcagcaagacgcagagcttccgcatcgtggaggccgcggagccgggcgaggggggcgacggcgccgacgggagcgctgccgtgggtccaggcagagagacacaggcaactccggagtccgggaagcaaacgctgaagatctttgatggcgacgacgcggtragaagaagccagttccgcctcgtyacggtgtcccgcctggccggtgccgaggaggtgctggaggccgcactgcgggcccaccacatccccgaggaccctggccacctggagctgtgccggctgcccccttcctctcaggcctgtgacgcctgggctgggggcaaggctgggagtgctgtgatctcggaggagggcagaagccccgggtccggcgaggccacgccagaggcctgggtcatccgggctctgccgcgggcccaggaggtcctgaagatctaccctggctggctcaaggtgggcgtggcctacgtgtccgtgcgagtgaccccgaagagcacggcccgctctgtggtgctggaggtcctgccgctgctcggccgycaggccgagagtcccgagagcttccagctggtggaggtggcgatgggctgcmggcacgtccagcggacgatgctgatggacgaacagcccctgctggaccggctacaggacatccggcagatgtctgtgcggcaggtgagccagacgcggttctacgtggcagagagcagggatgtagccccgcacgtctccctgtttgttggcggcctgcctcccggcctgtctcccgaggagtacagcagcctgctgcatgaggccggggctaccaaagccaccgtggtgtccgtgagtcacatctactcctcccaaggcgcggtagtgttggacgttgcctgctttgcggaggccgagcggctgtacatgctgctgaaggacatggctgtgcggggccggctgctcactgccctggtgctccccgacctgctgcacgcgaagctgcccccagacagctgtcccctccttgtgttcgtgaaccccaagagtggaggcctcaagggccgagacctgctctgcagcttccggaagctactgaaccctcatcaggtcttcgacctgaccaacggaggtcctcttcccgggctccacctgttctcccaggtgccctgcttccgggtgctggtgtgtggtggcgatggcactgtgggctgggtgcttggcgccctggaggagacacggtaccgactggcctgcccggagccttctgtggccatcctgcccctgggcacagggaatgaccttggtcgagtcctccgctggggggcgggctacagcggcgaggacccgttctccgtactgctgtctgtggacgaggccgacgccgtgctcatggaccgctggaccatcctgctggatgcccacgaggctggcagtgcagagaacgayacggcagacgcagagccccccaagatcgtgcagatgagtaactactgtggcattggcatcgaygcggagctgagcctggacttccaccaggcacgggaagaggagcctggcaagttcacaagcaggctgcacaacaagggtgtgtacgtgcgggtggggctgcagaagatcagtcactctcggagcctgcacaagcagatccggctgcaggtggagcggcaggaggtggagctgcccagtattgaaggcctcatcttcatcaacatccccagctggggctcgggggccgacctgtggggctccgacagcgacaccaggtttgagaagccacgcatggacgacgggctgctggaggttgtgggcgtgacgggcgtcgtgcacatgggccaggtccagggtgggctgcgctccggaatccggattgcccagggttcctacttccgagtcacgctcctcaaggccaccccggtgcaggtggacggggagccctgggtccaggccccggggcacatgatcatctcagctgctggccctaaggtgcacatgctgaggaaggccaagcagaagccgaggagggccgggaccaccagggatgcccgggcggatgctgcgcctgcccctgagagcgatcctaggtaggggtggctggggcagcccaaggkctcgagccatctctgctcccgccagccttgttttcaggtggtctggaggcagctccacgtccacacagtggccrgccctgtggtcgracctggctacagccctgaccrcrgcatcttcccagtgacggagcgggaccmgccctcatcccattggtgacacatgttggtgtcacagccctcatcccactggagactggtgtgcgggtggcagtgttaccccgtgtcccgggtgggcgcagggctctggatggtgagccctctgccctgtgggggcctggtcctctcctcaggggtgggcacccatccctctccccactgagccccttgagctggacagtgctggatgcaggccgtccaggtgggtctgatctcactttgtgcccctcgggccgtccccctggccagtccttmagagcagcaggctccctggtgtgtccctgccccagcagacacaggctgccagtccctccagcctcacctccccgccctgggcagcaggtgtgggcagcgtgtgaggctgccgggtggtggtgactggtgacttccttgtgttcagggaagggagaaggtgccttcccttgttttctggccttgttatatacagatggcagcttggatctcaggtacagctccaggggcaggcagtgcccagctggacctggtggccctttcctagtgcctctgctkggggaggagaacctctgtccacgtggaggctaggaggtctcaggtgctgccctggcagcaccagagtgtgggccgggcccgagtgtctgcccctcggccctcagggtggggcacttagcacccagaagggaccaaaagcagggcatggcggtgcagaggagtttgggaggtgtaaacagcccatgcacgtggaggaggagctggctttcagccccagaccccacgctagcactttccacgctgcttgcccgctgttgatgtgcagttcccagtgcctgtgtgagccgacatctgctcagtcctatccctcgtcagcgtgtggagacccagctcctgcagccctcctgctcccacgcccccagacagcttggtggagggtcctgcatctgggccaggctggggtgcacccagccaaagacaaagctgcctccacgtgcccaaggattcagatggtgcactggccccgggaggagtctgaccaaaaatggagcccgctctgtggggaagccccgactcccccacgagaaacggtcccacggtgcggatctcccccttcccttgtggggcacagctggcctgggcctccaatcctgcggagctttcctgggtgtggctttgacctcagaagtggctctggtttggcctcaggagtgtggcctggcccagcctgctgcagcctcctggggggcccttgatgccactaatcccccgaccccccgcatctgccaaactgcacagacacacgcattgtaaggccgcttgtggcctccagcgtgcactcttgtttacgtcattgtcatcttcaagaccagtcctttgtgattagttttgcttcgcgagccctggtgtggactgtggtctgtatgaatcgtgtgtaactgtggtgaggggcttgtcctgtatgtgagtctgtacccaggtggggtctgtgccctgcacaccgggcccctctgtatttatcgctgcctgaatgcaacagtaatttatatccaggacaaatacagtctgggcgtcactatc

SEQ ID NO: 6063 - DNA, 4477 bp, Homo sapiens
ggccgtggagcggcggctcctgtacccccggcgcggacctaaaggggctcgagccgctcgggccgggaatggggcggcgccgagcccggggcccgcgcctggctgggcgcggctccccgcgccccggcagcccggcctgcagccccgtgctgggctcaggaggccgcgcgcgcccggggccggggccggggccgggacccgagcgggcgggcgtcagagccccgggccccgctgccgcgccgggacacagcttccggaaggtgacgctcaccaagcccaccttctgccacctctgctccgacttcatctgggggctggccggcttcctgtgcgacgtctgcaatttcatgtctcatgagaagtgcctgaagcacgtgaggatcccgtgcacgagtgtggcacccagcctggtccgggttcctgtagcccactgcttcggcccccgggggctccacaagcgcaagttctgtgctgtctgccgcaaggtcctggaggcaccggcgctccactgcgaagtgtgtgagctgcacctccacccagactgtgtgcccttcgcctgcagtgactgccgccagtgccaccaggatgggcaccaggatcacgacacccatcaccaccactggcgggaggggaacctgccctcgggagcgcgctgcgaggtctgcaggaagacgtgcggctcctctgacgtgctggccggcgtgcgctgcgagtggtgcggggtccaggcgcactccctctgctccgcggcgctggctcccgagtgtggcttcgggcgtctgcgctccctggtcctgcctcccgcgtgcgtgcgccttctgcccggcggcttcagcaagacgcagagcttccgcatcgtggaggccgcggagccgggcgaggggggcgacggcgccgacgggagcgctgccgtgggtccaggcagagagacacaggcaactccggagtccgggaagcaaacgctgaagatctttgatggcgacgacgcggtragaagaagccagttccgcctcgtyacggtgtcccgcctggccggtgccgaggaggtgctggaggccgcactgcgggcccaccacatccccgaggaccctggccacctggagctgtgccggctgcccccttcctctcaggcctgtgacgcctgggctgggggcaaggctgggagtgctgtgatctcggaggagggcagaagccccgggtccggcgaggccacgccagaggcctgggtcatccgggctctgccgcgggcccaggaggtcctgaagatctaccctggctggctcaaggtgggcgtggcctacgtgtccgtgcgagtgaccccgaagagcacggcccgctctgtggtgctggaggtcctgccgctgctcggccgycaggccgagagtcccgagagcttccagctggtggaggtggcgatgggctgcmggcacgtccagcggacgatgctgatggacgaacagcccctgctggaccggctacaggacatccggcagatgtctgtgcggcaggtgagccagacgcggttctacgtggcagagagcagggatgtagccccgcacgtctccctgtttgttggcggcctgcctcccggcctgtctcccgaggagtacagcagcctgctgcatgaggccggggctaccaaagccaccgtggtgtccgtgagtcacatctactcctcccaaggcgcggtagtgttggacgttgcctgctttgcggaggccgagcggctgtacatgctgctgaaggacatggctgtgcggggccggctgctcactgccctggtgctccccgacctgctgcacgcgaagctgcccccagacagctgtcccctccttgtgttcgtgaaccccaagagtggaggcctcaagggccgagacctgctctgcagcttccggaagctactgaaccctcatcaggtcttcgacctgaccaacggaggtcctcttcccgggctccacctgttctcccaggtgccctgcttccgggtgctggtgtgtggtggcgatggcactgtgggctgggtgcttggcgccctggaggagacacggtaccgactggcctgcccggagccttctgtggccatcctgcccctgggcacagggaatgaccttggtcgagtcctccgctggggggcgggctacagcggcgaggacccgttctccgtactgctgtctgtggacgaggccgacgccgtgctcatggaccgctggaccatcctgctggatgcccacgaggctggcagtgcagagaacgayacggcagacgcagagccccccaagatcgtgcagatgagtaactactgtggcattggcatcgaygcggagctgagcctggacttccaccaggcacgggaagaggagcctggcaagttcacaagcagctggggctcgggggccgacctgtggggctccgacagcgacaccaggtttgagaagccacgcatggacgacgggctgctggaggttgtgggcgtgacgggcgtcgtgcacatgggccaggtccagggtgggctgcgctccggaatccggattgcccagggttcctacttccgagtcacgctcctcaaggccaccccggtgcaggtggacggggagccctgggtccaggccccggggcacatgatcatctcagctgctggccctaaggtgcacatgctgaggaaggccaagcagaagccgaggagggccgggaccaccagggatgcccgggcggatgctgcgcctgcccctgagagcgatcctaggtaggggtggctggggcagcccaaggkctcgagccatctctgctcccgccagccttgttttcaggtggtctggaggcagctccacgtccacacagtggccrgccctgtggtcgracctggctacagccctgaccrcrgcatcttcccagtgacggagcgggaccmgccctcatcccattggtgacacatgttggtgtcacagccctcatcccactggagactggtgtgcgggtggcagtgttaccccgtgtcccgggtgggcgcagggctctggatggtgagccctctgccctgtgggggcctggtcctctcctcaggggtgggcacccatccctctccccactgagccccttgagctggacagtgctggatgcaggccgtccaggtgggtctgatctcactttgtgcccctcgggccgtccccctggccagtccttmagagcagcaggctccctggtgtgtccctgccccagcagacacaggctgccagtccctccagcctcacctccccgccctgggcagcaggtgtgggcagcgtgtgaggctgccgggtggtggtgactggtgacttccttgtgttcagggaagggagaaggtgccttcccttgttttctggccttgttatatacagatggcagcttggatctcaggtacagctccaggggcaggcagtgcccagctggacctggtggccctttcctagtgcctctgctkggggaggagaacctctgtccacgtggaggctaggaggtctcaggtgctgccctggcagcaccagagtgtgggccgggcccgagtgtctgcccctcggccctcagggtggggcacttagcacccagaagggaccaaaagcagggcatggcggtgcagaggagtttgggaggtgtaaacagcccatgcacgtggaggaggagctggctttcagccccagaccccacgctagcactttccacgctgcttgcccgctgttgatgtgcagttcccagtgcctgtgtgagccgacatctgctcagtcctatccctcgtcagcgtgtggagacccagctcctgcagccctcctgctcccacgcccccagacagcttggtggagggtcctgcatctgggccaggctggggtgcacccagccaaagacaaagctgcctccacgtgcccaaggattcagatggtgcactggccccgggaggagtctgaccaaaaatggagcccgctctgtggggaagccccgactcccccacgagaaacggtcccacggtgcggatctcccccttcccttgtggggcacagctggcctgggcctccaatcctgcggagctttcctgggtgtggctttgacctcagaagtggctctggtttggcctcaggagtgtggcctggcccagcctgctgcagcctcctggggggcccttgatgccactaatcccccgaccccccgcatctgccaaactgcacagacacacgcattgtaaggccgcttgtggcctccagcgtgcactcttgtttacgtcattgtcatcttcaagaccagtcctttgtgattagttttgcttcgcgagccctggtgtggactgtggtctgtatgaatcgtgtgtaactgtggtgaggggcttgtcctgtatgtgagtctgtacccaggtggggtctgtgccctgcacaccgggcccctctgtatttatcgctgcctgaatgcaacagtaatttatatccaggacaaatacagtctgggcgtcactatc

SEQ ID NO: 6064 - DNA, 3402 bp, Homo sapiens
gctgctcgcgggagccagagggccctgcggtcctcggtggtcttgccagcccctcgtcatcccagggccctccgcgcctgtgaggactccctcaggtcggccacgggacctgacgcaacaggatggacgagtcccctgagcctctgcagcagggcagagggccggtgccggtccgacggcagcgcccagcaccccrgggtctgcgtgagatgctgaaggccaggctgtggtgcagctgctcrtgcagtgtgctgtgcgtccgggcgctggtgcaggacctgctccccgccacrcgctggctgcgtcagtaccgcccgcgggagtacctggcaggcgacgtcatgtctgggctggtcatcggcatcatcctggtgccgcaggccatcgcctactcattgctggccgggctgcagcccatctacagcctctatacgtccttcttcgccaacctcatctacttcctcatgggcacctcacggcatgtctccgtgggcatcttcagcctgctttgcctcatggtggggcaggtggtggaccgggagctccagctggccggctttgacccctcccaggacggcctgcagcccggagccaacagcagcaccctcaacggctcggctgccatgctggactgcgggcgtgactgctacgccatycgtgtcgccaccgccctcacgctgatgaccgggctttaccaggtcctcatgggcgtcctccggctgggcttcgtgtccgcctacctctcacagccactgctcgatggctttgccatgggggcctccgtgaccatcctgacctcgcagctcaaacacctgctgggcgtgcggatcccgcggcaccaggggcccggcatggtggtcctcacatggctgagcctgctgcgcggcgccgggcaggccaacgtgtgcgacgtggtcaccagcacggtgtgcctggcggtgctgctagccgcgaaggagctctcagaccgctaccgacaccgcctgagggtgccgctgcccacggagctgctggtcatcgtggtggccacactcgtgtcrcacttcgggcagctccacaagcgctttggctcgagcgtggctggcgacatccccacgggtttcatgccccctcaggtcccagagcccaggctgatgcagcgtgtggctttggatgccgtggccctggccctcgtggctgccgccttctccatctcgctggcggagatgttcgcccgcagtcacrgctactctgtgcgtgccaaccaggagctgctggctgtgggctgctgcaacgtgctacccgccttcctccactgcttcgccaccagcgccgccctggccaagagcctggtgaagacagccactggctgccggacacagctgtccagcgtggtcagcgccaccgtggtgctgctggtgctgctggcgctggcaccgctgttccacgacctacagcgaagcgtgctggcctgcgtcatcgtggtcagcctgcggggggccctgcgcaaggtgtgggacctcccgcggctgtggcggatgagcccggctgacgcgctggtctgggcaggcaccgcggccacctgtatgctggtcagcacagaggccgggctgctggctggcgtcatcctctcgctgctcagcctggccggccgcacccaacgcccacgcaccgccctgctggcccgcatcggggacacggccttctacgaggatgccacagagttcgagggcctcgtccctgagcccggcgtgcgggtgttccgctttggggggccgctgtactatgccaacaaggacttcttcctgcrgtcactctayagcctcacggggctggacgcagggtgcatggctgcsaggaggaaggaggggggctcagagacgggggtcggtgagggaggccctgcccagggcgaggacctgggcccggttagcaccagggctgcgctggtgcccgcagcggccggcttccacacagtggtcatcgactgcgccccgctgctgttcctagacgcagcyggtgtgagcacgctgcaggacctgcgccgagactacggggccctgggcatcagcctgctgctagcctgctgcagcccgcctgtgagagacattctgagcagaggaggcttcctcggggagggccccggggacacggctgaggaggagcagctgttcctcagtgtgcacgatgccgtgcagacagcacgagcccgccacagggagctggaggccaccgatgcccatctgtagcagggccaggcctgcccagcagcctctgctccctcctggggacccacagcagacgtctgcaagccactgctgagacccttcccagggaggagccacccaagagctgcactcttgtgccacagctgccctggggaaaccggggaaccccaactgggaaaggaggccctctgatcacacgcaggacccaaacactcagaaatcaagaacctctgcctccgagacaggctggcccacagtgctggctgggccccaatgcaccgtccctcagctcagragggatgggcctgacctgacgctcagggttgacatcttatttgaacaagggtcccccgccatcatgcagcctccaaggtgccaagaggactccctatgcccaggcctgcccggtgcccaccctgctggtaggagccagcggctctggccaagtgcacgagggtctctgtgtttccagaaggccccacacacccaagtgcccctcacacctcgtgcctccccctcacagggtggccacctgcaccagcgtcagggcccagggtgctgtgaccgatgagacctcagctcagccctcaggtgcagtggccctacccagcctggccagcagacacacacagggatgctcacgggtgcaccaggagccaggtgcggcgcagccaaccctgagcctgcagggagacctgcaggaagcccaccgtgccccatgcaggggctccctccagcacacagccctcaccccagcacagccagcaaggacacgctctccccaacagggtgcttcggcgggaggtgggggaacaaggggtcttccgagcagcccccagccctcccctcccatctgtgcctctgtaaggggctctgggacgcccagaccctgcccgccgcccacctggtggtgacaagctccagcagccagtgggtccggacctgcttgatgccgcggkgagggacgrcgcccacataggbgaggttgagctgctrgtcccagctgaggacgtactggtcagcctrgctgtgtggcagcgggggkctggggacaacaaaggggcggctcagtcccgagcctcagcatggctggcagcgcggctgacacacacgttcaagcccaggactgcccgggcgcaggatccaggcgctgcccgtgcgttcagtgactaataaaatgacccttagggccagg

SEQ ID NO: 6065 - DNA, 2490 bp, Homo sapiens
ccgcaaggaagcggggctccaagccctgccgtgctcccggctccccgaggctccccgaggccacccaacccctcccacccggccatcgccccctcaccaaggccccgccccgcggcggcggtcacatggggtgcgcgcccagactccgacccggaggcggaaccggcagtgcagcccgaagccccgcagtccccgagcacgcgtggccatrcgtcccctgcgcccccgcgcmgcgctgctggcgctcctggcctcgctcctggccgcrcccccggtggccccggccgaggccccgcacctggtgcaggtggacgcggcccgcgcgctgtggcccctgcggcgcttctggaggagcacagrcttctgmcccccgctgccacacagcyaggctgaccagtacgtcctcagctgggacyagcagctcaacctcvcctatgtgggcgycgtccctcmccgcggcatcaagcaggtccggacccactggctgctggagcttgtcaccaccagggggtccactggacrgggcctgagctacaacttcacccacctggacgggtacytggaccttctcagggagaaccagctcctcccagggtttgagctgatgggcagcgcctcgggccacttcactgactttgaggacaagcagcaggtgtttgagtggaaggacttggtctccagcctggmcaggagatacatcggtgggcgagcgcaggccctggggccctggccggggcgggggtactcctgggcaggttgcacccctatcacgcaggctgctgcctggtcaggagatacattggtgggcaggcgcaggcccttgtggggggatgggggtgacaagggataggttggtggtcggcgcaggccctggggccccaggctggggggtactcctgggcttggtgggtgggcgaaggccctgggcccctggggtggggggtactcctgggcaggctgcacccctatcacccaggccgcacccctatcacccaggccgccgcccaggtcttggacccccttgagccagsgcttcctgatgtggggcgggaggctggcctgcatggagatggggttcatcttgagtcagacgcccttcatcaccttgcaccctccctccgtgggagtcactgaggcgagattcacctgtgctggggggacagcaaggctcctctgcaggtaggtamggactggcgcatgtttccaagtggaacttcgagacgtggaaygagccagaccaccacgactttgacaacgtctccatgaccatgcaagrcttcctgaactactacgatgcctgctcggagggtctgcgcgccgccagccccgccctgcggcygggaggccccggcgactccttccacaccccaccgcgatccccgctgagctggggcctcctgcgccrctgccacgacggtaccaacttcttcactggggaggcgggcgtgcggctggactacatctccctccacaggaagggtgcgcgcagctccatctccatcctggagcaggagaaggtcgtcgcgcagcagatccggcagctcttccccaagttcgcggacacccccatttacaacgacgagrcggacccgctggtgggctggtccctgccayagccgtggagggcsgacgtgacctacgyggccatggtggtgaaggtcatcscgcagcatcagaacctgctactggccaacaccacctccgccttcccctavgcgctcckgagcaacdacaatgccttcctgagctaccacccgcaccccttcrcgcagcgcaygctcmccgcgcgcttccaggtcaacaacacccgcccgccgcacgtgcrgctgttgcrcaagccggtgctcacggccatggggctgctggcgctgctggatgaggagyagctctrggcckaagtgtcgcaggccgggaccgtcctggacagcaaccacacggtgggcgtcctggccagcgcccaccgcccccagggcccggccgacgcctggcgcgccgcggtgctgatctacgcgagcgacgacacccgcgcccaccccaaccgcagcgtcgcggtgaccctgcggctgcgcggggtgccccccggcccggcctggtctacgtcacgcgctacctggacaacgggctctgcagccccgaaggcgagtggcggcsccygggccsgcccgtcttccccacggcagagcagttccggcgcaygcgcgcggctgaggacccggtggccgcggcgccccgccccttacccgccggcggccgcctgaccctgcgccccgcgctgcggctgcbgtcgcttttgctggtgcacgtgtgtgcgcgccccgagaagccgcccgggcaggcaagtggcagtcccctaacccgcgccgcggcccggactccccttccccgacgccatcacagcccttccctcccccaggtcacgcggctccgcgccctgcccctgacccaagggcagctggttctggtctggtcggatgaacacgtgggctccaa

SEQ ID NO: 6066 - DNA, 3102 bp, Homo sapiens
ccgcaaggaagcggggctccaagccctgccgtgctcccggctccccgaggctccccgaggccacccaacccctcccacccggccatcgccccctcaccaaggccccgccccgcggcggcggtcacatggggtgcgcgcccagactccgacccggaggcggaaccggcagtgcagcccgaagccccgcagtccccgagcacgcgtggccatrcgtcccctgcgcccccgcgcmgcgctgctggcgctcctggcctcgctcctggccgcrcccccggtggccccggccgaggccccgcacctggtgcaggtggacgcggcccgcgcgctgtggcccctgcggcgcttctggaggagcacagrcttctgmcccccgctgccacacagcyaggctgaccagtacgtcctcagctgggacyagcagctcaacctcvcctatgtgggcgycgtccctcmccgcggcatcaagcaggtccggacccactggctgctggagcttgtcaccaccagggggtccactggacrgggcctgagctacaacttcacccacctggacgggtacytggaccttctcagggagaaccagctcctcccagggtttgagctgatgggcagcgcctcgggccacttcactgactttgaggacaagcagcaggtgtttgagtggaaggacttggtctccagcctggmcaggagatacatcggtaggtamggactggcgcatgtttccaagtggaacttcgagacgtggaaygagccagaccaccacgactttgacaacgtctccatgaccatgcaagrcttcctgaactactacgatgcctgctcggagggtctgcgcgccgccagccccgccctgcggcygggaggccccggcgactccttccacaccccaccgcgatccccgctgagctggggcctcctgcgccrctgccacgacggtaccaacttcttcactggggaggcgggcgtgcggctggactacatctccctccacaggaagggtgcgcgcagctccatctccatcctggagcaggagaaggtcgtcgcgcagcagatccggcagctcttccccaagttcgcggacacccccatttacaacgacgagrcggacccgctggtgggctggtccctgccayagccgtggagggcsgacgtgacctacgyggccatggtggtgaaggtcatcscgcagcatcagaacctgctactggccaacaccacctccgccttcccctavgcgctcckgagcaacdacaatgccttcctgagctaccacccgcaccccttcrcgcagcgcaygctcmccgcgcgcttccaggtcaacaacacccgcccgccgcacgtgcrgctgttgcrcaagccggtgctcacggccatggggctgctggcgctgctggatgaggagyagctctrggcckaagtgtcgcaggccgggacctgcgccccgcgctgcggctgcbgtcgcttttgctggtgcacgtgtgtgcgcgccccgagaagccgcccgggcaggcaagtcacgcggctccgcgccctgcccctgacccaagggcagctggttctggtctggtcggatgaacacgtgggctccaagtgcctgtggacatacgagatccagttctctcaggacggtaaggcgtacaccccggtcagcaggaagccatcgaccttcaacctctttgtgttcagcccagacacaggtgctgtctctggctcctaccgagttcgarccctggactacygggccygaccaggccccttctyggaccctgtgccgtacctggaggtccctgtgccaagagggcccccatccccgggcaatccakgagcctgtgctgagccccagtgggttgcacctccaccggcagtcagcgagctggggctgcmctgtgcccatgctgccctcccatcaccccctttgcaatatatttttatattttattattttcttttatatcttggtaccaacgccccctttaaagcggctttgcacaggtcagtctcgggttgaggctctgtggcttggccctgggcacattccagggcagcctccaagggtaaaccccggtggctgatgaggacccagctggagcgaggcctctttccccctcgctcccactcagaccacccccaagcctggactggaagtgtgttgagcccctgggtcaggctggcgagccagctcggccctgcccacccaggggtttccgagatcacccctggtgaggcggcgtgccagtcccttgctttcttacttgttctgcagagcggggagctgaggctgcatgagggaagactcccgtaccccagcacggtggagggtgggatggggtcacgcctgtgcgacccaggaggtggccagcagaaggaaacagtagtgtccaccatggtctgcgtctccccaccacggattgtcttggctccggatttgagacatggcagggccagatgaggacaacttgatgacagtttacagagatggaggcagggtgccaggaagccacgggggagcccccagggcactcagcagtccaggcagggctgggcgtcctggcaaggagcagggaccttctgcccaggggtgtggccagcctgtgggtgctgtgtgcaggaccccaggaaccaaggccgcagtctcttccctcgctccagcatcctcccaaggccacccttggctgcactcagccagagagctggggcacagggaccccacaggtttccctggaggctgtcaggggctccggtgggggcggggggtgagcccgctgggttcactgcacctcccaaagcccatgtgccctgcctgccccaaccaaagtgggcctccaaggtgctggggtgggacagagacccacgagggaccctcccctcactcctggacctgggtgttgtggcttttggcaaaaatagccacatacactccaagtttccccctcagctgggattcctggtgtgagcctggtcaccagggtggtaggacagaccctcctctggaggcaaagtgacggtcagcagggggttctgaggccccacagcgctggcaccagtcttggctgaatggcaaagctgcatctgtctccttccccatgagcttccgttgcc

SEQ ID NO: 6067 - DNA, 3283 bp, Homo sapiens
ccgcaaggaagcggggctccaagccctgccgtgctcccggctccccgaggctccccgaggccacccaacccctcccacccggccatcgccccctcaccaaggccccgccccgcggcggcggtcacatggggtgcgcgcccagactccgacccggaggcggaaccggcagtgcagcccgaagccccgcagtccccgagcacgcgtggccatrcgtcccctgcgcccccgcgcmgcgctgctggcgctcctggcctcgctcctggccgcrcccccggtggccccggccgaggccccgcacctggtgcaggtggacgcggcccgcgcgctgtggcccctgcggcgcttctggaggagcacagrcttctgmcccccgctgccacacagcyaggctgaccagtacgtcctcagctgggacyagcagctcaacctcvcctatgtgggcgycgtccctcmccgcggcatcaagcaggtccggacccactggctgctggagcttgtcaccaccagggggtccactggacrgggcctgagctacaacttcacccacctggacgggtacytggaccttctcagggagaaccagctcctcccagggtttgagctgatgggcagcgcctcgggccacttcactgactttgaggacaagcagcaggtgtttgagtggaaggacttggtctccagcctggmcaggagatacatcggccgccgcccaggtcttggacccccttgagccagsgcttcctgatgtggggcgggaggctggcctgcatggagatggggttcatcttgagtcagacgcccttcatcaccttgcaccctccctccgtgggagtcactgaggcgagattcacctgtgctggggggacagcaaggctcctctgcaggtaggtamggactggcgcatgtttccaagtggaacttcgagacgtggaaygagccagaccaccacgactttgacaacgtctccatgaccatgcaagrcttcctgaactactacgatgcctgctcggagggtctgcgcgccgccagccccgccctgcggcygggaggccccggcgactccttccacaccccaccgcgatccccgctgagctggggcctcctgcgccrctgccacgacggtaccaacttcttcactggggaggcgggcgtgcggctggactacatctccctccacaggaagggtgcgcgcagctccatctccatcctggagcaggagaaggtcgtcgcgcagcagatccggcagctcttccccaagttcgcggacacccccatttacaacgacgagrcggacccgctggtgggctggtccctgccayagccgtggagggcsgacgtgacctacgyggccatggtggtgaaggtcatcscgcagcatcagaacctgctactggccaacaccacctccgccttcccctavgcgctcckgagcaacdacaatgccttcctgagctaccacccgcaccccttcrcgcagcgcaygctcmccgcgcgcttccaggtcaacaacacccgcccgccgcacgtgcrgctgttgcrcaagccggtgctcacggccatggggctgctggcgctgctggatgaggagyagctctrggcckaagtgtcgcaggccgggacccgccccgcgctgcggctgcbgtcgcttttgctggtgcacgtgtgtgcgcgccccgagaagccgcccgggcaggcaagtcacgcggctccgcgccctgcccctgacccaagggcagctggttctggtctggtcggatgaacacgtgggctccaagtgcctgtggacatacgagatccagttctctcaggacggtaaggcgtacaccccggtcagcaggaagccatcgaccttcaacctctttgtgttcagcccagacacaggtgctgtctctggctcctaccgagttcgarccctggactacygggccygaccaggccccttctyggaccctgtgccgtacctggaggtccctgtgccaagagggcccccatccccgggcaatccakgagcctgtgctgagccccagtgggttgcacctccaccggcagtcagcgagctggggctgcmctgtgcccatgctgccctcccatcaccccctttgcaatatatttttatattttattattttcttttatatcttggtaccaacgccccctttaaagcggctttgcacaggtcagtctcgggttgaggctctgtggcttggccctgggcacattccagggcagcctccaagggtaaaccccggtggctgatgaggacccagctggagcgaggcctctttccccctcgctcccactcagaccacccccaagcctggactggaagtgtgttgagcccctgggtcaggctggcgagccagctcggccctgcccacccaggggtttccgagatcacccctggtgaggcggcgtgccagtcccttgctttcttacttgttctgcagagcggggagctgaggctgcatgagggaagactcccgtaccccagcacggtggagggtgggatggggtcacgcctgtgcgacccaggaggtggccagcagaaggaaacagtagtgtccaccatggtctgcgtctccccaccacggattgtcttggctccggatttgagacatggcagggccagatgaggacaacttgatgacagtttacagagatggaggcagggtgccaggaagccacgggggagcccccagggcactcagcagtccaggcagggctgggcgtcctggcaaggagcagggaccttctgcccaggggtgtggccagcctgtgggtgctgtgtgcaggaccccaggaaccaaggccgcagtctcttccctcgctccagcatcctcccaaggccacccttggctgcactcagccagagagctggggcacagggaccccacaggtttccctggaggctgtcaggggctccggtgggggcggggggtgagcccgctgggttcactgcacctcccaaagcccatgtgccctgcctgccccaaccaaagtgggcctccaaggtgctggggtgggacagagacccacgagggaccctcccctcactcctggacctgggtgttgtggcttttggcaaaaatagccacatacactccaagtttccccctcagctgggattcctggtgtgagcctggtcaccagggtggtaggacagaccctcctctggaggcaaagtgacggtcagcagggggttctgaggccccacagcgctggcaccagtcttggctgaatggcaaagctgcatctgtctccttccccatgagcttccgttgcc

SEQ ID NO: 6068 - DNA, 2603 bp, Homo sapiens
ccgcaaggaagcggggctccaagccctgccgtgctcccggctccccgaggctccccgaggccacccaacccctcccacccggccatcgccccctcaccaaggccccgccccgcggcggcggtcacatggggtgcgcgcccagactccgacccggaggcggaaccggcagtgcagcccgaagccccgcagtccccgagcacgcgtggccatrcgtcccctgcgcccccgcgcmgcgctgctggcgctcctggcctcgctcctggccgcrcccccggtggccccggccgaggccccgcacctggtgcaggtggacgcggcccgcgcgctgtggcccctgcggcgcttctggaggagcacagrcttctgmcccccgctgccacacagcyaggctgaccagtacgtcctcagctgggacyagcagctcaacctcvcctatgtgggcgycgtccctcmccgcggcatcaagcagggggtccactggacrgggcctgagctacaacttcacccacctggacgggtacytggaccttctcagggagaaccagctcctcccaggtgagctgtgggctctgccctcccagcccgcctgcacccccttgccctgcccaccctctccctcacccagcccctctgagtccttggatgtccattcagggctggccttggtgccggagcacaggcctggcagagcatgggtgtggtgtgtggtgggcggtggggcagccctcctgtgttccagggtttgagctgatgggcagcgcctcgggccacttcactgactttgaggacaagcagcaggtgtttgagtggaaggacttggtctccagcctggmcaggagatacatcggtgggcgagcgcaggccctggggccctggccggggcgggggtactcctgggcaggttgcacccctatcacgcaggctgctgcctggtcaggagatacattggtgggcaggcgcaggcccttgtggggggatgggggtgacaagggataggttggtggtcggcgcaggccctggggccccaggctggggggtactcctgggcttggtgggtgggcgaaggccctgggcccctggggtggggggtactcctgggcaggctgcacccctatcacccaggccgcacccctatcacccaggccgccgcccaggtcttggacccccttgagccagsgcttcctgatgtggggcgggaggctggcctgcatggagatggggttcatcttgagtcagacgcccttcatcaccttgcaccctccctccgtgggagtcactgaggcgagattcacctgtgctggggggacagcaaggctcctctgcaggtaggtamggactggcgcatgtttccaagtggaacttcgagacgtggaaygagccagaccaccacgactttgacaacgtctccatgaccatgcaagrcttcctgaactactacgatgcctgctcggagggtctgcgcgccgccagccccgccctgcggcygggaggccccggcgactccttccacaccccaccgcgatccccgctgagctggggcctcctgcgccrctgccacgacggtaccaacttcttcactggggaggcgggcgtgcggctggactacatctccctccacaggaaggagaaggtcgtcgcgcagcagatccggcagctcttccccaagttcgcggacacccccatttacaacgacgagrcggacccgctggtgggctggtccctgccayagccgtggagggcsgacgtgacctacgyggccatggtggtgaaggtcatcscgcagcatcagaacctgctactggccaacaccacctccgccttcccctavgcgctcckgagcaacdacaatgccttcctgagctaccacccgcaccccttcrcgcagcgcaygctcmccgcgcgcttccaggtcaacaacacccgcccgccgcacgtgcrgctgttgcrcaagccggtgctcacggccatggggctgctggcgctgctggatgaggagyagctctrggcckaagtgtcgcaggccgggaccgtcctggacagcaaccacacggtgggcgtcctggccagcgcccaccgcccccagggcccggccgacgcctggcgcgccgcggtgctgatctacgcgagcgacgacacccgcgcccaccccaaccgcagcgtcgcggtgaccctgcggctgcgcggggtgccccccggcccggcctggtctacgtcacgcgctacctggacaacgggctctgcagccccgaaggcgagtggcggcsccygggccsgcccgtcttccccacggcagagcagttccggcgcaygcgcgcggctgaggacccggtggccgcggcgccccgccccttacccgccggcggccgcctgaccctgcgccccgcgctgcggctgcbgtcgcttttgctggtgcacgtgtgtgcgcgccccgagaagccgcccgggcaggcaagtggcagtcccctaacccgcgccgcggcccggactccccttccccgacgccatcacagcccttccctcccccaggtcacgcggctccgcgccctgcccctgacccaagggcagctggttctggtctggtcggatgaacacgtgggctccaa

SEQ ID NO: 6069 - DNA, 4296 bp, Homo sapiens
ccgcaaggaagcggggctccaagccctgccgtgctcccggctccccgaggctccccgaggccacccaacccctcccacccggccatcgccccctcaccaaggccccgccccgcggcggcggtcacatggggtgcgcgcccagactccgacccggaggcggaaccggcagtgcagcccgaagccccgcagtccccgagcacgcgtggccatrcgtcccctgcgcccccgcgcmgcgctgctggcgctcctggcctcgctcctggccgcrcccccggtggccccggccgaggccccgcacctggtgcaggtggacgcggcccgcgcgctgtggcccctgcggcgcttctggaggagcacagrcttctgmcccccgctgccacacagcyaggctgaccagtacgtcctcagctgggacyagcagctcaacctcvcctatgtgggcgycgtccctcmccgcggcatcaagcaggtccggacccactggctgctggagcttgtcaccaccagggggtccactggacrgggcctgagctacaacttcacccacctggacgggtacytggaccttctcagggagaaccagctcctcccaggtgagctgtgggctctgccctcccagcccgcctgcacccccttgccctgcccaccctctccctcacccagcccctctgagtccttggatgtccattcagggctggccttggtgccggagcacaggcctggcagagcatgggtgtggtgtgtggtgggcggtggggcagccctcctgtgttccagggtttgagctgatgggcagcgcctcgggccacttcactgactttgaggacaagcagcaggtgtttgagtggaaggacttggtctccagcctggmcaggagatacatcggtgggcgagcgcaggccctggggccctggccggggcgggggtactcctgggcaggttgcacccctatcacgcaggctgctgcctggtcaggagatacattggtgggcaggcgcaggcccttgtggggggatgggggtgacaagggataggttggtggtcggcgcaggccctggggccccaggctggggggtactcctgggcttggtgggtgggcgaaggccctgggcccctggggtggggggtactcctgggcaggctgcacccctatcacccaggccgcacccctatcacccaggccgccgcccaggtcttggacccccttgagccagsgcttcctgatgtggggcgggaggctggcctgcatggagatggggttcatcttgagtcagacgcccttcatcaccttgcaccctccctccgtgggagtcactgaggcgagattcacctgtgctggggggacagcaaggctcctctgcaggtaggtamggactggcgcatgtttccaagtggaacttcgagacgtggaaygagccagaccaccacgactttgacaacgtctccatgaccatgcaagrcttcctgaactactacgatgcctgctcggagggtctgcgcgccgccagccccgccctgcggcygggaggccccggcgactccttccacaccccaccgcgatccccgctgagctggggcctcctgcgccrctgccacgacggtaccaacttcttcactggggaggcgggcgtgcggctggactacatctccctccacaggaagggtgcgcgcagctccatctccatcctggagcaggagaaggtcgtcgcgcagcagatccggcagctcttccccaagttcgcggacacccccatttacaacgacgagrcggacccgctggtgggctggtccctgccayagccgtggagggcsgacgtgacctacgyggccatggtggtgaaggtcatcscgcagcatcagaacctgctactggccaacaccacctccgccttcccctavgcgctcckgagcaacdacaatgccttcctgagctaccacccgcaccccttcrcgcagcgcaygctcmccgcgcgcttccaggtcaacaacacccgcccgccgcacgtgcrgctgttgcrcaagccggtgctcacggccatggggctgctggcgctgctggatgaggagyagctctrggcckaagtgtcgcaggccgggaccgtcctggacagcaaccacacggtgggcgtcctggccagcgcccaccgcccccagggcccggccgacgcctggcgcgccgcggtgctgatctacgcgagcgacgacacccgcgcccaccccaaccgcagcgtcgcggtgaccctgcggctgcgcggggtgccccccggcccggcctggtctacgtcacgcgctacctggacaacgggctctgcagccccgaaggcgagtggcggcsccygggccsgcccgtcttccccacggcagagcagttccggcgcaygcgcgcggctgaggtaggtgggccgcggaggggcgaggggccgggccgggccggggtcccgggggggtggggtccggggcgggggctccgaggcggtgtgggtgggaggtggagcggtgggccgggggcgttcgccctgaggtcgggccgagcgtccccagcycccctggagaaccctgaggaccggccactgcgcccaggacccggtggccgcggcgccccgccccttacccgccggcggccgcctgaccctgcgccccgcgctgcggctgcbgtcgcttttgctggtgcacgtgtgtgcgcgccccgagaagccgcccgggcaggtcacgcggctccgcgccctgcccctgacccaagggcagctggttctggtctggtcggatgaacacgtgggctccaagtgcgtgcctgtggacatacgagatccagttctctcaggacggtaaggcgtacaccccggtcagcaggaagccatcgaccttcaacctctttgtgttcagcccagacacaggtgctgtctctggctcctaccgagttcgarccctggactacygggccygaccaggccccttctyggaccctgtgccgtacctggaggtccctgtgccaagagggcccccatccccgggcaatccakgagcctgtgctgagccccagtgggttgcacctccaccggcagtcagcgagctggggctgcmctgtgcccatgctgccctcccatcaccccctttgcaatatatttttatattttattattttcttttatatcttggtaccaacgccccctttaaagcggctttgcacaggtcagtctcgggttgaggctctgtggcttggccctgggcacattccagggcagcctccaagggtaaaccccggtggctgatgaggacccagctggagcgaggcctctttccccctcgctcccactcagaccacccccaagcctggactggaagtgtgttgagcccctgggtcaggctggcgagccagctcggccctgcccacccaggggtttccgagatcacccctggtgaggcggcgtgccagtcccttgctttcttacttgttctgcagagcggggagctgaggctgcatgagggaagactcccgtaccccagcacggtggagggtgggatggggtcacgcctgtgcgacccaggaggtggccagcagaaggaaacagtagtgtccaccatggtctgcgtctccccaccacggattgtcttggctccggatttgagacatggcagggccagatgaggacaacttgatgacagtttacagagatggaggcagggtgccaggaagccacgggggagcccccagggcactcagcagtccaggcagggctgggcgtcctggcaaggagcagggaccttctgcccaggggtgtggccagcctgtgggtgctgtgtgcaggaccccaggaaccaaggccgcagtctcttccctcgctccagcatcctcccaaggccacccttggctgcactcagccagagagctggggcacagggaccccacaggtttccctggaggctgtcaggggctccggtgggggcggggggtgagcccgctgggttcactgcacctcccaaagcccatgtgccctgcctgccccaaccaaagtgggcctccaaggtgctggggtgggacagagacccacgagggaccctcccctcactcctggacctgggtgttgtggcttttggcaaaaatagccacatacactccaagtttccccctcagctgggattcctggtgtgagcctggtcaccagggtggtaggacagaccctcctctggaggcaaagtgacggtcagcagggggttctgaggccccacagcgctggcaccagtcttggctgaatggcaaagctgcatctgtctccttccccatgagcttccgttgcc

SEQ ID NO: 6070 - DNA, 3443 bp, Homo sapiens
ccgcaaggaagcggggctccaagccctgccgtgctcccggctccccgaggctccccgaggccacccaacccctcccacccggccatcgccccctcaccaaggccccgccccgcggcggcggtcacatggggtgcgcgcccagactccgacccggaggcggaaccggcagtgcagcccgaagccccgcagtccccgagcacgcgtggccatrcgtcccctgcgcccccgcgcmgcgctgctggcgctcctggcctcgctcctggccgcrcccccggtggccccggccgaggccccgcacctggtgcaggtggacgcggcccgcgcgctgtggcccctgcggcgcttctggaggagcacagrcttctgmcccccgctgccacacagcyaggctgaccagtacgtcctcagctgggacyagcagctcaacctcvcctatgtgggcgycgtccctcmccgcggcatcaagcaggtccggacccactggctgctggagcttgtcaccaccagggggtccactggacrgggcctgagctacaacttcacccacctggacgggtacytggaccttctcagggagaaccagctcctcccagggtttgagctgatgggcagcgcctcgggccacttcactgactttgaggacaagcagcaggtgtttgagtggaaggacttggtctccagcctggmcaggagatacatcggtaggtamggactggcgcatgtttccaagtggaacttcgagacgtggaaygagccagaccaccacgactttgacaacgtctccatgaccatgcaagrcttcctgaactactacgatgcctgctcggagggtctgcgcgccgccagccccgccctgcggcygggaggccccggcgactccttccacaccccaccgcgatccccgctgagctggggcctcctgcgccrctgccacgacggtaccaacttcttcactggggaggcgggcgtgcggctggactacatctccctccacaggaagggtgcgcgcagctccatctccatcctggagcaggagaaggtcgtcgcgcagcagatccggcagctcttccccaagttcgcggacacccccatttacaacgacgagrcggacccgctggtgggctggtccctgccayagccgtggagggcsgacgtgacctacgyggccatggtggtgaaggtcatcscgcagcatcagaacctgctactggccaacaccacctccgccttcccctavgcgctcckgagcaacdacaatgccttcctgagctaccacccgcaccccttcrcgcagcgcaygctcmccgcgcgcttccaggtcaacaacacccgcccgccgcacgtgcrgctgttgcrcaagccggtgctcacggccatggggctgctggcgctgctggatgaggagyagctctrggcckaagtgtcgcaggccgggaccgtcctggacagcaaccacacggtgggcgtcctggccagcgcccaccgcccccagggcccggccgacgcctggcgcgccgcggtgctgatctacgcgagcgacgacacccgcgcccaccccaaccgcagcgtcgcggtgaccctgcggctgcgcggggtgccccccggcccggcctggtctacgtcacgcgctacctggacaacgggctctgcagccccgaaggcgagtggcggcsccygggccsgcccgtcttccccacggcagagcagttccggcgcaygcgcgcggctgaggacccggtggccgcggcgccccgccccttacccgccggcggccgcctgaccctgcgccccgcgctgcggctgcbgtcgcttttgctggtgcacgtgtgtgcgcgccccgagaagccgcccgggcaggtcacgcggctccgcgccctgcccctgacccaagggcagctggttctggtctggtcggatgaacacgtgggctccaagtgcctgtggacatacgagatccagttctctcaggacggtaaggcgtacaccccggtcagcaggaagccatcgaccttcaacctctttgtgttcagcccagacacaggtgctgtctctggctcctaccgagttcgarccctggactacygggccygaccaggccccttctyggaccctgtgccgtacctggaggtccctgtgccaagagggcccccatccccgggcaatccakgagcctgtgctgagccccagtgggttgcacctccaccggcagtcagcgagctggggctgcmctgtgcccatgctgccctcccatcaccccctttgcaatatatttttatattttattattttcttttatatcttggtaccaacgccccctttaaagcggctttgcacaggtcagtctcgggttgaggctctgtggcttggccctgggcacattccagggcagcctccaagggtaaaccccggtggctgatgaggacccagctggagcgaggcctctttccccctcgctcccactcagaccacccccaagcctggactggaagtgtgttgagcccctgggtcaggctggcgagccagctcggccctgcccacccaggggtttccgagatcacccctggtgaggcggcgtgccagtcccttgctttcttacttgttctgcagagcggggagctgaggctgcatgagggaagactcccgtaccccagcacggtggagggtgggatggggtcacgcctgtgcgacccaggaggtggccagcagaaggaaacagtagtgtccaccatggtctgcgtctccccaccacggattgtcttggctccggatttgagacatggcagggccagatgaggacaacttgatgacagtttacagagatggaggcagggtgccaggaagccacgggggagcccccagggcactcagcagtccaggcagggctgggcgtcctggcaaggagcagggaccttctgcccaggggtgtggccagcctgtgggtgctgtgtgcaggaccccaggaaccaaggccgcagtctcttccctcgctccagcatcctcccaaggccacccttggctgcactcagccagagagctggggcacagggaccccacaggtttccctggaggctgtcaggggctccggtgggggcggggggtgagcccgctgggttcactgcacctcccaaagcccatgtgccctgcctgccccaaccaaagtgggcctccaaggtgctggggtgggacagagacccacgagggaccctcccctcactcctggacctgggtgttgtggcttttggcaaaaatagccacatacactccaagtttccccctcagctgggattcctggtgtgagcctggtcaccagggtggtaggacagaccctcctctggaggcaaagtgacggtcagcagggggttctgaggccccacagcgctggcaccagtcttggctgaatggcaaagctgcatctgtctccttccccatgagcttccgttgcc

SEQ ID NO: 6071 - DNA, 3215 bp, Homo sapiens
ccgcaaggaagcggggctccaagccctgccgtgctcccggctccccgaggctccccgaggccacccaacccctcccacccggccatcgccccctcaccaaggccccgccccgcggcggcggtcacatggggtgcgcgcccagactccgacccggaggcggaaccggcagtgcagcccgaagccccgcagtccccgagcacgcgtggccatrcgtcccctgcgcccccgcgcmgcgctgctggcgctcctggcctcgctcctggccgcrcccccggtggccccggccgaggccccgcacctggtgcaggtggacgcggcccgcgcgctgtggcccctgcggcgcttctggaggagcacagrcttctgmcccccgctgccacacagcyaggctgaccagtacgtcctcagctgggacyagcagctcaacctcvcctatgtgggcgycgtccctcmccgcggcatcaagcaggtccggacccactggctgctggagcttgtcaccaccaggcctcgtgggaattcagcccatctgcaagtgcagtggcagggcggcccccttctcccttgaggacgcctgtcccctcggaatgcaggcctcgtgggaattcagccccatctgcaaggggtccactggacrgggcctgagctacaacttcacccacctggacgggtacytggaccttctcagggagaaccagctcctcccagggtttgagctgatgggcagcgcctcgggccacttcactgactttgaggacaagcagcaggtgtttgagtggaaggacttggtctccagcctggmcaggagatacatcggtaggtamggactggcgcatgtttccaagtggaacttcgagacgtggaaygagccagaccaccacgactttgacaacgtctccatgaccatgcaagrcttcctgaactactacgatgcctgctcggagggtctgcgcgccgccagccccgccctgcggcygggaggccccggcgactccttccacaccccaccgcgatccccgctgagctggggcctcctgcgccrctgccacgacggtaccaacttcttcactggggaggcgggcgtgcggctggactacatctccctccacaggaagggtgcgcgcagctccatctccatcctggagcaggagaaggtcgtcgcgcagcagatccggcagctcttccccaagttcgcggacacccccatttacaacgacgagrcggacccgctggtgggctggtccctgccayagccgtggagggcsgacgtgacctacgyggccatggtggtgaaggtcatcscgcagcatcagaacctgctactggccaacaccacctccgccttcccctavgcgctcckgagcaacdacaatgccttcctgagctaccacccgcaccccttcrcgcagcgcaygctcmccgcgcgcttccaggtcaacaacacccgcccgccgcacgtgcrgctgttgcrcaagccggtgctcacggccatggggctgctggcgctgctggatgaggagyagctctrggcckaagtgtcgcaggccgggacccgccccgcgctgcggctgcbgtcgcttttgctggtgcacgtgtgtgcgcgccccgagaagccgcccgggcaggcaagtcacgcggctccgcgccctgcccctgacccaagggcagctggttctggtctggtcggatgaacacgtgggctccaagtgcctgtggacatacgagatccagttctctcaggacggtaaggcgtacaccccggtcagcaggaagccatcgaccttcaacctctttgtgttcagcccagacacaggtgctgtctctggctcctaccgagttcgarccctggactacygggccygaccaggccccttctyggaccctgtgccgtacctggaggtccctgtgccaagagggcccccatccccgggcaatccakgagcctgtgctgagccccagtgggttgcacctccaccggcagtcagcgagctggggctgcmctgtgcccatgctgccctcccatcaccccctttgcaatatatttttatattttattattttcttttatatcttggtaccaacgccccctttaaagcggctttgcacaggtcagtctcgggttgaggctctgtggcttggccctgggcacattccagggcagcctccaagggtaaaccccggtggctgatgaggacccagctggagcgaggcctctttccccctcgctcccactcagaccacccccaagcctggactggaagtgtgttgagcccctgggtcaggctggcgagccagctcggccctgcccacccaggggtttccgagatcacccctggtgaggcggcgtgccagtcccttgctttcttacttgttctgcagagcggggagctgaggctgcatgagggaagactcccgtaccccagcacggtggagggtgggatggggtcacgcctgtgcgacccaggaggtggccagcagaaggaaacagtagtgtccaccatggtctgcgtctccccaccacggattgtcttggctccggatttgagacatggcagggccagatgaggacaacttgatgacagtttacagagatggaggcagggtgccaggaagccacgggggagcccccagggcactcagcagtccaggcagggctgggcgtcctggcaaggagcagggaccttctgcccaggggtgtggccagcctgtgggtgctgtgtgcaggaccccaggaaccaaggccgcagtctcttccctcgctccagcatcctcccaaggccacccttggctgcactcagccagagagctggggcacagggaccccacaggtttccctggaggctgtcaggggctccggtgggggcggggggtgagcccgctgggttcactgcacctcccaaagcccatgtgccctgcctgccccaaccaaagtgggcctccaaggtgctggggtgggacagagacccacgagggaccctcccctcactcctggacctgggtgttgtggcttttggcaaaaatagccacatacactccaagtttccccctcagctgggattcctggtgtgagcctggtcaccagggtggtaggacagaccctcctctggaggcaaagtgacggtcagcagggggttctgaggccccacagcgctggcaccagtcttggctgaatggcaaagctgcatctgtctccttccccatgagcttccgttgcc

SEQ ID NO: 6072 - DNA, 1762 bp, Homo sapiens
gtcctccacctgagtgggcgccggggcgtgagcctgggccgccccctgcagcccaggccgatgcccgggatcctgctctttgagmcccccgctgccacacagcyaggctgaccagtacgtcctcagctgggacyagcagctcaacctcvcctatgtgggcgycgtccctcmccgcggcatcaagcaggtccggacccactggctgctggagcttgtcaccaccagggggtccactggacrgggcctgagctacaacttcacccacctggacgggtacytggaccttctcagggagaaccagctcctcccagggtttgagctgatgggcagcgcctcgggccacttcactgactttgaggacaagcagcaggtgtttgagtggaaggacttggtctccagcctggmcaggagatacatcggtaggtamggactggcgcatgtttccaagtggaacttcgagacgtggaaygagccagaccaccacgactttgacaacgtctccatgaccatgcaagrcttcctgaactactacgatgcctgctcggagggtctgcgcgccgccagccccgccctgcggcygggaggccccggcgactccttccacaccccaccgcgatccccgctgagctggggcctcctgcgccrctgccacgacggtaccaacttcttcactggggaggcgggcgtgcggctggactacatctccctccacaggaagggtgcgcgcagctccatctccatcctggagcaggagaaggtcgtcgcgcagcagatccggcagctcttccccaagttcgcggacacccccatttacaacgacgagrcggacccgctggtgggctggtccctgccayagccgtggagggcsgacgtgacctacgyggccatggtggtgaaggtcatcscgcagcatcagaacctgctactggccaacaccacctccgccttcccctavgcgctcckgagcaacdacaatgccttcctgagctaccacccgcaccccttcrcgcagcgcaygctcmccgcgcgcttccaggtcaacaacacccgcccgccgcacgtgcrgctgttgcrcaagccggtgctcacggccatggggctgctggcgctgctggatgaggagyagctctrggcckaagtgtcgcaggccgggaccgtcctggacagcaaccacacggtgggcgtcctggccagcgcccaccgcccccagggcccggccgacgcctggcgcgccgcggtgctgatctacgcgagcgacgacacccgcgcccaccccaaccgcagcgtcgcggtgaccctgcggctgcgcggggtgccccccggcccggcctggtctacgtcacgcgctacctggacaacgggctctgcagccccgaaggcgagtggcggcsccygggccsgcccgtcttccccacggcagagcagttccggcgcaygcgcgcggctgaggtaggtgggccgcggaggggcgaggggccgggccgggccggggtcccgggggggtggggtccggggcgggggctccgaggcggtgtgggtgggaggtggagcggtgggccgggggcgttcgccctgaggtcgggccgagcgtccccagcycccctggagaaccctgaggaccggccactgcgcccaggacccggtggccgcggcgccccgccccttacccgccggcggccgcctgaccctgcgccccgcgctgcggctgcbgtcgcttttgctggtgcacgtgtgtgcgcgccccgagaagccgcccgggcag

SEQ ID NO: 6073 - DNA, 3817 bp, Homo sapiens
ccgcaaggaagcggggctccaagccctgccgtgctcccggctccccgaggctccccgaggccacccaacccctcccacccggccatcgccccctcaccaaggccccgccccgcggcggcggtcacatggggtgcgcgcccagactccgacccggaggcggaaccggcagtgcagcccgaagccccgcagtccccgagcacgcgtggccatrcgtcccctgcgcccccgcgcmgcgctgctggcgctcctggcctcgctcctggccgcrcccccggtggccccggccgaggccccgcacctggtgcaggtggacgcggcccgcgcgctgtggcccctgcggcgcttctggaggagcacagrcttctgmcccccgctgccacacagcyaggctgaccagtacgtcctcagctgggacyagcagctcaacctcvcctatgtgggcgycgtccctcmccgcggcatcaagcaggtccggacccactggctgctggagcttgtcaccaccagggggtccactggacrgggcctgagctacaacttcacccacctggacgggtacytggaccttctcagggagaaccagctcctcccagggtttgagctgatgggcagcgcctcgggccacttcactgactttgaggacaagcagcaggtgtttgagtggaaggacttggtctccagcctggmcaggagatacatcggccgccgcccaggtcttggacccccttgagccagsgcttcctgatgtggggcgggaggctggcctgcatggagatggggttcatcttgagtcagacgcccttcatcaccttgcaccctccctccgtgggagtcactgaggcgagattcacctgtgctggggggacagcaaggctcctctgcaggtaggtamggactggcgcatgtttccaagtggaacttcgagacgtggaaygagccagaccaccacgactttgacaacgtctccatgaccatgcaagrcttcctgaactactacgatgcctgctcggagggtctgcgcgccgccagccccgccctgcggcygggaggccccggcgactccttccacaccccaccgcgatccccgctgagctggggcctcctgcgccrctgccacgacggtaccaacttcttcactggggaggcgggcgtgcggctggactacatctccctccacaggaagggtgcgcgcagctccatctccatcctggagcaggagaaggtcgtcgcgcagcagatccggcagctcttccccaagttcgcggacacccccatttacaacgacgagrcggacccgctggtgggctggtccctgccayagccgtggagggcsgacgtgacctacgyggccatggtggtgaaggtcatcscgcagcatcagaacctgctactggccaacaccacctccgccttcccctavgcgctcckgagcaacdacaatgccttcctgagctaccacccgcaccccttcrcgcagcgcaygctcmccgcgcgcttccaggtcaacaacacccgcccgccgcacgtgcrgctgttgcrcaagccggtgctcacggccatggggctgctggcgctgctggatgaggagyagctctrggcckaagtgtcgcaggccgggaccgtcctggacagcaaccacacggtgggcgtcctggccagcgcccaccgcccccagggcccggccgacgcctggcgcgccgcggtgctgatctacgcgagcgacgacacccgcgcccaccccaaccgcagcgtcgcggtgaccctgcggctgcgcggggtgccccccggcccggcctggtctacgtcacgcgctacctggacaacgggctctgcagccccgaaggcgagtggcggcsccygggccsgcccgtcttccccacggcagagcagttccggcgcaygcgcgcggctgaggtaggtgggccgcggaggggcgaggggccgggccgggccggggtcccgggggggtggggtccggggcgggggctccgaggcggtgtgggtgggaggtggagcggtgggccgggggcgttcgccctgaggtcgggccgagcgtccccagcycccctggagaaccctgaggaccggccactgcgcccaggacccggtggccgcggcgccccgccccttacccgccggcggccgcctgaccctgcgccccgcgctgcggctgcbgtcgcttttgctggtgcacgtgtgtgcgcgccccgagaagccgcccgggcaggtcacgcggctccgcgccctgcccctgacccaagggcagctggttctggtctggtcggatgaacacgtgggctccaagtgcgtgcctgtggacatacgagatccagttctctcaggacggtaaggcgtacaccccggtcagcaggaagccatcgaccttcaacctctttgtgttcagcccagacacaggtgctgtctctggctcctaccgagttcgarccctggactacygggccygaccaggccccttctyggaccctgtgccgtacctggaggtccctgtgccaagagggcccccatccccgggcaatccakgagcctgtgctgagccccagtgggttgcacctccaccggcagtcagcgagctggggctgcmctgtgcccatgctgccctcccatcaccccctttgcaatatatttttatattttattattttcttttatatcttggtaccaacgccccctttaaagcggctttgcacaggtcagtctcgggttgaggctctgtggcttggccctgggcacattccagggcagcctccaagggtaaaccccggtggctgatgaggacccagctggagcgaggcctctttccccctcgctcccactcagaccacccccaagcctggactggaagtgtgttgagcccctgggtcaggctggcgagccagctcggccctgcccacccaggggtttccgagatcacccctggtgaggcggcgtgccagtcccttgctttcttacttgttctgcagagcggggagctgaggctgcatgagggaagactcccgtaccccagcacggtggagggtgggatggggtcacgcctgtgcgacccaggaggtggccagcagaaggaaacagtagtgtccaccatggtctgcgtctccccaccacggattgtcttggctccggatttgagacatggcagggccagatgaggacaacttgatgacagtttacagagatggaggcagggtgccaggaagccacgggggagcccccagggcactcagcagtccaggcagggctgggcgtcctggcaaggagcagggaccttctgcccaggggtgtggccagcctgtgggtgctgtgtgcaggaccccaggaaccaaggccgcagtctcttccctcgctccagcatcctcccaaggccacccttggctgcactcagccagagagctggggcacagggaccccacaggtttccctggaggctgtcaggggctccggtgggggcggggggtgagcccgctgggttcactgcacctcccaaagcccatgtgccctgcctgccccaaccaaagtgggcctccaaggtgctggggtgggacagagacccacgagggaccctcccctcactcctggacctgggtgttgtggcttttggcaaaaatagccacatacactccaagtttccccctcagctgggattcctggtgtgagcctggtcaccagggtggtaggacagaccctcctctggaggcaaagtgacggtcagcagggggttctgaggccccacagcgctggcaccagtcttggctgaatggcaaagctgcatctgtctccttccccatgagcttccgttgcc

SEQ ID NO: 6074 - DNA, 2012 bp, Homo sapiens
ccgcaaggaagcggggctccaagccctgccgtgctcccggctccccgaggctccccgaggccacccaacccctcccacccggccatcgccccctcaccaaggccccgccccgcggcggcggtcacatggggtgcgcgcccagactccgacccggaggcggaaccggcagtgcagcccgaagccccgcagtccccgagcacgcgtggccatrcgtcccctgcgcccccgcgcmgcgctgctggcgctcctggcctcgctcctggccgcrcccccggtggccccggccgaggccccgcacctggtgcaggtggacgcggcccgcgcgctgtggcccctgcggcgcttctggaggagcacagrcttctgmcccccgctgccacacagcyaggctgaccagtacgtcctcagctgggacyagcagctcaacctcvcctatgtgggcgycgtccctcmccgcggcatcaagcaggtccggacccactggctgctggagcttgtcaccaccagggggtccactggacrgggcctgagctacaacttcacccacctggacgggtacytggaccttctcagggagaaccagctcctcccagggtttgagctgatgggcagcgcctcgggccacttcactgactttgaggacaagcagcaggtgtttgagtggaaggacttggtctccagcctggmcaggagatacatcggtaggtamggactggcgcatgtttccaagtggaacttcgagacgtggaaygagccagaccaccacgactttgacaacgtctccatgaccatgcaagrcttcctgaactactacgatgcctgctcggagggtctgcgcgccgccagccccgccctgcggcygggaggccccggcgactccttccacaccccaccgcgatccccgctgagctggggcctcctgcgccrctgccacgacggtaccaacttcttcactggggaggcgggcgtgcggctggactacatctccctccacaggaagggtgcgcgcagctccatctccatcctggagcaggagaaggtcgtcgcgcagcagatccggcagctcttccccaagttcgcggacacccccatttacaacgacgagrcggacccgctggtgggctggtccctgccayagccgtggagggcsgacgtgacctacgyggccatggtggtgaaggtcatcscgcagcatcagaacctgctactggccaacaccacctccgccttcccctavgcgctcckgagcaacdacaatgccttcctgagctaccacccgcaccccttcrcgcagcgcaygctcmccgcgcgcttccaggtcaacaacacccgcccgccgcacgtgcrgctgttgcrcaagccggtgctcacggccatggggctgctggcgctgctggatgaggagyagctctrggcckaagtgtcgcaggccgggaccgtcctggacagcaaccacacggtgggcgtcctggccagcgcccaccgcccccagggcccggccgacgcctggcgcgccgcggtgctgatctacgcgagcgacgacacccgcgcccaccccaaccgcagcgtcgcggtgaccctgcggctgcgcggggtgccccccggcccggcctggtctacgtcacgcgctacctggacaacgggctctgcagccccgaaggcgagtggcggcsccygggccsgcccgtcttccccacggcagagcagttccggcgcaygcgcgcggctgaggacccggtggccgcggcgccccgccccttacccgccggcggccgcctgaccctgcgccccgcgctgcggctgcbgtcgcttttgctggtgcacgtgtgtgcgcgccccgagaagccgcccgggcaggcaagtggcagtcccctaacccgcgccgcggcccggactccccttccccgacgccatcacagcccttccctcccccaggtcacgcggctccgcgccctgcccctgacccaagggcagctggttctggtctggtcggatgaacacgtgggctccaa

SEQ ID NO: 6075 - DNA, 2044 bp, Homo sapiens
ccgcaaggaagcggggctccaagccctgccgtgctcccggctccccgaggctccccgaggccacccaacccctcccacccggccatcgccccctcaccaaggccccgccccgcggcggcggtcacatggggtgcgcgcccagactccgacccggaggcggaaccggcagtgcagcccgaagccccgcagtccccgagcacgcgtggccatrcgtcccctgcgcccccgcgcmgcgctgctggcgctcctggcctcgctcctggccgcrcccccggtggccccggccgaggccccgcacctggtgcaggtggacgcggcccgcgcgctgtggcccctgcggcgcttctggaggagcacagrcttctgmcccccgctgccacacagcyaggctgaccagtacgtcctcagctgggacyagcagctcaacctcvcctatgtgggcgycgtccctcmccgcggcatcaagcaggtccggacccactggctgctggagcttgtcaccaccagggggtccactggacrgggcctgagctacaacttcacccacctggacgggtacytggaccttctcagggagaaccagctcctcccagggtttgagctgatgggcagcgcctcgggccacttcactgactttgaggacaagcagcaggtgtttgagtggaaggacttggtctccagcctggmcaggagatacatcggtaggtamggactggcgcatgtttccaagtggaacttcgagacgtggaaygagccagaccaccacgactttgacaacgtctccatgaccatgcaagrcttcctgaactactacgatgcctgctcggagggtctgcgcgccgccagccccgccctgcggcygggaggccccggcgactccttccacaccccaccgcgatccccgctgagctggggcctcctgcgccrctgccacgacggtaccaacttcttcactggggaggcgggcgtgcggctggactacatctccctccacaggaagggtgcgcgcagctccatctccatcctggagcaggagaaggtcgtcgcgcagcagatccggcagctcttccccaagttcgcggacacccccatttacaacgacgagrcggacccgctggtgggctggtccctgccayagccgtggagggcsgacgtgacctacgyggccatggtggtgaaggtcatcscgcagcatcagaacctgctactggccaacaccacctccgccttcccctavgcgctcckgagcaacdacaatgccttcctgagctaccacccgcaccccttcrcgcagcgcaygctcmccgcgcgcttccaggtcaacaacacccgcccgccgcacgtgcrgctgttgcrcaagccggtgctcacggccatggggctgctggcgctgctggatgaggagyagctctrggcckaagtgtcgcaggccgggaccgtcctggacagcaaccacacggtgggcgtcctggccagcgcccaccgcccccagggcccggccgacgcctggcgcgccgcggtgctgatctacgcgagcgacgacacccgcgcccaccccaaccgcagcgtcgcggtgaccctgcggctgcgcggggtgccccccggcccggcctggtctacgtcacgcgctacctggacaacgggctctgcagccccgaaggcgagtggcggcsccygggccsgcccgtcttccccacggcagagcagttccggcgcaygcgcgcggctgaggtaggtgggccgcggaggggcgaggggccgggccgggccggggtcccgggggggtggggtccggggcgggggctccgaggcggtgtgggtgggaggtggagcggtgggccgggggcgttcgccctgaggtcgggccgagcgtccccagcycccctggagaaccctgaggaccggccactgcgcccaggacccggtggccgcggcgccccgccccttacccgccggcggccgcctgaccctgcgccccgcgctgcggctgcbgtcgcttttgctggtgcacgtgtgtgcgcgccccgagaagccgcccgggcag

SEQ ID NO: 6076 - DNA, 3408 bp, Homo sapiens
ggtttcctgggagtccatgcgtgcctggagcagcagcgtctccagggacaggcagccaccatgagcctcagtgaggagcaggcccggagctttctggaccagaaccccgattttgcccgccagtactttgggaagaaactgagccctgagaatgtggccgcggcctgcgaggacgggtgcccgccggactgcgacagcctccgggacctctgccaggtggaggagagcacggcgctgctggagctggtgcaggatatgcaggagagcatcaacatggagygcgtggtcttcaaggtcctgcggcgcctctgcaccctcctgcaggccgaccgctgcagcctcttcatgtaccgccagcgcaacggcgtggccgagctggccaccaggcttttcagcgtgcagccggacagcgtcctggaggactgcctggtgccccccgactccgagatcgtcttcccactggacatcggggtcgtgggccacgtggctcagaccaaaaagatggtgaacgtcgaggacgtggccgagtgccctcacttcagctcatttgctgacgagctcactgactacaagacaaagaatatgctggccacacccatcatgaatggcaaagacgtcgtggcggtgatcatggcagtgaacaagctcaacggcccattcttcaccagcgaagacgaagatgtgttcttgaagtacctgaattttgccacgttgtacctgaagatctatcacctgagctacctccacaactgcgagacgcgccgcggccaggtgctgctgtggtcggccaacaaggtgtttgaggagctgacggacatcgagaggcagttcmacaaggccttctacacggtgcgggcctacctcaactgmgagcggtactccgtgggcctcctggacatgaccaaggagaaggaattttttgacgtgtggtctgtgctgatgggagagtcccagccgtactcgggcccacgcacgcctgatggccgggaaattgtcttctacaaagtgatcgactacrtcctccacggcaaggaggagatcaaggtcattcccacaccctcagccgatcactgggccctggccagcggccttccaagctacgtggcagaaagcggctttatttgtaacatcatgaatcgttccgctgacgaaatgttcaaatttcaggaaggggccctggacgactccgggtggctcatcaagaatgtgctgtccatgcccatcgtcaacaagaaggaggagattgtgggagtcgccacattttacaacaggaaagacgggaagccctttgacgaacaggacgaggttctcatggagtccctgacacagttcctgggctggtcagtgatgaacaccgacacctacgacaagatgaacaagctggagaaccgcaaggacatcgcacaggacatggtcctttaccacgtgaagtgcgacagggacgagatccagctcatcctgccaaccagagcgcgcctggggaaggagcctgctgactgcgatgaggacgagctgggcgaaatcctgaaggaggagctgccagggcccaccacatttgacatctacgaattccacttctctgacctggagtgcaccgaactggacctggtcaaatgtggcatccagatgtactacgagctgggcgtggtccgaaagttccagatcccccaggaggtcctggtgcggttcctgttctccatcagcaaagggtaccrgagaatcacctacyacaactggcgccacggcttcaacgtggcccagacgatgttcacgctgctcatgaccgrcaaactgaagagctactacacggacctggaggccttcgccatggtgacagccggcctgtgccatgacatcgaccaccgcggcaccaacaacctgtaccagatgaagtcccagaaccccttggctaagctccacggctcctcgattttggagcggcaccacctggagtttgggaagttcctgctctcggaggagaccctgaacatctaccagaacctgaaccggcggcagcacgagcacgtgatccacctgatggacatcgccatcatcgccacggacctggccctgtacttcaagaagagagcgatgtttcagaagatcgtggatgagtccaagaactaccaggacaagaagagctgggtggagtacctgtccctggagacgacccggwaggagatcgtcatggccatgatgatgacagcctgcgacctgtctgccatcaccaagccctgggaagtccagagcaaggtcgcacttctcgtggctgctgagttctgggagcaaggtgacttggaaaggacagtcttggatcagcagcccattcctatgatggaccggaacaargcggccgagctccccaagctgcaagtgggcttcatcgacttygtgtgcacattcgtgtacaaggcgattctctcgtttccacgaagagatcctgcccatgttcgaccgactgcagaacaataggaaagagtggaaggcgctggctgatgagtatgaggccaaagtgaaggctctggaggagaaggaggaggaggagagggtggcagccaagaaagtrggcacagaaatttgcaatggyggcccagcacccaagtcttcaacctgctgtatcstgtgagcactgtcccrtgggacmctatggctccctcaatcttcacccactaggatttgggttctgcctgtggctatttgctacaagaggttaggaagcccaagaaaatgactgaagatcattctggatattttaatttttttttttttttttttttgagatggagtcttgctctgtcacccaggctggagtgccgtggcacgatctcagctcactgcaacctccacctcccaggttcaagcgattctcgtgcctcagcctcctgagtagctgggactacaggcgcccaccaccacacatggctaatttttgtattttcagtacagatggggtttcaccatattgggcaggctggtctcgaactcctgacctcaggtgatcacccgcctcagcttcctgaagtgctgggattacaggcatgagccaccacgcccagcctgtttttataaactgaagccaactgtgaataaactgtagcctacattactcatccatttttggatagttaccactgggagacctttgaaaagggtccatgaactctgaaatcactgagaacatttgcagccacacatgtacatatgtgtacacaggtagacagatggacacaggccgtttctcatccagtttaggaaaacacacatgctcaggaattcagaataaaataaacagaaaactacttgcccattatctgtggtaaaatgatagcggaagccacactacatttgacccatcagaaaattctgccagagaggtcaaggccatgagtaaagcggccatccaacttc

SEQ ID NO: 6077 - DNA, 2688 bp, Homo sapiens
gtgttgcttgtgggtgcgtgtgtggtgtgtgcatgtgtgtgcgcgcgcgtgtgtgcggggtgtgccgtgagcgtgtgcccgcggttcgggggatgagtaggggcgctgacttttaggaccagccatttgagtcaagctggagacgacgtcttagaacctaggatgagtctcgtttggttttagtctgcaaagctcgtctgcatcagacaggaattttccccagacgcgggtgcacgtgaattaattcatcagaaggcggttcacggcctgagtgagggggacgagggcggcgaattcctccgcctcattcctaccctgacgattcgagggttccccagaggctgtggactccttgccgccctgaacctactcacctacaatcacgacgggctcctggggcaggacaaagccacagggtttcctgggagtccatgcgtgcctggagcagcagcgtctccagggacaggcagccaccatgagcctcagtgaggagcaggcccggagctttctggaccagaaccccgattttgcccgccagtactttgggaagaaactgagccctgagaatgtggccgcggcctgcgaggacgggtgcccgccggactgcgacagcctccgggacctctgccaggtggaggagagcacggcgctgctggagctggtgcaggatatgcaggagagcatcaacatggagygcgtggtcttcaaggtcctgcggcgcctctgcaccctcctgcaggccgaccgctgcagcctcttcatgtaccgccagcgcaacggcgtggccgagctggccaccaggcttttcagcgtgcagccggacagcgtcctggaggactgcctggtgccccccgactccgagatcgtcttcccactggacatcggggtcgtgggccacgtggctcagaccaaaaagatggtgaacgtcgaggacgtggccgagtgccctcacttcagctcatttgctgacgagctcactgactacaagacaaagaatatgctggccacacccatcatgaatggcaaagacgtcgtggcggtgatcatggcagtgaacaagctcaacggcccattcttcaccagcgaagacgaagatgtgttcttgaagtacctgaattttgccacgttgtacctgaagatctatcacctgagctacctccacaactgcgagacgcgccgcggccaggtgctgctgtggtcggccaacaaggtgtttgaggagctgacggacatcgagaggcagttcmacaaggccttctacacggtgcgggcctacctcaactgmgagcggtactccgtgggcctcctggacatgaccaaggagaaggaattttttgacgtgtggtctgtgctgatgggagagtcccagccgtactcgggcccacgcacgcctgatggccgggaaattgtcttctacaaagtgatcgactacrtcctccacggcaaggaggagatcaaggtcattcccacaccctcagccgatcactgggccctggccagcggccttccaagctacgtggcagaaagcggctttgtcctggtgcggttcctgttctccatcagcaaagggtaccrgagaatcacctacyacaactggcgccacggcttcaacgtggcccagacgatgttcacgctgctcatgaccgrcaaactgaagagctactacacggacctggaggccttcgccatggtgacagccggcctgtgccatgacatcgaccaccgcggcaccaacaacctgtaccagatgaagtcccagaaccccttggctaagctccacggctcctcgattttggagcggcaccacctggagtttgggaagttcctgctctcggaggagaccctgaacatctaccagaacctgaaccggcggcagcacgagcacgtgatccacctgatggacatcgccatcatcgccacggacctggccctgtacttcaagaagagagcgatgtttcagaagatcgtggatgagtccaagaactaccaggacaagaagagctgggtggagtacctgtccctggagacgacccggwaggagatcgtcatggccatgatgatgacagcctgcgacctgtctgccatcaccaagccctgggaagtccagagcaaggtcgcacttctcgtggctgctgagttctgggagcaaggtgacttggaaaggacagtcttggatcagcagcccattcctatgatggaccggaacaargcggccgagctccccaagctgcaagtgggcttcatcgacttygtgtgcacattcgtgtacaaggcgagtggttcacgggttrggcacagaaatttgcaatggyggcccagcacccaagtcttcaacctgctgtatcstgtgagcactgtcccrtgggacmctatggctccctcaatcttcacccactaggatttgggttctgcctgtggctatttgctacaagaggttaggaagcccaagaaaatgactgaagatcattctggatcctgtttttataaactgaagccaactgtgaataaactgtagcctacattactcatccatttttggatagttaccactgggagacctttgaaaagggtccatgaactctgaaatcactgagaacatttgcagccacacatgtacatatgtgtacacaggtagacagatggacacaggccgtttctcatccagtttaggaaaacacacatgctcag

SEQ ID NO: 6078 - DNA, 3823 bp, Homo sapiens
gtgttgcttgtgggtgcgtgtgtggtgtgtgcatgtgtgtgcgcgcgcgtgtgtgcggggtgtgccgtgagcgtgtgcccgcggttcgggggatgagtaggggcgctgacttttaggaccagccatttgagtcaagctggagacgacgtcttagaacctaggatgagtctcgtttggttttagtctgcaaagctcgtctgcatcagacaggaattttccccagacgcgggtgcacgtgaattaattcatcagaaggcggttcacggcctgagtgagggggacgagggcggcgaattcctccgcctcattcctaccctgacgattcgagggttccccagaggctgtggactccttgccgccctgaacctactcacctacaatcacgacgggctcctggggcaggacaaagccacagggtttcctgggagtccatgcgtgcctggagcagcagcgtctccagggacaggcagccaccatgagcctcagtgaggagcaggcccggagctttctggaccagaaccccgattttgcccgccagtactttgggaagaaactgagccctgagaatgtggccgcggcctgcgaggacgggtgcccgccggactgcgacagcctccgggacctctgccaggtggaggagagcacggcgctgctggagctggtgcaggatatgcaggagagcatcaacatggagygcgtggtcttcaaggtcctgcggcgcctctgcaccctcctgcaggccgaccgctgcagcctcttcatgtaccgccagcgcaacggcgtggccgagctggccaccaggcttttcagcgtgcagccggacagcgtcctggaggactgcctggtgccccccgactccgagatcgtcttcccactggacatcggggtcgtgggccacgtggctcagaccaaaaagatggtgaacgtcgaggacgtggccgagtgccctcacttcagctcatttgctgacgagctcactgactacaagacaaagaatatgctggccacacccatcatgaatggcaaagacgtcgtggcggtgatcatggcagtgaacaagctcaacggcccattcttcaccagcgaagacgaagatgtgttcttgaagtacctgaattttgccacgttgtacctgaagatctatcacctgagctacctccacaactgcgagacgcgccgcggccaggtgctgctgtggtcggccaacaaggtgtttgaggagctgacggacatcgagaggcagttcmacaaggccttctacacggtgcgggcctacctcaactgmgagcggtactccgtgggcctcctggacatgaccaaggagaaggaattttttgacgtgtggtctgtgctgatgggagagtcccagccgtactcgggcccacgcacgcctgatggccgggaaattgtcttctacaaagtgatcgactacrtcctccacggcaaggaggagatcaaggtcattcccacaccctcagccgatcactgggccctggccagcggccttccaagctacgtggcagaaagcggctttatttgtaacatcatgaatcgttccgctgacgaaatgttcaaatttcaggaaggggccctggacgactccgggtggctcatcaagaatgtgctgtccatgcccatcgtcaacaagaaggaggagattgtgggagtcgccacattttacaacaggaaagacgggaagccctttgacgaacaggacgaggttctcatggagtccctgacacagttcctgggctggtcagtgatgaacaccgacacctacgacaagatgaacaagctggagaaccgcaaggacatcgcacaggacatggtcctttaccacgtgaagtgcgacagggacgagatccagctcatcctgccaaccagagcgcgcctggggaaggagcctgctgactgcgatgaggacgagctgggcgaaatcctgaaggaggagctgccagggcccaccacatttgacatctacgaattccacttctctgacctggagtgcaccgaactggacctggtcaaatgtggcatccagatgtactacgagctgggcgtggtccgaaagttccagatcccccaggaggtcctggtgcggttcctgttctccatcagcaaagggtaccrgagaatcacctacyacaactggcgccacggcttcaacgtggcccagacgatgttcacgctgctcatgaccgrcaaactgaagagctactacacggacctggaggccttcgccatggtgacagccggcctgtgccatgacatcgaccaccgcggcaccaacaacctgtaccagatgaagtcccagaaccccttggctaagctccacggctcctcgattttggagcggcaccacctggagtttgggaagttcctgctctcggaggagaccctgaacatctaccagaacctgaaccggcggcagcacgagcacgtgatccacctgatggacatcgccatcatcgccacggacctggccctgtacttcaagaagagagcgatgtttcagaagatcgtggatgagtccaagaactaccaggacaagaagagctgggtggagtacctgtccctggagacgacccggwaggagatcgtcatggccatgatgatgacagcctgcgacctgtctgccatcaccaagccctgggaagtccagagcaaggtcgcacttctcgtggctgctgagttctgggagcaaggtgacttggaaaggacagtcttggatcagcagcccattcctatgatggaccggaacaargcggccgagctccccaagctgcaagtgggcttcatcgacttygtgtgcacattcgtgtacaaggcgattctctcgtttccacgaagagatcctgcccatgttcgaccgactgcagaacaataggaaagagtggaaggcgctggctgatgagtatgaggccaaagtgaaggctctggaggagaaggaggaggaggagagggtggcagccaagaaagtrggcacagaaatttgcaatggyggcccagcacccaagtcttcaacctgctgtatcstgtgagcactgtcccrtgggacmctatggctccctcaatcttcacccactaggatttgggttctgcctgtggctatttgctacaagaggttaggaagcccaagaaaatgactgaagatcattctggatattttaatttttttttttttttttttttgagatggagtcttgctctgtcacccaggctggagtgccgtggcacgatctcagctcactgcaacctccacctcccaggttcaagcgattctcgtgcctcagcctcctgagtagctgggactacaggcgcccaccaccacacatggctaatttttgtattttcagtacagatggggtttcaccatattgggcaggctggtctcgaactcctgacctcaggtgatcacccgcctcagcttcctgaagtgctgggattacaggcatgagccaccacgcccagcctgtttttataaactgaagccaactgtgaataaactgtagcctacattactcatccatttttggatagttaccactgggagacctttgaaaagggtccatgaactctgaaatcactgagaacatttgcagccacacatgtacatatgtgtacacaggtagacagatggacacaggccgtttctcatccagtttaggaaaacacacatgctcaggaattcagaataaaataaacagaaaactacttgcccattatctgtggtaaaatgatagcggaagccacactacatttgacccatcagaaaattctgccagagaggtcaaggccatgagtaaagcggccatccaacttc

SEQ ID NO: 6079 - DNA, 2950 bp, Homo sapiens
cgcgcgcaggcgcggaggtctgacggagacagcgcgtgcgcggcgtcgccgggcttgcgatgaacttccggctgtcaagctcccggccgggctgactcaagcggaggcgcgcggaacagtcgccgaggcgattcccgcccaggctcctgtaaccgccaggcagyggccccgccatgtcccagccccggaccccagarcaggcactggatacaccgggggactgccccccaggcaggagagacgaggacgctggggaggggatccagtgctcccaacgcatgctcagcttcagtgaygccctgctgtccatcatcgccaccgtcatggtctgtacggggcccctgcttaggcctgccccaccccgagcctctcgaggcactgcccrgcccacctcagacctgtctaggtcttgccagcatccttgggtcccccagctcctcaggcagcttaggggggcccagcactgccctcgagtccccagtactgccacacccaatccaacaagcgtctcttgctctcctgcttccttctgtctctttgccccctcagatcctgcctgtgacccacacrgagatctccccagaacagcmgttcgacagaagtgtacagaggcttctggcaacacggattgccgtctacctgatgacctttctcatcgtgacagtggcctgggcagcacacacaaggttgttccaagttgttgggaaaacagacgacacacttgccctgctcaacctggcctgcatgatgaccatcaccttcctgccttacacgttttcgttaatggtgaccttccctgatgtgcctctgggcatcttcttgttctgtgtgtgtgtgatcgccatyggggtcgtgcaggcactgattgtggggtaygcattccacttcccgcacctgctgagcccgcagatccagcgctctgcccacagggctctgtaccgacgacacgtcctgggcatcgtcctccaaggcccggccctgtgctttgcagcggccatcttctctctcttctttgtccccttgtcttacctgctgatggtgactgtcatcctcctcccctatgtcagcaaggtcaccggctggtgcagagacaggctcctgggccacagggagccctcggctcacccagtggaagtcttctcgtttgacctccacgagccactcagcaaggagcgcgtggaagcyttcagcgacggagtctacgccatcgtggccacgcttctcatcctggacatctgcgaagacaacgtcccggacccyaaggatgtgaaggagaggttcagcggcagcctcgtggccgccctgagygcgaccgggccgcgcttcctggcgtacttcggctccttcgccacagtgggactgctgtggttcgcccaccactcactcttcctgcatgtgcgcaaggccacgcgggccatggggctgctgaacacgctctcgctggccttcgtgggtggcctcccactagcctaccagcagacctcggccttcgcccggcagccccgcgatgagctggagcgcgtgcgtgtcagctgcaccatcatcttcctggccagcatcttccagctggccaygtggaccacggcgctgctgcaccaggcggagacgctgcagccctcggtgtggtttggcggccgggagcatgtgctcatgttcgccaagctggcgctgtacccctgtgccagcctgctggccttcgcctccacctgcctgctgagcaggttcagtgtgggcatcttccacctcatgcagatcgccgtgccctgcgccttcctgttgctgcgcctgctcgtgggcctggccctggccmccctgcgggtcctgcggggcctcgcccggcccgaacaccccccgccagcccccacgggccaggacgacccacagtcccagctcctccctgccccctgctagcagccacagagcccactcccagccgtcctcaccagagatggaccagggaggacaggatgctgggcaggggaagccaagtcacgggcaggccgcagtggttcttgcgtggcctggttttattttcrttgtgaaatatcatgctcttatttcagtcctcaaattgttctccactttttgcggagagaggagtttcacaggaactggaaatgtgctttatggcatttgcctatccactctctccaacctgaagacacgttgccaagctcacctacccgaggggcagcccactcccagcccctttgaggcctatacagagctggtggggtcgggggtgccaagccaggccctcccctcccctcggttgttgacacaaagatgaggaagagatggtaggatagtgacgcccagactgtatttgtcctggatataaattactgttgcattcaggcagcgataaatacagaggggcccggtgtgcagggcacagaccccacctgggtacagactcacatacaggacaagcccctcaccacagttacacacgattcatacagaccacagtccacaccagggctcgcgaagcaaaactaatcacaaaggactggtcttgaagatgacaatgacgtaaacaagagtgcacgctggaggccacaagcggccttacaatgcgtgtgtctgtgcagtttggcagatgcggggggtcgggggattagtggcatcaagggccccccaggaggctgcagcaggctgggccaggccacactcctgaggccaaaccagagccacttctgaggtcaaagccacacccaggaaagctccgcaggattggaggcccaggccagctgtgccccacaagggaagggggagatccgcaccgtgggaccgtttctcgtgggggagtcggggcttccccacagagcgggctccatttttggtcagactcctcccggggccagtgcaccatctgaatccttgggcacgtggaggcagctttgtctttggctgggtgcaccccagcctggcccagatgcaggaccct

SEQ ID NO: 6080 - DNA, 2795 bp, Homo sapiens
tgaacttccggctgtcaagctcccggccgggctgactcaagcggaggcgcgcggaacagtcgccgaggcgattcccgcccagctcccctgccctgagacagcctccggtgcttctgctgtgtcccaggaaacaagcctgaagcaagcactcaccatccctcaagaatgtgccctgaccyaccttcctcaccacggtggcatcagggccaggctcctgtaaccgccaggcagyggccccgccatgtcccagccccggaccccagarcaggcactggatacaccgggggactgccccccaggcaggagagacgaggacgctggggaggggatccagtgctcccaacgcatgctcagcttcagtgaygccctgctgtccatcatcgccaccgtcatgatcctgcctgtgacccacacrgagatctccccagaacagcmgttcgacagaagtgtacagaggcttctggcaacacggattgccgtctacctgatgacctttctcatcgtgacagtggcctgggcagcacacacaaggttgttccaagttgttgggaaaacagacgacacacttgccctgctcaacctggcctgcatgatgaccatcaccttcctgccttacacgttttcgttaatggtgaccttccctgatgtgcctctgggcatcttcttgttctgtgtgtgtgtgatcgccatyggggtcgtgcaggcactgattgtggggtaygcattccacttcccgcacctgctgagcccgcagatccagcgctctgcccacagggctctgtaccgacgacacgtcctgggcatcgtcctccaaggcccggccctgtgctttgcagcggccatcttctctctcttctttgtccccttgtcttacctgctgatggtgactgtcatcctcctcccctatgtcagcaaggtcaccggctggtgcagagacaggctcctgggccacagggagccctcggctcacccagtggaagtcttctcgtttgacctccacgagccactcagcaaggagcgcgtggaagcyttcagcgacggagtctacgccatcgtggccacgcttctcatcctggacatctgcgaagacaacgtcccggacccyaaggatgtgaaggagaggttcagcggcagcctcgtggccgccctgagygcgaccgggccgcgcttcctggcgtacttcggctccttcgccacagtgggactgctgtggttcgcccaccactcactcttcctgcatgtgcgcaaggccacgcgggccatggggctgctgaacacgctctcgctggccttcgtgggtggcctcccactagcctaccagcagacctcggccttcgcccggcagccccgcgatgagctggagcgcgtgcgtgtcagctgcaccatcatcttcctggccagcatcttccagctggccaygtggaccacggcgctgctgcaccaggcggagacgctgcagccctcggtgtggtttggcggccgggagcatgtgctcatgttcgccaagctggcgctgtacccctgtgccagcctgctggccttcgcctccacctgcctgctgagcaggttcagtgtgggcatcttccacctcatgcagatcgccgtgccctgcgccttcctgttgctgcgcctgctcgtgggcctggccctggccmccctgcgggtcctgcggggcctcgcccggcccgaacaccccccgccagcccccacgggccaggacgacccacagtcccagctcctccctgccccctgctagcagccacagagcccactcccagccgtcctcaccagagatggaccagggaggacaggatgctgggcaggggaagccaagtcacgggcaggccgcagtggttcttgcgtggcctggttttattttcrttgtgaaatatcatgctcttatttcagtcctcaaattgttctccactttttgcggagagaggagtttcacaggaactggaaatgtgctttatggcatttgcctatccactctctccaacctgaagacacgttgccaagctcacctacccgaggggcagcccactcccagcccctttgaggcctatacagagctggtggggtcgggggtgccaagccaggccctcccctcccctcggttgttgacacaaagatgaggaagagatggtaggatagtgacgcccagactgtatttgtcctggatataaattactgttgcattcaggcagcgataaatacagaggggcccggtgtgcagggcacagaccccacctgggtacagactcacatacaggacaagcccctcaccacagttacacacgattcatacagaccacagtccacaccagggctcgcgaagcaaaactaatcacaaaggactggtcttgaagatgacaatgacgtaaacaagagtgcacgctggaggccacaagcggccttacaatgcgtgtgtctgtgcagtttggcagatgcggggggtcgggggattagtggcatcaagggccccccaggaggctgcagcaggctgggccaggccacactcctgaggccaaaccagagccacttctgaggtcaaagccacacccaggaaagctccgcaggattggaggcccaggccagctgtgccccacaagggaagggggagatccgcaccgtgggaccgtttctcgtgggggagtcggggcttccccacagagcgggctccatttttggtcagactcctcccggggccagtgcaccatctgaatccttgggcacgtggaggcagctttgtctttggctgggtgcaccccagcctggcccagatgcaggaccct

SEQ ID NO: 6081 - DNA, 2428 bp, Homo sapiens
cggcgtcgccgggcttgcgatgaacttccggctgtcaagctcccggccgggctgactcaagcggaggcgcgcggaacagtcgccgaggcgattcccgcccagcmgttcgacagaagtgtacagaggcttctggcaacacggattgccgtctacctgatgacctttctcatcgtgacagtggcctgggcagcacacacaaggttgttccaagttgttgggaaaacagacgacacacttgccctgctcaacctgttttcgttaatggtgaccttccctgatgtgcctctgggcatcttcttgttctgtgtgtgtgtgatcgccatyggggtcgtgcaggcactgattgtggggtaygcattccacttcccgcacctgctgagcccgcagatccagcgctctgcccacagggctctgtaccgacgacacgtcctgggcatcgtcctccaaggcccggccctgtgctttgcagcggccatcttctctctcttctttgtccccttgtcttacctgctgatggtgactgtcatcctcctcccctatgtcagcaaggtcaccggctggtgcagagacaggctcctgggccacagggagccctcggctcacccagtggaagtcttctcgtttgacctccacgagccactcagcaaggagcgcgtggaagcyttcagcgacggagtctacgccatcgtggccacgcttctcatcctggacatctgcgaagacaacgtcccggacccyaaggatgtgaaggagaggttcagcggcagcctcgtggccgccctgagygcgaccgggccgcgcttcctggcgtacttcggctccttcgccacagtgggactgctgtggttcgcccaccactcactcttcctgcatgtgcgcaaggccacgcgggccatggggctgctgaacacgctctcgctggccttcgtgggtggcctcccactagcctaccagcagacctcggccttcgcccggcagccccgcgatgagctggagcgcgtgcgtgtcagctgcaccatcatcttcctggccagcatcttccagctggccaygtggaccacggcgctgctgcaccaggcggagacgctgcagccctcggtgtggtttggcggccgggagcatgtgctcatgttcgccaagctggcgctgtacccctgtgccagcctgctggccttcgcctccacctgcctgctgagcaggttcagtgtgggcatcttccacctcatgcagatcgccgtgccctgcgccttcctgttgctgcgcctgctcgtgggcctggccctggccmccctgcgggtcctgcggggcctcgcccggcccgaacaccccccgccagcccccacgggccaggacgacccacagtcccagctcctccctgccccctgctagcagccacagagcccactcccagccgtcctcaccagagatggaccagggaggacaggatgctgggcaggggaagccaagtcacgggcaggccgcagtggttcttgcgtggcctggttttattttcrttgtgaaatatcatgctcttatttcagtcctcaaattgttctccactttttgcggagagaggagtttcacaggaactggaaatgtgctttatggcatttgcctatccactctctccaacctgaagacacgttgccaagctcacctacccgaggggcagcccactcccagcccctttgaggcctatacagagctggtggggtcgggggtgccaagccaggccctcccctcccctcggttgttgacacaaagatgaggaagagatggtaggatagtgacgcccagactgtatttgtcctggatataaattactgttgcattcaggcagcgataaatacagaggggcccggtgtgcagggcacagaccccacctgggtacagactcacatacaggacaagcccctcaccacagttacacacgattcatacagaccacagtccacaccagggctcgcgaagcaaaactaatcacaaaggactggtcttgaagatgacaatgacgtaaacaagagtgcacgctggaggccacaagcggccttacaatgcgtgtgtctgtgcagtttggcagatgcggggggtcgggggattagtggcatcaagggccccccaggaggctgcagcaggctgggccaggccacactcctgaggccaaaccagagccacttctgaggtcaaagccacacccaggaaagctccgcaggattggaggcccaggccagctgtgccccacaagggaagggggagatccgcaccgtgggaccgtttctcgtgggggagtcggggcttccccacagagcgggctccatttttggtcagactcctcccggggccagtgcaccatctgaatccttgggcacgtggaggcagctttgtctttggctgggtgcaccccagcctggcccagatgcaggaccct

SEQ ID NO: 6082 - DNA, 3411 bp, Homo sapiens
cgcgcgcaggcgcggaggtctgacggagacagcgcgtgcgcggcgtcgccgggcttgcgatgaacttccggctgtcaagctcccggccgggctgactcaagcggaggcgcgcggaacagtcgccgaggcgattcccgcccaggctcctgtaaccgccaggcagyggccccgccatgtcccagccccggaccccagarcaggcactggatacaccgggggactgccccccaggcaggagagacgaggacgctggggaggggatccagtgctcccaacgcatgctcagcttcagtgaygccctgctgtccatcatcgccaccgtcatggtctgtacggggcccctgcttaggcctgccccaccccgagcctctcgaggcactgcccrgcccacctcagacctgtctaggtcttgccagcatccttgggtcccccagctcctcaggcagcttaggggggcccagcactgccctcgagtccccagtactgccacacccaatccaacaagcgtctcttgctctcctgcttccttctgtctctttgccccctcagatcctgcctgtgacccacacrgagatctccccagaacaggtaacggggcaggctgtgctctgcgtggtgtggccctgcgaagatatagggtccccgaggctcracctggcacagggtgctgaccctgcacgcctcgaagcttctgaggcttaggaggcagaggcgggaggcgggggcctccttggaaagggagggagccaacaagtcctgctcagcctgtgctcaccccggcggaggtcctggcctcctgggagggtgggagactgggctcctagggctctgtttccgagttcagtggacaaaggcagcaccctggaagtgagccagaggacaggttggaagaggaaggttccgggcctgccccaaggacagaagtttcctctgcgggagggcagctgccccagcaggcaggccccttacgtagctgctctgagtaaacgcggccagcgccccgtctcagcggggacactcccaccccggctgctcctgcaggcctggagcmgttcgacagaagtgtacagaggcttctggcaacacggattgccgtctacctgatgacctttctcatcgtgacagtggcctgggcagcacacacaaggttgttccaagttgttgggaaaacagacgacacacttgccctgctcaacctggcctgcatgatgaccatcaccttcctgccttacacgttttcgttaatggtgaccttccctgatgtgcctctgggcatcttcttgttctgtgtgtgtgtgatcgccatyggggtcgtgcaggcactgattgtggggtaygcattccacttcccgcacctgctgagcccgcagatccagcgctctgcccacagggctctgtaccgacgacacgtcctgggcatcgtcctccaaggcccggccctgtgctttgcagcggccatcttctctctcttctttgtccccttgtcttacctgctgatggtgactgtcatcctcctcccctatgtcagcaaggtcaccggctggtgcagagacaggctcctgggccacagggagccctcggctcacccagtggaagtcttctcgtttgacctccacgagccactcagcaaggagcgcgtggaagcyttcagcgacggagtctacgccatcgtggccacgcttctcatcctggacatctgcgaagacaacgtcccggacccyaaggatgtgaaggagaggttcagcggcagcctcgtggccgccctgagygcgaccgggccgcgcttcctggcgtacttcggctccttcgccacagtgggactgctgtggttcgcccaccactcactcttcctgcatgtgcgcaaggccacgcgggccatggggctgctgaacacgctctcgctggccttcgtgggtggcctcccactagcctaccagcagacctcggccttcgcccggcagccccgcgatgagctggagcgcgtgcgtgtcagctgcaccatcatcttcctggccagcatcttccagctggccaygtggaccacggcgctgctgcaccaggcggagacgctgcagccctcggtgtggtttggcggccgggagcatgtgctcatgttcgccaagctggcgctgtacccctgtgccagcctgctggccttcgcctccacctgcctgctgagcaggttcagtgtgggcatcttccacctcatgcagatcgccgtgccctgcgccttcctgttgctgcgcctgctcgtgggcctggccctggccmccctgcgggtcctgcggggcctcgcccggcccgaacaccccccgccagcccccacgggccaggacgacccacagtcccagctcctccctgccccctgctagcagccacagagcccactcccagccgtcctcaccagagatggaccagggaggacaggatgctgggcaggggaagccaagtcacgggcaggccgcagtggttcttgcgtggcctggttttattttcrttgtgaaatatcatgctcttatttcagtcctcaaattgttctccactttttgcggagagaggagtttcacaggaactggaaatgtgctttatggcatttgcctatccactctctccaacctgaagacacgttgccaagctcacctacccgaggggcagcccactcccagcccctttgaggcctatacagagctggtggggtcgggggtgccaagccaggccctcccctcccctcggttgttgacacaaagatgaggaagagatggtaggatagtgacgcccagactgtatttgtcctggatataaattactgttgcattcaggcagcgataaatacagaggggcccggtgtgcagggcacagaccccacctgggtacagactcacatacaggacaagcccctcaccacagttacacacgattcatacagaccacagtccacaccagggctcgcgaagcaaaactaatcacaaaggactggtcttgaagatgacaatgacgtaaacaagagtgcacgctggaggccacaagcggccttacaatgcgtgtgtctgtgcagtttggcagatgcggggggtcgggggattagtggcatcaagggccccccaggaggctgcagcaggctgggccaggccacactcctgaggccaaaccagagccacttctgaggtcaaagccacacccaggaaagctccgcaggattggaggcccaggccagctgtgccccacaagggaagggggagatccgcaccgtgggaccgtttctcgtgggggagtcggggcttccccacagagcgggctccatttttggtcagactcctcccggggccagtgcaccatctgaatccttgggcacgtggaggcagctttgtctttggctgggtgcaccccagcctggcccagatgcaggaccct

SEQ ID NO: 6083 - DNA, 2727 bp, Homo sapiens
cgcgcgcaggcgcggaggtctgacggagacagcgcgtgcgcggcgtcgccgggcttgcgatgaacttccggctgtcaagctcccggccgggctgactcaagcggaggcgcgcggaacagtcgccgaggcgattcccgcccaggctcctgtaaccgccaggcagyggccccgccatgtcccagccccggaccccagarcaggcactggatacaccgggggactgccccccaggcaggagagacgaggacgctggggaggggatccagtgctcccaacgcatgctcagcttcagtgaygccctgctgtccatcatcgccaccgtcatgatcctgcctgtgacccacacrgagatctccccagaacagcmgttcgacagaagtgtacagaggcttctggcaacacggattgccgtctacctgatgacctttctcatcgtgacagtggcctgggcagcacacacaaggttgttccaagttgttgggaaaacagacgacacacttgccctgctcaacctggcctgcatgatgaccatcaccttcctgccttacacgttttcgttaatggtgaccttccctgatgtgcctctgggcatcttcttgttctgtgtgtgtgtgatcgccatyggggtcgtgcaggcactgattgtggggtaygcattccacttcccgcacctgctgagcccgcagatccagcgctctgcccacagggctctgtaccgacgacacgtcctgggcatcgtcctccaaggcccggccctgtgctttgcagcggccatcttctctctcttctttgtccccttgtcttacctgctgatggtgactgtcatcctcctcccctatgtcagcaaggtcaccggctggtgcagagacaggctcctgggccacagggagccctcggctcacccagtggaagtcttctcgtttgacctccacgagccactcagcaaggagcgcgtggaagcyttcagcgacggagtctacgccatcgtggccacgcttctcatcctggacatctgcgaagacaacgtcccggacccyaaggatgtgaaggagaggttcagcggcagcctcgtggccgccctgagygcgaccgggccgcgcttcctggcgtacttcggctccttcgccacagtgggactgctgtggttcgcccaccactcactcttcctgcatgtgcgcaaggccacgcgggccatggggctgctgaacacgctctcgctggccttcgtgggtggcctcccactagcctaccagcagacctcggccttcgcccggcagccccgcgatgagctggagcgcgtgcgtgtcagctgcaccatcatcttcctggccagcatcttccagctggccaygtggaccacggcgctgctgcaccaggcggagacgctgcagccctcggtgtggtttggcggccgggagcatgtgctcatgttcgccaagctggcgctgtacccctgtgccagcctgctggccttcgcctccacctgcctgctgagcaggttcagtgtgggcatcttccacctcatgcagatcgccgtgccctgcgccttcctgttgctgcgcctgctcgtgggcctggccctggccmccctgcgggtcctgcggggcctcgcccggcccgaacaccccccgccagcccccacgggccaggacgacccacagtcccagctcctccctgccccctgctagcagccacagagcccactcccagccgtcctcaccagagatggaccagggaggacaggatgctgggcaggggaagccaagtcacgggcaggccgcagtggttcttgcgtggcctggttttattttcrttgtgaaatatcatgctcttatttcagtcctcaaattgttctccactttttgcggagagaggagtttcacaggaactggaaatgtgctttatggcatttgcctatccactctctccaacctgaagacacgttgccaagctcacctacccgaggggcagcccactcccagcccctttgaggcctatacagagctggtggggtcgggggtgccaagccaggccctcccctcccctcggttgttgacacaaagatgaggaagagatggtaggatagtgacgcccagactgtatttgtcctggatataaattactgttgcattcaggcagcgataaatacagaggggcccggtgtgcagggcacagaccccacctgggtacagactcacatacaggacaagcccctcaccacagttacacacgattcatacagaccacagtccacaccagggctcgcgaagcaaaactaatcacaaaggactggtcttgaagatgacaatgacgtaaacaagagtgcacgctggaggccacaagcggccttacaatgcgtgtgtctgtgcagtttggcagatgcggggggtcgggggattagtggcatcaagggccccccaggaggctgcagcaggctgggccaggccacactcctgaggccaaaccagagccacttctgaggtcaaagccacacccaggaaagctccgcaggattggaggcccaggccagctgtgccccacaagggaagggggagatccgcaccgtgggaccgtttctcgtgggggagtcggggcttccccacagagcgggctccatttttggtcagactcctcccggggccagtgcaccatctgaatccttgggcacgtggaggcagctttgtctttggctgggtgcaccccagcctggcccagatgcaggaccct

SEQ ID NO: 6084 - DNA, 3224 bp, Homo sapiens
cgcgcgcaggcgcggaggtctgacggagacagcgcgtgcgcggcgtcgccgggcttgcgatgaacttccggctgtcaagctcccggccgggctgactcaagcggaggcgcgcggaacagtcgccgaggcgattcccgcccaggctcctgtaaccgccaggcagyggccccgccatgtcccagccccggaccccagarcaggcactggatacaccgggggactgccccccaggcaggagagacgaggacgctggggaggggatccagtgctcccaacgcatgctcagcttcagtgaygccctgctgtccatcatcgccaccgtcatgatcctgcctgtgacccacacrgagatctccccagaacaggtaacggggcaggctgtgctctgcgtggtgtggccctgcgaagatatagggtccccgaggctcracctggcacagggtgctgaccctgcacgcctcgaagcttctgaggcttaggaggcagaggcgggaggcgggggcctccttggaaagggagggagccaacaagtcctgctcagcctgtgctcaccccggcggaggtcctggcctcctgggagggtgggagactgggctcctagggctctgtttccgagttcagtggacaaaggcagcaccctggaagtgagccagaggacaggttggaagaggaaggttccgggcctgccccaaggacagaagtttcctctgcgggagggcagctgccccagcaggcaggccccttacgtagctgctctgagtaaacgcggccagcgccccgtctcagcggggacactcccaccccggctgctcctgcaggcctggagcmgttcgacagaagtgtacagaggcttctggcaacacggattgccgtctacctgatgacctttctcatcgtgacagtggcctgggcagcacacacaaggttgttccaagttgttgggaaaacagacgacacacttgccctgctcaacctggccgcatcatggctgtgatgccctccctccctccaggcctgcatgatgaccatcaccttcctgccttacacgttttcgttaatggtgaccttccctgatgtgcctctgggcatcttcttgttctgtgtgtgtgtgatcgccatyggggtcgtgcaggcactgattgtggggtaygcattccacttcccgcacctgctgagcccgcagatccagcgctctgcccacagggctctgtaccgacgacacgtcctgggcatcgtcctccaaggcccggccctgtgctttgcagcggccatcttctctctcttctttgtccccttgtcttacctgctgatggtgactgtcatcctcctcccctatgtcagcaaggtcaccggctggtgcagagacaggctcctgggccacagggagccctcggctcacccagtggaagtcttctcgtttgacctccacgagccactcagcaaggagcgcgtggaagcyttcagcgacggagtctacgccatcgtggccacgcttctcatcctggacatctgcgaagacaacgtcccggacccyaaggatgtgaaggagaggttcagcggcagcctcgtggccgccctgagygcgaccgggccgcgcttcctggcgtacttcggctccttcgccacagtgggactgctgtggttcgcccaccactcactcttcctgcatgtgcgcaaggccacgcgggccatggggctgctgaacacgctctcgctggccttcgtgggtggcctcccactagcctaccagcagacctcggccttcgcccggcagccccgcgatgagctggagcgcgtgcgtgtcagctgcaccatcatcttcctggccagcatcttccagctggccaygtggaccacggcgctgctgcaccaggcggagacgctgcagccctcggtgtggtttggcggccgggagcatgtgctcatgttcgccaagctggcgctgtacccctgtgccagcctgctggccttcgcctccacctgcctgctgagcaggttcagtgtgggcatcttccacctcatgcagatcgccgtgccctgcgccttcctgttgctgcgcctgctcgtgggcctggccctggccmccctgcgggtcctgcggggcctcgcccggcccgaacaccccccgccagcccccacgggccaggacgacccacagtcccagctcctccctgccccctgctagcagccacagagcccactcccagccgtcctcaccagagatggaccagggaggacaggatgctgggcaggggaagccaagtcacgggcaggccgcagtggttcttgcgtggcctggttttattttcrttgtgaaatatcatgctcttatttcagtcctcaaattgttctccactttttgcggagagaggagtttcacaggaactggaaatgtgctttatggcatttgcctatccactctctccaacctgaagacacgttgccaagctcacctacccgaggggcagcccactcccagcccctttgaggcctatacagagctggtggggtcgggggtgccaagccaggccctcccctcccctcggttgttgacacaaagatgaggaagagatggtaggatagtgacgcccagactgtatttgtcctggatataaattactgttgcattcaggcagcgataaatacagaggggcccggtgtgcagggcacagaccccacctgggtacagactcacatacaggacaagcccctcaccacagttacacacgattcatacagaccacagtccacaccagggctcgcgaagcaaaactaatcacaaaggactggtcttgaagatgacaatgacgtaaacaagagtgcacgctggaggccacaagcggccttacaatgcgtgtgtctgtgcagtttggcagatgcggggggtcgggggattagtggcatcaagggccccccaggaggctgcagcaggctgggccaggccacactcctgaggccaaaccagagccacttctgaggtcaaagccacacccaggaaagctccgcaggattggaggcccaggccagctgtgccccacaagggaagggggagatccgcaccgtgggaccgtttctcgtgggggagtcggggcttccccacagagcgggctccatttttggtcagactcctcccggggccagtgcaccatctgaatccttgggcacgtggaggcagctttgtctttggctgggtgcaccccagcctggcccagatgcaggaccct

SEQ ID NO: 6085 - DNA, 3245 bp, Homo sapiens
cgggaggcggagcctagggaagcaaattctcctggcggcctccgttcagacgcggcagctgtgacccacctgcctcctccgcagagcaatggcggtgtctgccgggtccgcgcggacctcgcccagctcagataaagtacagaaagacaaggctgaactgatctcagggcccaggcaggacagccgaatagggaaactcttgggttttgagtggacagatttgtccagttggcggaggctggtgacmctgctgaatcgaccaacggaccctgcaagcttagctgtctttcgttttctttttgggttcttgatggtgctagacattccccaggagcgggggctcagctctctggaccggaaataccttgatgggctggatgtgtgccgcttccccttgctggatgccctacgcccactgccacttgaytggatgtatcttgtctacaccatcatgtttctgggggcactgggcatgatgctgggcctgtgctaccggataagctgtgtgttattcctgctgccatactggtatgtgtttctcctggacaagacatcatggaacaaccactcctatctgtatgggttgttggcctttcagctaacattcatggatgcaaaccactactggtctgtggacggtctgctgaatgcccataggaggaatgcccacgtgcccctttggaactatgcagtgctccgtggccagatcttcattgtgtacttcattgcgggtgtgaaaaagctggatgcagactgggttgaaggctattccatggaatatttgtcccggcactggctcttcagtcccttcaaactgctgttgtctgaggagctgactagcctgctggtcgtgcactggggtgggctgctgcttgacctctcagctggtttcctgctcttttttgatgtctcaagatccattggmctgttctttgtgtcctacttccactgcatgaattcccagcttttcagcattggtatgttctcctacgtcatgctggccagcagccctctcttctgctcccctgagtggcctcggaagctggtgtcctactgcccccraaggttgcaacaactgttgcccctcaaggcagcccctcagcccagtgtttcctgtgtgtataagaggagccggggcaaaagtggccagaagccagggctgcgccatcagctgggagctgccttcaccctgctctacctcctggagcagctattcctgccctattctcattttctcacccagggctataacaactggacaaatgggctgtatggctattcctgggacatgatggtgcactcccgytcccaccagcacgtgaagatcacytaccgtgatggccgcactggcgaactgggctaccttaaccctggggtatttacacagagtcggcgatggaaggatcatgcagacatgctgaagcaatatgccacttgcctgagccgcctgcttcccaagtataatgtcactgagccccagatctactttgatatttgggtctccatcaatgaccgcttccagcagaggatttttgaccctcgtgtggacatcgtgcaggccgcttggtcaccctttcagcgcacatcctsggtgcaaccactcttgatggacctgtctccctggagggccaagttacaggaaatcaagagcagcctagacaaccacactgaggtggtcttcattgcagatttccctggactgcacttggagaattttgtgagtgaagacctgggcaacactagcatccagctgctgcagggggaagtgactgtggagcttgtggcagaacagaagaaccagactcttcgagagggagaaaaaatgcagttgcctgctggtgagtaccataaggtgtatacgacatcacctagcccttcttgctacatgtacgtctatgtcaacactacagagcttgcactggagcaagacctggcatatctgcaagaattaaaggaaaaggtggagaatggaagtgaaacagggcctctacccmcagagctgcagcctctgttggaaggggaagtaaaagggggccctgagccaacacctctggttcagacctttcttagacgccaacaaaggctccaggagattgaacgccggcgaaatactcctttccatgagcgattcttccgcttcttgttgcgaaagctctatgtctttcgccgcagcttcctgatgacttgtatctcacttcgaaatctgatattaggccgtccttccctggagcagctggcccaggaggtgacttatgcaaacttgagaccctttgaggcagttggagaactgaatccctcaaacacggattcttcacattctaatcctcctgagtcaaatcctgatcctgtccactcagagttctgaagggggccagatgttgggtgcagatgtagaagcagccagtcacagacccattctatgcaatggacatttatttgaaaaaaattctcaaaagttttttttttttttttgggggggcggggttctaaagctgtttttaactccgagattacaacttagaggaaccaaggaaataaagcaaataagatttaacaacccaagattaagaggccaggaagaggttagacgcaatgtgaaactgtcctcctaggataaggtttaaagtggctttttgggggctgggtgccgtggctcacgcctgtaatcccagcattttgggaggctgaggtgggcagatcacttgaggccaggagttcgagaccagcctggccaacatggcaaaaccccttctctactaaaaatacaaaaattagccagacgtggtggtgggtgcctgtaatccaactacccaggaggctgaggcatgagaatcgcttgggcccaggaggtggaggttgcagtgagccgagatcgagccactgcactcctgggcaacagagcaagacttcgtctcaaaawaaataaataaagtggctcttggggaaaagcaatttaatgtaccacgatgaatagctaactgttcccaagtgtttgctatgtgcaacacaccgcgtgagcagtgttacctgcattattacattaggctgagaggtaaaataatttgcccgaagacatacagctagtgacgaatggactgatggtttgaacttaacgtctatttgacttaaggtcctgcaccctgccacttgtaattttcagaatcactgataatctgaaataatgcagcttaaaacatgttttcttaattaaaagtataattggatggtggtcaggttgtaaatgc

SEQ ID NO: 6086 - DNA, 652 bp, Homo sapiens
cgggaggcggagcctagggaagcaaattctcctggcggcctccgttcagacgcggcagctgtgacccacctgcctcctccgcagagcaatggcggtgtctgccgggtccgcgcggacctcgcccagctcagataaagtacagaaagacaaggctgaactgatctcagggcccaggcaggacagccgaatagggaaactcttgggttttgagtggacagatttgtccagttggcggaggctggtgacmctgctgaatcgaccaacggaccctgcaagcttagctgtctttcgttttctttttgggttcttgatggtgctagacattccccaggagcgggggctcagctctctggaccggaaataccttgatgggctggatgtgtgccgcttccccttgctggatgccctacgcccactgccacttgaytggatgtatcttgtctacaccatcatgtttctgggtgaggggaactgtgggaaatattgactggcctgccagaaacacagaaatagaagcatgctggtgaatggtcaaagtctttggcaccttatttcacttctgctgtgatcaatttcatgctgttgacctgtgtgtcacttaagctgtgatcccataattctttttaaaatattaaaataacatttaattttc

SEQ ID NO: 6087 - DNA, 3482 bp, Homo sapiens
gcggccgcgcagtgtggttcagcccggactccgcggggcgagctgcccttcctcccccgacccccgcgcaagtggtgcattggcgcgcggcgccgaggggcggggcccgagccgggcgcgcgcgggcgctgctctataaataccgggccgcaccgccsgctgcttcgttcgctccgcgccgcccgcctgctacgagtagaacgctgtccgcagcttgcgcatttcgcagccgctgccgcctcgccgctgctccttcgtaaggccacttccgcacaccgacaccaacatgaacggacagctcaacggcttccacgaggcgttcatcgaggagggcacattccttttcacctcagagtcggtcggggaaggccacccagataagatttgtgaccaaatcagtgatgctgtccttgatgcccaccttcagcaggatcctgatgccaaagtagcttgtgaaactgttgctaaaactggaatgatccttcttgctggggaaattacatccagagctgctgttgactaccagaaagtggttcgtgaagctgttaaacacattggatatgatgattcttccaaaggttttgactacaagacttgtaacgtgctggtagccttggagcaacagtcaccagatattgctcaaggtgttcatcttgacagaaatgaagaagacattggtgctggagaccagggcttaatgtttggctatgccactgatgaaactgaggagtgtatgcctttaaccattgtcttggcacacaagctaaatgccaaactggcagaactacgccgtaatggcactttgccttggttacgccctgattctaaaactcaagttactgtgcagtatatgcaggatcgaggtgctgtgcttcccatcagagtccacacaattgttatatctgttcagcatgatgaagaggtttgtcttgatgaaatgagggatgccctaaaggagaaagtcatcaaagcagttgtgcctgcgaaataccttgatgaggatacaatctaccacctacagccaagtggcagatttgttattggtgggcctcagggtgatgctggtttgactggacgsaaaatcattgtggacacttatggcggttggggtgctcatggaggaggtgccttttcaggaaaggattataccaaggtcgaccgttcagctgcttatgctgctcgttgggtggcaaaatcccttgttaaaggaggtctgtgccggagggttcttgttcaggtctcttatgctattggagtttctcatccattatctatctccattttccattatggtacctctcagaagagtgagagagagctattagagattgtgaagaagaatttcgatctccgccctggggtcattgtcagggatctggatctgaagaagccaatttatcagaggactgcagcctatggccactttggtagggacagcttcccatgggaagtgcccaaaaagcttaaatattgaaagtgttagccttttttccccagacttgttggcgtaggctacagagaagccttcaagctctgagggaaagggccctccttcctaaattttcctgtcctctttcagctcctgaccagttgcagtcactctagtcaatgacatgaattttagcttttgtgggggactgtaagttgggcttgctattctgtccctaggtgttttgttcaccattataatgaatttagtgagcataggtgatccatgtaactgcctagaaacaacactgtagtaaataatgctttgaaattgaacctttgtgccctatcacccaacgctccaaagtcataattgcattgactttccccaccagatgctgaaaatgtccttgtgatgtgcacgtaaagtacttgtagttccacttatagcctctgtctggcaatgccacagccctgtcagcatgaatttgtaatgtcttgagctctattatgaatgtgaagccttccccttatcctccctgtaacttgatccatttctaattatgtagctctttgtcagggagtgttccctatccaatcaatcttgcatgtaacgcaagttcccagttggagctccagcctgacatcaaaaaaggcagttaccattaaaccatctccctggtgcttatgctcttaattgccacctctaacagcaccaaatcaaaatctctccacttycagctgtcttttggaggacgtacgtaataaggttttaatttagtaaaccaatcctatgcatggtttcagcactagccaaacctcaccaactcctagttctagaaaaacaggcacttggcagccttgtgatgtcatacagagaagtcacagggcagtacctgagggtctgtaggttgcacactttggtaccagataacttttttttttctttataagaaagcctgagtactccacactgcacaataactcctcccagggttttaactttgttttattttcaaaaccaggtccaatgagctttctgaacagctggtgtagctacagagaaaccagcttccttcagagagcagtgcttttggcggggaggaggaaatcccttcatacttgaacgttttctaattgcttatttattgtattctggggtatggcgtaagtacagagaagccatcacctcagatggcagcttttaaaagattttttttttttctctcaacaccatgattcctttaacaacatgtttccagcattcccaggtaggccaaggtgtcctacagraaaaccttgggttagacctacagggggtctggctggtgttaacagaagggagggcrgagctggtgcggctggccatggagaaagctgacttggctggtgtggtacagaraagccagcttgtttacatgcttattccatgactgcttgccctaagcagaaagtgcctttcaggatctatttttggaggtttattacgtatgtctggttctcaattccaacagtttaatgaagatctaaataaaatgctaggttctaccttaactgtgtctgttactcatttgttaaagtgcyttggggccataggtacgtgcctataatcccaacactttgaaaggctgaggtaggaggatcactttaacatagaagttggaggctgtagcgaaccattatcaagccactgcactccagcctgggtgactgagactttggctcttaaaaaatgctatcatatgaataacctgagaatactatatgtgtatctttaaccttgaattgtaatccataattagccataattcaggaaaataacctcaatccctagacccagtgggtgggcattttttaaaagcctaagcaagatttagtcctcctagtccacttaagccaaaattcatgtgtccttattgcagcagccattcaatgccatttttaagttttcaactaaggttgagggcttcaaaccattgaaggcataaaaaccgctaaaagtattaacctggaagtggtaatgtctatctaaagtcctggcaatttaagcctat

SEQ ID NO: 6088 - DNA, 2360 bp, Homo sapiens
gcggccgcgcagtgtggttcagcccggactccgcggggcgagctgcccttcctcccccgacccccgcgcaagtggtgcattggcgcgcggcgccgaggggcggggcccgagccgggcgcgcgcgggcgctgctctataaataccgggccgcaccgccsgctgcttcgttcgctccgcgccgcccgcctgctacgagtagaacgctgtccgcagcttgcgcatttcgcagccgctgccgcctcgccgctgctccttcgtaaggccacttccgcacaccgacaccaacatgaacggacagctcaacggcttccacgaggcgttcatcgaggagggcacattccttttcacctcagagtcggtcggggaaggccacccagataagatttgtgaccaaatcagtgatgctgtccttgatgcccaccttcagcaggatcctgatgccaaagtagcttgtgaaactgttgctaaaactggaatgatccttcttgctggggaaattacatccagagctgctgttgactaccagaaagtggttcgtgaagctgttaaacacattggatatgatgattcttccaaaggttttgactacaagacttgtaacgtgctggtagccttggagcaacagtcaccagatattgctcaaggtgttcatcttgacagaaatgaagaagacattggtgctggagaccagggcttaatgtttggctatgccactgatgaaactgaggagtgtatgcctttaaccattgtcttggcacacaagctaaatgccaaactggcagaactacgccgtaatggcactttgccttggttacgccctgattctaaaactcaagttactgtgcagtatatgcaggatcgaggtgctgtgcttcccatcagagtccacacaattgttatatctgttcagcatgatgaagaggtttgtcttgatgaaatgagggatgccctaaaggagaaagtcatcaaagcagttgtgcctgcgaaataccttgatgaggatacaatctaccacctacagccaagtggcagatttgttattggtgggcctcagggtgatgctggtttgactggacgsaaaatcattgtggacacttatggcggttggggtgctcatggaggaggtgccttttcaggaaaggattataccaaggtcgaccgttcagctgcttatgctgctcgttgggtggcaaaatcccttgttaaaggaggtctgtgccggagggttcttgttcaggtctcttatgctattggagtttctcatccattatctatctccattttccattatggtacctctcagaagagtgagagagagctattagagattgtgaagaagaatttcgatctccgccctggggtcattgtcagggatctggatctgaagaagccaatttatcagaggactgcagcctatggccactttggtagggacagcttcccatgggaagtgcccaaaaagcttaaatattgaaagtgttagccttttttccccagacttgttggcgtaggctacagagaagccttcaagctctgagggaaagggccctccttcctaaattttcctgtcctctttcagctcctgaccagttgcagtcactctagtcaatgacatgaattttagcttttgtgggggactgtaagttgggcttgctattctgtccctaggtgttttgttcaccattataatgaatttagtgagcataggtgatccatgtaactgcctagaaacaacactgtagtaaataatgctttgaaattgaacctttgtgccctatcacccaacgctccaaagtcataattgcattgactttccccaccagatgctgaaaatgtccttgtgatgtgcacgtaaagtacttgtagttccacttatagcctctgtctggcaatgccacagccctgtcagcatgaatttgtaatgtcttgagctctattatgaatgtgaagccttccccttatcctccctgtaacttgatccatttctaattatgtagctctttgtcagggagtgttccctatccaatcaatcttgcatgtaacgcaagttcccagttggagctccagcctgacatcaaaaaaggcagttaccattaaaccatctccctggtgcttatgctcttaattgccacctctaacagcaccaaatcaaaatctctccacttycagctgtcttttggaggacgtacgtaataaggttttaatttagtaaaccaatcctatgcatggtttcagcactagccaaacctcaccaactcctagttctatacctgagggtctgtaggttgcacactttggtaccagataacttttttttttctttataagaaagcctgagtactccacactgcacaataact

SEQ ID NO: 6089 - DNA, 4726 bp, Homo sapiens
gcggccgcgcagtgtggttcagcccggactccgcggggcgagctgcccttcctcccccgacccccgcgcaagtggtgcattggcgcgcggcgccgaggggcggggcccgagccgggcgcgcgcgggcgctgctctataaataccgggccgcaccgccsgctgcttcgttcgctccgcgccgcccgcctgctacgagtagaacgctgtccgcagcttgcgcatttcgcagccgctgccgcctcgccgctgctccttcgtaaggccacttccgcacaccgacaccaacatgaacggacagctcaacggcttccacgaggcgttcatcgaggagggcacattccttttcacctcagagtcggtcggggaaggccacccagataagatttgtgaccaaatcagtgatgctgtccttgatgcccaccttcagcaggatcctgatgccaaagtagcttgtgaaactgttgctaaaactggaatgatccttcttgctggggaaattacatccagagctgctgttgactaccagaaagtggttcgtgaagctgttaaacacattggatatgatgattcttccaaaggttttgactacaagacttgtaacgtgctggtagccttggagcaacagtcaccagatattgctcaaggtgttcatcttgacagaaatgaagaagacattggtgctggagaccaggtatcttggtgtagaggctgttttaatctctyctaacattaaattctggagcttgatcacattggtgacttttctttctttagggcttaatgtttggctatgccactgatgaaactgaggagtgtatgcctttaaccattgtcttggcacacaagctaaatgccaaactggcagaactacgccgtaatggcactttgccttggttacgccctgattctaaaactcaagtaagtgatgatcataaagcttggttgtctcatttattacatcagcacagaagatccataattttgataatagctaactggaaaaaatagcatttgttttcctatattgtaacttcaggtagagaaacaaatacaaagttattgtttggtrtgatgttctgatgacctgtgttgccttcaaggttactgtgcagtatatgcaggatcgaggtgctgtgcttcccatcagagtccacacaattgttatatctgttcagcatgatgaagaggtttgtcttgatgaaatgagggatgccctaaaggagaaagtcatcaaagcagttgtgcctgcgaaataccttgatgaggatacaatctaccacctacagccaagtggcagatttgttattggtgggcctcaggtaatgtcattttgttgcatttttctggatttttgatggttacttaaaattttggctactacatttttttcaggctttctgaaacctacatgtgaatcatcggaggatatttgctgaatgaattcagaataggcaacctaatccacttggaaagcactaggcgtaaagtaacttaaatcctgtaatttcagggtgatgctggtttgactggacgsaaaatcattgtggacacttatggcggttggggtgctcatggaggaggtgccttttcaggaaaggattataccaaggtcgaccgttcagctgcttatgctgctcgttgggtggcaaaatcccttgttaaaggaggtctgtgccggagggttcttgttcaggtatacactctttatataacgaacgattaaaagtcatgtaagtgggagggtatttagtagtaatctacttaactacttgttttataccaacgtattatacaagtrtatgggtctttgcaatcactgattcttacracatttgaatccttttaggtctcttatgctattggagtttctcatccattatctatctccattttccattatggtacctctcagaagagtgagagagagctattagagattgtgaagaagaatttcgatctccgccctggggtcattgtcaggtaaagatggtaaagcctgttgctagtcaagtattgagggtgttgggtgtgtgtgtatatacttaaggctgaggaggtgaaggtgtgaaggaagactcctcaaatgggaatatattttaattcctggaacagttttgaactgctgccttagtgaagacttagttatttgagaaatttaaaattacggtgctccatggcttaggctaaccactctagagaatgttccagatttgatatttgagctttgtgctcttctacttaagggtgttaagaaaatagagataaagtgggttgctcaaggtttgttgcaatgtaaaaaccatggtagggtgtgggcggcgggaccttggtaagtattgtgtgatctcaggtgagctttttgacaattgaaatttctcagaataatgacaagttttcgtatttgttgagccagggacggaaaaacaactatagttactaataaggactgtgcaaggagtttggacaccagggaagtaacacttttgccacaaatttttttcctagcatatcccagagaactcatttgccagagctcttgaaaatgagtcttgctgattgttttgctttattttaatttaatgctacatattaagttacggacttgtatattccagggatctggatctgaagaagccaatttatcagaggactgcagcctatggccactttggtagggacagcttcccatgggaagtgcccaaaaagcttaaatattgaaagtgttagccttttttccccagacttgttggcgtaggctacagagaagccttcaagctctgagggaaagggccctccttcctaaattttcctgtcctctttcagctcctgaccagttgcagtcactctagtcaatgacatgaattttagcttttgtgggggactgtaagttgggcttgctattctgtccctaggtgttttgttcaccattataatgaatttagtgagcataggtgatccatgtaactgcctagaaacaacactgtagtaaataatgctttgaaattgaacctttgtgccctatcacccaacgctccaaagtcataattgcattgactttccccaccagatgctgaaaatgtccttgtgatgtgcacgtaaagtacttgtagttccacttatagcctctgtctggcaatgccacagccctgtcagcatgaatttgtaatgtcttgagctctattatgaatgtgaagccttccccttatcctccctgtaacttgatccatttctaattatgtagctctttgtcagggagtgttccctatccaatcaatcttgcatgtaacgcaagttcccagttggagctccagcctgacatcaaaaaaggcagttaccattaaaccatctccctggtgcttatgctcttaattgccacctctaacagcaccaaatcaaaatctctccacttycagctgtcttttggaggacgtacgtaataaggttttaatttagtaaaccaatcctatgcatggtttcagcactagccaaacctcaccaactcctagttctagaaaaacaggcacttggcagccttgtgatgtcatacagagaagtcacagggcagtacctgagggtctgtaggttgcacactttggtaccagataacttttttttttctttataagaaagcctgagtactccacactgcacaataactcctcccagggttttaactttgttttattttcaaaaccaggtccaatgagctttctgaacagctggtgtagctacagagaaaccagcttccttcagagagcagtgcttttggcggggaggaggaaatcccttcatacttgaacgttttctaattgcttatttattgtattctggggtatggcgtaagtacagagaagccatcacctcagatggcagcttttaaaagattttttttttttctctcaacaccatgattcctttaacaacatgtttccagcattcccaggtaggccaaggtgtcctacagraaaaccttgggttagacctacagggggtctggctggtgttaacagaagggagggcrgagctggtgcggctggccatggagaaagctgacttggctggtgtggtacagaraagccagcttgtttacatgcttattccatgactgcttgccctaagcagaaagtgcctttcaggatctatttttggaggtttattacgtatgtctggttctcaattccaacagtttaatgaagatctaaataaaatgctaggttctaccttaactgtgtctgttactcatttgttaaagtgcyttggggccataggtacgtgcctataatcccaacactttgaaaggctgaggtaggaggatcactttaacatagaagttggaggctgtagcgaaccattatcaagccactgcactccagcctgggtgactgagactttggctcttaaaaaatgctatcatatgaataacctgagaatactatatgtgtatctttaaccttgaattgtaatccataattagccataattcaggaaaataacctcaatccctagacccagtgggtgggcattttttaaaagcctaagcaagatttagtcctcctagtccacttaagccaaaattcatgtgtccttattgcagcagccattcaatgccatttttaagttttcaactaaggttgagggcttcaaaccattgaaggcataaaaaccgctaaaagtattaacctggaagtggtaatgtctatctaaagtcctggcaatttaagcctat

SEQ ID NO: 6090 - DNA, 3615 bp, Homo sapiens
gcggccgcgcagtgtggttcagcccggactccgcggggcgagctgcccttcctcccccgacccccgcgcaagtggtgcattggcgcgcggcgccgaggggcggggcccgagccgggcgcgcgcgggcgctgctctataaataccgggccgcaccgccsgctgcttcgttcgctccgcgccgcccgcctgctacgagtagaacgctgtccgcagcttgcgcatttcgcagccgctgccgcctcgccgctgctccttcgtaaggccacttccgcacaccgacaccaacatgaacggacagctcaacggcttccacgaggcgttcatcgaggagggcacattccttttcacctcagagtcggtcggggaaggccacccagataagatttgtgaccaaatcagtgatgctgtccttgatgcccaccttcagcaggatcctgatgccaaagtagcttgtgaaactgttgctaaaactggaatgatccttcttgctggggaaattacatccagagctgctgttgactaccagaaagtggttcgtgaagctgttaaacacattggatatgatgattcttccaaaggttttgactacaagacttgtaacgtgctggtagccttggagcaacagtcaccagatattgctcaaggtgttcatcttgacagaaatgaagaagacattggtgctggagaccagggcttaatgtttggctatgccactgatgaaactgaggagtgtatgcctttaaccattgtcttggcacacaagctaaatgccaaactggcagaactacgccgtaatggcactttgccttggttacgccctgattctaaaactcaagttactgtgcagtatatgcaggatcgaggtgctgtgcttcccatcagagtccacacaattgttatatctgttcagcatgatgaagaggtttgtcttgatgaaatgagggatgccctaaaggagaaagtcatcaaagcagttgtgcctgcgaaataccttgatgaggatacaatctaccacctacagccaagtggcagatttgttattggtgggcctcagggtgatgctggtttgactggacgsaaaatcattgtggacacttatggcggttggggtgctcatggaggaggtgccttttcaggaaaggattataccaaggtcgaccgttcagctgcttatgctgctcgttgggtggcaaaatcccttgttaaaggaggtctgtgccggagggttcttgttcaggtctcttatgctattggagtttctcatccattatctatctccattttccattatggtacctctcagaagagtgagagagagctattagagattgtgaagaagaatttcgatctccgccctggggtcattgtcaggtaaagatggtaaagcctgttgctagtcaagtattgagggtgttgggtgtgtgtgtatatacttaaggctgaggaggtgaaggtgtgaaggaagactcctcaaatgggaatatattttaattcctggaacagttttgaactgctgccttagtgaagacttagttatttgagaaatttaaaattacggtgctccatggcttaggctaaccactctagagaatgttccagatttgatatttgagctttgtgctcttctacttaagggtgttaagaaaatagagataaagtgggttgctcaaggtttgttgcaatgtaaaaaccatggtagggtgtgggcggcgggaccttggtaagtattgtgtgatctcaggtgagctttttgacaattgaaatttctcagaataatgacaagttttcgtatttgttgagccagggacggaaaaacaactatagttactaataaggactgtgcaaggagtttggacaccagggaagtaacacttttgccacaaatttttttcctagcatatcccagagaactcatttgccagagctcttgaaaatgagtcttgctgattgttttgctttattttaatttaatgctacatattaagttacggacttgtatattccagggatctggatctgaagaagccaatttatcagaggactgcagcctatggccactttggtagggacagcttcccatgggaagtgcccaaaaagcttaaatattgaaagtgttagccttttttccccagacttgttggcgtaggctacagagaagccttcaagctctgagggaaagggccctccttcctaaattttcctgtcctctttcagctcctgaccagttgcagtcactctagtcaatgacatgaattttagcttttgtgggggactgtaagttgggcttgctattctgtccctaggtgttttgttcaccattataatgaatttagtgagcataggtgatccatgtaactgcctagaaacaacactgtagtaaataatgctttgaaattgaacctttgtgccctatcacccaacgctccaaagtcataattgcattgactttccccaccagatgctgaaaatgtccttgtgatgtgcacgtaaagtacttgtagttccacttatagcctctgtctggcaatgccacagccctgtcagcatgaatttgtaatgtcttgagctctattatgaatgtgaagccttccccttatcctccctgtaacttgatccatttctaattatgtagctctttgtcagggagtgttccctatccaatcaatcttgcatgtaacgcaagttcccagttggagctccagcctgacatcaaaaaaggcagttaccattaaaccatctccctggtgcttatgctcttaattgccacctctaacagcaccaaatcaaaatctctccacttycagctgtcttttggaggacgtacgtaataaggttttaatttagtaaaccaatcctatgcatggtttcagcactagccaaacctcaccaactcctagttctagaaaaacaggcacttggcagccttgtgatgtcatacagagaagtcacagggcagtacctgagggtctgtaggttgcacactttggtaccagataacttttttttttctttataagaaagcctgagtactccacactgcacaataactcctcccagggttttaactttgttttattttcaaaaccaggtccaatgagctttctgaacagctggtgtagctacagagaaaccagcttccttcagagagcagtgcttttggcggggaggaggaaatcccttcatacttgaacgttttctaattgcttatttattgtattctggggtatggcgtaagtacagagaagccatcacctcagatggcagcttttaaaagattttttttttttctctcaacaccatgattcctttaacaacatgtttccagcattcccaggtaggccaaggtgtcctacagraaaaccttgggttagacctacagggggtctggctggtgttaacagaagggagggcrgagctggtgcggctggccatggagaaagctgacttggctggtgtggtacagaraagccagcttgtttacatgcttattccatgactgcttgccctaagcagaaagtgcctttcaggatctatttttggaggtttattacgtatgtctggttctcaattccaacagtttaatgaagatctaaataaaatgctaggttctacctt

SEQ ID NO: 6091 - DNA, 891 bp, Homo sapiens
cccgcccacgcgcccctcctccgcatctgagcgggggagcggcggcccccagctgaatgggcgcgagagcggcgctgggggcgggtgggggcgcggggtaccgggctggcggccggccggcgccccctcattagtatgcggacgaaggcggcgggctgcgcggagcggcgtcccctgcagccgcggaccgaggcagcggcggcacctgccggccgagcaatgccaagtgagtacacctatgtgaaactgagaagtgattgctcgaggccttccctgcaatggtacacccgagctcaaagcaagatgagaaggcccagcttgttattaaaagacatcctcaaatgtacattgcttgtgtttggagtgtggatcctttatatcctcaagttaaattatactactgaagaatgtgacatgaaaaaaatgcattatgtggaccctgaccrtgtaaagagagctcagaaatatgctcagcaagtcttgcagaaggaatgtcgtcccaagtttgccaagacatcaatggcgctgttatttgagcacaggtatagcgtggacttactcccttttgtgcagaaggcccccaaagacagtgaagctgagtccaagtacgatcctccttttgggttccggaagttctccagtaaagtccagaccctcttggaactcttgccagagcacgacctccctgaacacttgaaagccaagacctgtcggcgctgtgtggttattggaagcggaggaatactgcacggattagaactgggccacaccctgaaccagttcgatgttgtgataagaactcagtgcactgctcttggtcagtgtggctccaggaacagtgagggacacaggaagctcttcacagtccctgcccacaagggacttaacgtt

SEQ ID NO: 6092 - DNA, 2403 bp, Homo sapiens
cccgcccacgcgcccctcctccgcatctgagcgggggagcggcggcccccagctgaatgggcgcgagagcggcgctgggggcgggtgggggcgcggggtaccgggctggcggccggccggcgccccctcattagtatgcggacgaaggcggcgggctgcgcggagcggcgtcccctgcagccgcggaccgaggcagcggcggcacctgccggccgagcaatgccaagtgagtacacctatgtgaaactgagaagtgattgctcgaggccttccctgcaatggtacacccgagctcaaagcaagatgagaaggcccagcttgttattaaaagacatcctcaaatgtacattgcttgtgtttggagtgtggatcctttatatcctcaagttaaattatactactgaagaatgtgacatgaaaaaaatgcattatgtggaccctgaccrtgtaaagagagctcagaaatatgctcagcaagtcttgcagaaggaatgtcgtcccaagtttgccaagacatcaatggcgctgttatttgagcacaggtatagcgtggacttactcccttttgtgcagaaggcccccaaagacagtgaagctgagtccaagtacgatcctccttttgggttccggaagttctccagtaaagtccagaccctcttggaactcttgccagagcacgacctccctgaacacttgaaagccaagacctgtcggcgctgtgtggttattggaagcggaggaatactgcacggattagaactgggccacaccctgaaccagttcgatgttgtgataaggttaaacagtgcaccagttgagggatattcagaacatgttggaaataaaactactataaggatgacttatccagagggcgcaccactgtctgaccttgaatattattccaatgacttatttgttgctgttttatttaagagtgttgatttcaactggcttcaagcaatggtaaaaaaggaaaccctgccattctgggtacgactcttcttttggaagcaggtggcagaaaaaatcccactgcagccaaaacatttcaggattttgaatccagttatcatcaaagagactgcctttgacatccttcagtactcagagcctcagtcaaggttctggggccgagataagaacgtccccacaatcggtgtcattgccgttgtcttagccacacatctgtgcgatgaagtcagtttggcgggttttggatatgacctcaatcaacccagaacacctttgcactacttcgacagtcaatgcatggctgctatgaactttcagaccatgcataatgtgacaacggaaaccaagttcctcttaaagctggtcaaagagggagtggtgaaagatctcagtggaggcattgatcgtgaattttgaacacagaaaacctcagttgaaaatgcaactctaactctgagagctgtttttgacagccttcttgatgtatttctccatcctgcagatactttgaagtgcagctcatgtttttaacttttaatttaaaaacacaaaaaaaattttagctcttcccactttttttttcctatttatttgaggtcagtgtttgtttttgcacaccattttgtaaatgaaacttaagaattgaattggaaagacttctcaaagagaattgtatgtaacgatgttgtattgatttttaagaaagtaatttaatttgtaaaacttctgctcgtttacactgcacattgaatacaggtaactaattggaaggagaggggaggtcactcttttgatggtggccctgaacctcattctggttccctgctgcgctgcttggtgtgacccacggaggatccactcccaggatgacgtgctccgtagctctgctgctgatactgggtctgcgatgcagcggcgtgaggcctgggctggttggagaaggtcacaacccttctctgttggtctgccttctgctgaaagactcgagaaccaaccagggaagctgtcctggaggtccctggtcggagagggacatagaatctgtgacctctgacaactgtgaagccaccctgggctacagaaaccacagtcttcccagcaattattacaattcttgaattccttggggattttttactgccctttcaaagcacttaagtgttagatctaacgtgttccagtgtctgtctgaggtgacttaaaaaatcagaacaaaacttctattatccagagtcatgggagagtacaccctttccaggaataatgttttgggaaacactgaaatgaaatcttcccagtattataaattgtgtatttaaaaaaaagaaacttttctgaatgcctacctggcggtgtataccaggcagtgtgccagtttaaaaagatgaaaaagaataaaaacttttgaggaactctcgtagtctggtt

SEQ ID NO: 6093 - DNA, 1454 bp, Homo sapiens
cccgcccacgcgcccctcctccgcatctgagcgggggagcggcggcccccagctgaatgggcgcgagagcggcgctgggggcgggtgggggcgcggggtaccgggctggcggccggccggcgccccctcattagtatgcggacgaaggcggcgggctgcgcggagcggcgtcccctgcagccgcggaccgaggcagcggcggcacctgccggccgagcaatgccaagtgagtacacctatgtgaaactgagaagtgattgctcgaggccttccctgcaatggtacacccgagctcaaagcaagatgagaaggcccagcttgttattaaaagacatcctcaaatgtacattgcttgtgtttggagtgtggatcctttatatcctcaagttaaattatactactgaagaatgtgacatgaaaaaaatgcattatgtggaccctgaccrtgtaaagaccttatctccctgcggatggcattgcgtgcagttaattatggccagatggactcagccgcttcttcatcgtcttctctcggactctgcagacctacaccgtgcctttaaaggaagcagggccctccctgctgaagcattcagtgagcccaggcaccagcatcttcaaaccgagtcttttctctccttagtgctgctccccgctttccaggccttcctgggatatcttagagctcctgaaggtgcggcactcgccttgaggcactttcttctgagctgtgagctatgggcaagcagtggagggggaagagagcagctgaagcagatgccggttcaacttacttaaagatgtgggacaagctctgaggaagcccccaagacaatgatgtctggttgtgcaccattgaagcaagaacagaaaccatcccagagtggaggacatggcccatgtggtcctcctgttctgagtggctatgagatggagttctgtgtgagctctctacagaaaaagccctgtctccaggcaatcagtggagatctgttaaacgagttgaaacaaaagaggacaaggaattgctgtgrctttagacgttgccaggacatgtagaaactcaytcaggatttactactgcatccactgtcacttaggcgcaggaggggtcacagtcagaaggtgactactgagaaatgtgccctacccacagtctagaaaattaagtttgggctgggcgtggtggctcacatctataatcccagaactttggaaggtggaggcaggtggatcactaggtcaggagtttgagaccagcctgaccaacatggtgaaaccccgtctgtactgaaaatacaaaaagtagccgggtgtgtcagtgcacgcctgtaatcccagctactcaggaacctgaggcaggagaatggcttgaaactgggaggcagaggttgcagtgagctgaaattgcgccactgcactccagcctgggtgacagagcgagactctgtctc

SEQ ID NO: 6094 - DNA, 2243 bp, Homo sapiens
cccgcccacgcgcccctcctccgcatctgagcgggggagcggcggcccccagctgaatgggcgcgagagcggcgctgggggcgggtgggggcgcggggtaccgggctggcggccggccggcgccccctcattagtatgcggacgaaggcggcgggctgcgcggagcggcgtcccctgcagccgcggaccgaggcagcggcggcacctgccggccgagcaatgccaagtgagtacacctatgtgaaactgagaagtgattgctcgaggccttccctgcaatggtacacccgagctcaaagcaagatgagaaggcccagcttgttattaaaagacatcctcaaatgtacattgcttgtgtttggagtgtggatcctttatatcctcaagttaaattatactactgaagaatgtgacatgaaaaaaatgcattatgtggaccctgaccrtgtaaagagagctcagaaatatgctcagcaagtcttgcagaaggaatgtcgtcccaagtttgccaagacatcaatggcgctgttatttgagcacaggtatagcgtggacttactcccttttgtgcagaaggcccccaaagacagtgaagctgagtccaagtacgatcctccttttgggttccggaagttctccagtaaagtccagaccctcttggaactcttgccagagcacgacctccctgaacacttgaaagccaagacctgtcggcgctgtgtggttattggaagcggaggaatactgcacggattagaactgggccacaccctgaaccagttcgatgttgtgataaggttaaacagtgcaccagttgagggatattcagaacatgttggaaataaaactactataaggatgacttatccagagggcgcaccactgtctgaccttgaatattattccaatgacttatttgttgctgttttatttaagagtgttgatttcaactggcttcaagcaatggtaaaaaaggaaaccctgccattctgggtacgactcttcttttggaagcaggtggcagaaaaaatcccactgcagccaaaacatttcaggattttgaatccagttatcatcaaagagactgcctttgacatccttcagtactcagagcctcagtcaaggttctggggccgagataagaacgtccccacaatcggtgtcattgccgttgtcttagccacacatctgtgcgatgaagtcagtttggcgggttttggatatgacctcaatcaacccagaacacctttgcactacttcgacagtcaatgcatggctgctatgaactttcagaccatgcataatgtgacaacggaaaccaagttcctcttaaagctggtcaaagagggagtggtgaaagatctcagtggaggcattgatcgtgaattttgaacacagaaaacctcagttgaaaatgcaactctaactctgagagctgtttttgacagccttcttgatgtatttctccatcctgcagatactttgaagtgcagctcatgtttttaacttttaatttaaaaacacaaaaaaaattttagctcttcccactttttttttcctatttatttgaggtaactaattggaaggagaggggaggtcactcttttgatggtggccctgaacctcattctggttccctgctgcgctgcttggtgtgacccacggaggatccactcccaggatgacgtgctccgtagctctgctgctgatactgggtctgcgatgcagcggcgtgaggcctgggctggttggagaaggtcacaacccttctctgttggtctgccttctgctgaaagactcgagaaccaaccagggaagctgtcctggaggtccctggtcggagagggacatagaatctgtgacctctgacaactgtgaagccaccctgggctacagaaaccacagtcttcccagcaattattacaattcttgaattccttggggattttttactgccctttcaaagcacttaagtgttagatctaacgtgttccagtgtctgtctgaggtgacttaaaaaatcagaacaaaacttctattatccagagtcatgggagagtacaccctttccaggaataatgttttgggaaacactgaaatgaaatcttcccagtattataaattgtgtatttaaaaaaaagaaacttttctgaatgcctacctggcggtgtataccaggcagtgtgccagtttaaaaagatgaaaaagaataaaaacttttgaggaactctcgtagtctggtt

SEQ ID NO: 6095 - DNA, 2442 bp, Homo sapiens
cccgcccacgcgcccctcctccgcatctgagcgggggagcggcggcccccagctgaatgggcgcgagagcggcgctgggggcgggtgggggcgcggggtaccgggctggcggccggccggcgccccctcattagtatgcggacgaaggcggcgggctgcgcggagcggcgtcccctgcagccgcggaccgaggcagcggcggcacctgccggccgagcaatgccaagtgagtacacctatgtgaaactgagaagtgattgctcgaggccttccctgcaatggtacacccgagctcaaagcaagatgagaaggcccagcttgttattaaaagacatcctcaaatgtacattgcttgtgtttggagtgtggatcctttatatcctcaagttaaattatactactgaagaatgtgacatgaaaaaaatgcattatgtggaccctgaccrtgtaaagttaattatggccagatggactcagccgcttcttcatcgtcttctctcggactctgcagacctacaccgtgcctttaaaggaagcagggccctccctgctgaagcattcagtgagcccaggcaccagcatcttcaaaccgagtcttttctctccttagtgctgctccccgctttccaggccttcctgggatatcttagagagagctcagaaatatgctcagcaagtcttgcagaaggaatgtcgtcccaagtttgccaagacatcaatggcgctgttatttgagcacaggtatagcgtggacttactcccttttgtgcagaaggcccccaaagacagtgaagctgagtccaagtacgatcctccttttgggttccggaagttctccagtaaagtccagaccctcttggaactcttgccagagcacgacctccctgaacacttgaaagccaagacctgtcggcgctgtgtggttattggaagcggaggaatactgcacggattagaactgggccacaccctgaaccagttcgatgttgtgataaggttaaacagtgcaccagttgagggatattcagaacatgttggaaataaaactactataaggatgacttatccagagggcgcaccactgtctgaccttgaatattattccaatgacttatttgttgctgttttatttaagagtgttgatttcaactggcttcaagcaatggtaaaaaaggaaaccctgccattctgggtacgactcttcttttggaagcaggtggcagaaaaaatcccactgcagccaaaacatttcaggattttgaatccagttatcatcaaagagactgcctttgacatccttcagtactcagagcctcagtcaaggttctggggccgagataagaacgtccccacaatcggtgtcattgccgttgtcttagccacacatctgtgcgatgaagtcagtttggcgggttttggatatgacctcaatcaacccagaacacctttgcactacttcgacagtcaatgcatggctgctatgaactttcagaccatgcataatgtgacaacggaaaccaagttcctcttaaagctggtcaaagagggagtggtgaaagatctcagtggaggcattgatcgtgaattttgaacacagaaaacctcagttgaaaatgcaactctaactctgagagctgtttttgacagccttcttgatgtatttctccatcctgcagatactttgaagtgcagctcatgtttttaacttttaatttaaaaacacaaaaaaaattttagctcttcccactttttttttcctatttatttgaggtaactaattggaaggagaggggaggtcactcttttgatggtggccctgaacctcattctggttccctgctgcgctgcttggtgtgacccacggaggatccactcccaggatgacgtgctccgtagctctgctgctgatactgggtctgcgatgcagcggcgtgaggcctgggctggttggagaaggtcacaacccttctctgttggtctgccttctgctgaaagactcgagaaccaaccagggaagctgtcctggaggtccctggtcggagagggacatagaatctgtgacctctgacaactgtgaagccaccctgggctacagaaaccacagtcttcccagcaattattacaattcttgaattccttggggattttttactgccctttcaaagcacttaagtgttagatctaacgtgttccagtgtctgtctgaggtgacttaaaaaatcagaacaaaacttctattatccagagtcatgggagagtacaccctttccaggaataatgttttgggaaacactgaaatgaaatcttcccagtattataaattgtgtatttaaaaaaaagaaacttttctgaatgcctacctggcggtgtataccaggcagtgtgccagtttaaaaagatgaaaaagaataaaaacttttgaggaactctcgtagtctggtt

SEQ ID NO: 6096 - DNA, 2774 bp, Homo sapiens
cccctccggatccggcctctccttcccaccgcctaccacctcctcccaacaggtcctggccagtctgcggaccgttcggagcaacgtggcggcccttgcccgccagcaatgcctaggagcagccaattcaagcggatcctgaaccgggagttgacccacctgtccgaaaccagccgctccgggaaccaggtgtccgagtacatctcccggaccttcctggaccagcagaccgaggtggagctgcccaaggtgaccgctgaggaggccccacagcccatgtcccrgatcagtggcctacatgggctctgccacagtgccagcctctcctcagccactgtcccacgctttggggtccagactgaccaggaggagcaactggccaaggarctagaagacaccaacaagtggggacttgatgtgttcaaggtggcggagctaagtgggaacyrgcccctcacagctatcatattcagcatttttcaggagcgggacctgctgaagacattccagatcccagcagacacactggccacctacctgctgatgctggarggtcactaccacgccaatgtggcctaccacaacagcctacatgccgccgacgtggcccagtccacgcatgtgctgctggctacgcccgccctcgaggctgtgttcacagacttggaaatcctggctgccctctttgcaagcgccatccacgacgtggaccatcctggggtctccaaccagtttctgattaacaccaactcagagctggcgcttatgtacaacgacgcctcggtgctggagaaccatcacctggctgtgggcttcaagctgctgcaggcagagaactgcgatatcttccagaacctcagcgccaagcagcgactgagtctgcgcaggatggtcattgacatggtgctggccacagacatgtccaaacacatgaacctcctggccgacctcaagaccatggtggagaccaagaaggtgacaagcctcggtgtcctcctcctggacaactattccgaccgaatccaggtcttgcagaacctggtgcactgtgctgatctgagcaaccccaccaagccgctgcccctgtaccgccagtggacggaccgcatcatggccgagttcttccagcagggagaccgcgagcgtgagtcgggcctggacatcagtcccatgtgtgacaagcatacggcctcagtggagaagtcccaggtgggtttcattgactacattgctcacccactgtgggagacttgggctgacctggtccacccagatgcacaggacctgctggacacgctggaggacaatcgagagtggtaccagagcaagatcccccgaagtccctcagacctcaccaaccccgagcgggacgggcctgacagattccagtttgaactgactctggaggaggcagaggaagaggatgaggaggaagaagaggagggggaagagacagctttagccaaagaggccttggagttgcctgacactgaactcctgtcccctgaagccggcccagaccctggggacttacccctcgacaaccagaggacttagggccagccctgcgtgaactgcaggggcaatggatggtaaagccctttggctcttggcaggcagactttccaggaagaggctccatgtggctcctgcttcactttcccayccatttagggagacaatcaagctcttagttataggtgsctcccagggtctaattggaggcacctggctggggtccactctgaccctagacttgcctaaaagagctctctaaggggcagcctcttacgatgccctggtgtctttctcctgggcttctatccctgtgaggagaggtgctgtctgctggagcctctagtccaccctctccagtggtcactcttgagtcacatctgtcacttaattatttccttctttatcaaatatttattgctcatctacttcgtgccagctttctgcctctgtagtagccctgcacaaagggtggggagtcaggagaccatcccaaaggcatctcccygtcttcctctaccaagcggctctctgcaagagcatggaaatgtgagtggggaaaattttcagcaccaaagcttcactcatacccagttttgtttctgaaactacggtagggggcaggaagaggagcagaaaagaagggctgggcaaggcatagtggcttatgcctgtaatcccggtactttgggaggctgaggtgggaggactgcttaagctcaggagtttgagaccagcctgggcaacatagcaagacccccaccatctctgaaaaaaaaaattagccaggcatggtggtgtgcacctgagaatcccagctactcagaaggttgagacaaaggggatcgcttgagcccaggagttggaggctgaagagagctatgactgcatcactgcactccagcctgggcaacacagcaagatcctgtctaaaaataaaaagaaaagagaaggaaaggaaagagacggggctctgaggccgagcacagtggcccatgcctataatcccagcactttgggaggctgaggcaggtggatcacctgaggttaggagttcgagaccagcctggccaacatggtgaaaccccatctctactaaaaatacaaaaattggctgggcatggtggcgggtgcctgtaatcccagctactggggaggctgaggcaggagaatcacttgaattcaggaggtggaggttgcagtgagccgacatcatgccactgcactccagcctgggcgacagagcaagacactgtctc

SEQ ID NO: 6097 - DNA, 3644 bp, Homo sapiens
gtgcgagggacaccgtctcggccccgggggtctcctgagaccctgtctccctgccctccatttagcagcgatcagtggacaatttctgtcttctccactccaagtccttgtcttggttcttttccatgcagcgctataggggacggcagacggttttcggggctggtgtgttgggggggggtctcttcagcccctagcttcaacaccccctcaccacgttcttctcccctgttctacccttcagcaccatctgggcatcgacagctcctcggtgtcggccccaccttgagccccagttccaccttctaccgcttcagcacctccggcgcggacagctcctcgctgtcgcctccactcccggccctgggccggacccgggagcagacgctcctcggcgcccgctcacggggacgagtcctgctccctgctatcccagacccctttctctggcgcatggagaacctgggggtcggcgaaggggcagaggcttgcagcaggttgagtcgctctcgcggccgccacagcatgaccagagccccgaagcacctgtggcggcaaccccggcgccccatccgcatccaacagcgcttctattcggatccggacaagtccgcgggctgccgcgagagggacctgagcccgcggccggagctcaggaagtcgcggctctcctggcccgtttcctcctgcaggcgctttgacctggaaaatgggctctcgtgtgggaggagggccctggaccctcagtccagccctggcctgggccggattatgcaggctccagtcccgcacagccagcggcgcgagtccttcctgtaccgctcagatagcgactrtgaactctcgcccaaggccatgtctcggaactcctctgtggccagcgacctacatggagaggacatgattgtgacgccctttgcccaggtcctggccagtctgcggaccgttcggagcaacgtggcggcccttgcccgccagcaatgcctaggagcagccaagcagggacccgtcggaaacccttcatccagcaatcagctccctcctgcagaggacacggggcagaagctggcattggagacgctagacgagctggactggtgcctggatcagttggagacgctgcagacccggcactcggtgggggagatggcctccaacaagttcaagcggatcctgaaccgggagttgacccacctgtccgaaaccagccgctccgggaaccaggtgtccgagtacatctcccggaccttcctggaccagcagaccgaggtggagctgcccaaggtgaccgctgaggaggccccacagcccatgtcccrgatcagtggcctacatgggctctgccacagtgccagcctctcctcagccactgtcccacgctttggggtccagactgaccaggaggagcaactggccaaggarctagaagacaccaacaagtggggacttgatgtgttcaaggtggcggagctaagtgggaacyrgcccctcacagctatcatattcagcatttttcaggctgtgttcacagacttggaaatcctggctgccctctttgcaagcgccatccacgacgtggaccatcctggggtctccaaccagtttctgattaacaccaactcagagctggcgcttatgtacaacgacgcctcggtgctggagaaccatcacctggctgtgggcttcaagctgctgcaggcagagaactgcgatatcttccagaacctcagcgccaagcagcgactgagtctgcgcaggatggtcattgacatggtgctggccacagacatgtccaaacacatgaacctcctggccgacctcaagaccatggtggagaccaagaaggtgacaagcctcggtgtcctcctcctggacaactattccgaccgaatccaggtcttgcagaacctggtgcactgtgctgatctgagcaaccccaccaagccgctgcccctgtaccgccagtggacggaccgcatcatggccgagttcttccagcagggagaccgcgagcgtgagtcgggcctggacatcagtcccatgtgtgacaagcatacggcctcagtggagaagtcccaggtgggtttcattgactacattgctcacccactgtgggagacttgggctgacctggtccacccagatgcacaggacctgctggacacgctggaggacaatcgagagtggtaccagagcaagatcccccgaagtccctcagacctcaccaaccccgagcgggacgggcctgacagattccagtttgaactgactctggaggaggcagaggaagaggatgaggaggaagaagaggagggggaagagacagctttagccaaagaggccttggagttgcctgacactgaactcctgtcccctgaagccggcccagaccctggggacttacccctcgacaaccagaggacttagggccagccctgcgtgaactgcaggggcaatggatggtaaagccctttggctcttggcaggcagactttccaggaagaggctccatgtggctcctgcttcactttcccayccatttagggagacaatcaagctcttagttataggtgsctcccagggtctaattggaggcacctggctggggtccactctgaccctagacttgcctaaaagagctctctaaggggcagcctcttacgatgccctggtgtctttctcctgggcttctatccctgtgaggagaggtgctgtctgctggagcctctagtccaccctctccagtggtcactcttgagtcacatctgtcacttaattatttccttctttatcaaatatttattgctcatctacttcgtgccagctttctgcctctgtagtagccctgcacaaagggtggggagtcaggagaccatcccaaaggcatctcccygtcttcctctaccaagcggctctctgcaagagcatggaaatgtgagtggggaaaattttcagcaccaaagcttcactcatacccagttttgtttctgaaactacggtagggggcaggaagaggagcagaaaagaagggctgggcaaggcatagtggcttatgcctgtaatcccggtactttgggaggctgaggtgggaggactgcttaagctcaggagtttgagaccagcctgggcaacatagcaagacccccaccatctctgaaaaaaaaaattagccaggcatggtggtgtgcacctgagaatcccagctactcagaaggttgagacaaaggggatcgcttgagcccaggagttggaggctgaagagagctatgactgcatcactgcactccagcctgggcaacacagcaagatcctgtctaaaaataaaaagaaaagagaaggaaaggaaagagacggggctctgaggccgagcacagtggcccatgcctataatcccagcactttgggaggctgaggcaggtggatcacctgaggttaggagttcgagaccagcctggccaacatggtgaaaccccatctctactaaaaatacaaaaattggctgggcatggtggcgggtgcctgtaatcccagctactggggaggctgaggcaggagaatcacttgaattcaggaggtggaggttgcagtgagccgacatcatgccactgcactccagcctgggcgacagagcaagacactgtctc

SEQ ID NO: 6098 - DNA, 3809 bp, Homo sapiens
gtgcgagggacaccgtctcggccccgggggtctcctgagaccctgtctccctgccctccatttagcagcgatcagtggacaatttctgtcttctccactccaagtccttgtcttggttcttttccatgcagcgctataggggacggcagacggttttcggggctggtgtgttgggggggggtctcttcagcccctagcttcaacaccccctcaccacgttcttctcccctgttctacccttcagcaccatctgggcatcgacagctcctcggtgtcggccccaccttgagccccagttccaccttctaccgcttcagcacctccggcgcggacagctcctcgctgtcgcctccactcccggccctgggccggacccgggagcagacgctcctcggcgcccgctcacggggacgagtcctgctccctgctatcccagacccctttctctggcgcatggagaacctgggggtcggcgaaggggcagaggcttgcagcaggttgagtcgctctcgcggccgccacagcatgaccagagccccgaagcacctgtggcggcaaccccggcgccccatccgcatccaacagcgcttctattcggatccggacaagtccgcgggctgccgcgagagggacctgagcccgcggccggagctcaggaagtcgcggctctcctggcccgtttcctcctgcaggcgctttgacctggaaaatgggctctcgtgtgggaggagggccctggaccctcagtccagccctggcctgggccggattatgcaggctccagtcccgcacagccagcggcgcgagtccttcctgtaccgctcagatagcgactrtgaactctcgcccaaggccatgtctcggaactcctctgtggccagcgacctacatggagaggacatgattgtgacgccctttgcccaggtcctggccagtctgcggaccgttcggagcaacgtggcggcccttgcccgccagcaatgcctaggagcagccaagcagggacccgtcggaaacccttcatccagcaatcagctccctcctgcagaggacacggggcagaagctggcattggagacgctagacgagctggactggtgcctggatcagttggagacgctgcagacccggcactcggtgggggagatggcctccaacaagttcaagcggatcctgaaccgggagttgacccacctgtccgaaaccagccgctccgggaaccaggtgtccgagtacatctcccggaccttcctggaccagcagaccgaggtggagctgcccaaggtgaccgctgaggaggccccacagcccatgtcccrgatcagtggcctacatgggctctgccacagtgccagcctctcctcagccactgtcccacgctttggggtccagactgaccaggaggagcaactggccaaggarctagaagacaccaacaagtggggacttgatgtgttcaaggtggcggagctaagtgggaacyrgcccctcacagctatcatattcagcatttttcaggagcgggacctgctgaagacattccagatcccagcagacacactggccacctacctgctgatgctggarggtcactaccacgccaatgtggcctaccacaacagcctacatgccgccgacgtggcccagtccacgcatgtgctgctggctacgcccgccctcgaggctgtgttcacagacttggaaatcctggctgccctctttgcaagcgccatccacgacgtggaccatcctggggtctccaaccagtttctgattaacaccaactcagagctggcgcttatgtacaacgacgcctcggtgctggagaaccatcacctggctgtgggcttcaagctgctgcaggcagagaactgcgatatcttccagaacctcagcgccaagcagcgactgagtctgcgcaggatggtcattgacatggtgctggccacagacatgtccaaacacatgaacctcctggccgacctcaagaccatggtggagaccaagaaggtgacaagcctcggtgtcctcctcctggacaactattccgaccgaatccaggtcttgcagaacctggtgcactgtgctgatctgagcaaccccaccaagccgctgcccctgtaccgccagtggacggaccgcatcatggccgagttcttccagcagggagaccgcgagcgtgagtcgggcctggacatcagtcccatgtgtgacaagcatacggcctcagtggagaagtcccaggtgggtttcattgactacattgctcacccactgtgggagacttgggctgacctggtccacccagatgcacaggacctgctggacacgctggaggacaatcgagagtggtaccagagcaagatcccccgaagtccctcagacctcaccaaccccgagcgggacgggcctgacagattccagtttgaactgactctggaggaggcagaggaagaggatgaggaggaagaagaggagggggaagagacagctttagccaaagaggccttggagttgcctgacactgaactcctgtcccctgaagccggcccagaccctggggacttacccctcgacaaccagaggacttagggccagccctgcgtgaactgcaggggcaatggatggtaaagccctttggctcttggcaggcagactttccaggaagaggctccatgtggctcctgcttcactttcccayccatttagggagacaatcaagctcttagttataggtgsctcccagggtctaattggaggcacctggctggggtccactctgaccctagacttgcctaaaagagctctctaaggggcagcctcttacgatgccctggtgtctttctcctgggcttctatccctgtgaggagaggtgctgtctgctggagcctctagtccaccctctccagtggtcactcttgagtcacatctgtcacttaattatttccttctttatcaaatatttattgctcatctacttcgtgccagctttctgcctctgtagtagccctgcacaaagggtggggagtcaggagaccatcccaaaggcatctcccygtcttcctctaccaagcggctctctgcaagagcatggaaatgtgagtggggaaaattttcagcaccaaagcttcactcatacccagttttgtttctgaaactacggtagggggcaggaagaggagcagaaaagaagggctgggcaaggcatagtggcttatgcctgtaatcccggtactttgggaggctgaggtgggaggactgcttaagctcaggagtttgagaccagcctgggcaacatagcaagacccccaccatctctgaaaaaaaaaattagccaggcatggtggtgtgcacctgagaatcccagctactcagaaggttgagacaaaggggatcgcttgagcccaggagttggaggctgaagagagctatgactgcatcactgcactccagcctgggcaacacagcaagatcctgtctaaaaataaaaagaaaagagaaggaaaggaaagagacggggctctgaggccgagcacagtggcccatgcctataatcccagcactttgggaggctgaggcaggtggatcacctgaggttaggagttcgagaccagcctggccaacatggtgaaaccccatctctactaaaaatacaaaaattggctgggcatggtggcgggtgcctgtaatcccagctactggggaggctgaggcaggagaatcacttgaattcaggaggtggaggttgcagtgagccgacatcatgccactgcactccagcctgggcgacagagcaagacactgtctc

SEQ ID NO: 6099 - DNA, 3320 bp, Homo sapiens
gctgtccagaaaaggtcccgcgcagccggcgctcggtccagcctccacgcagtcctggcgatgcagggcccccccgcgcccgccccggtccccgggcccggctcccctcggggatccccgcgcggctcccccgggctcttcaggaagcttttggtgaatcagagcatccgcctgcagcggcgcttcacggtggcccatccgctgtgctttgacctggaaaatgggctctcgtgtgggaggagggccctggaccctcagtccagccctggcctgggccggattatgcaggctccagtcccgcacagccagcggcgcgagtccttcctgtaccgctcagatagcgactrtgaactctcgcccaaggccatgtctcggaactcctctgtggccagcgacctacatggagaggacatgattgtgacgccctttgcccaggtcctggccagtctgcggaccgttcggagcaacgtggcggcccttgcccgccagcaatgcctaggagcagccaagcagggacccgtcggaaacccttcatccagcaatcagctccctcctgcagaggacacggggcagaagctggcattggagacgctagacgagctggactggtgcctggatcagttggagacgctgcagacccggcactcggtgggggagatggcctccaacaagttcaagcggatcctgaaccgggagttgacccacctgtccgaaaccagccgctccgggaaccaggtgtccgagtacatctcccggaccttcctggaccagcagaccgaggtggagctgcccaaggtgaccgctgaggaggccccacagcccatgtcccrgatcagtggcctacatgggctctgccacagtgccagcctctcctcagccactgtcccacgctttggggtccagactgaccaggaggagcaactggccaaggarctagaagacaccaacaagtggggacttgatgtgttcaaggtggcggagctaagtgggaacyrgcccctcacagctatcatattcagcatttttcaggagcgggacctgctgaagacattccagatcccagcagacacactggccacctacctgctgatgctggarggtcactaccacgccaatgtggcctaccacaacagcctacatgccgccgacgtggcccagtccacgcatgtgctgctggctacgcccgccctcgaggctgtgttcacagacttggaaatcctggctgccctctttgcaagcgccatccacgacgtggaccatcctggggtctccaaccagtttctgattaacaccaactcagagctggcgcttatgtacaacgacgcctcggtgctggagaaccatcacctggctgtgggcttcaagctgctgcaggcagagaactgcgatatcttccagaacctcagcgccaagcagcgactgagtctgcgcaggatggtcattgacatggtgctggccacagacatgtccaaacacatgaacctcctggccgacctcaagaccatggtggagaccaagaaggtgacaagcctcggtgtcctcctcctggacaactattccgaccgaatccaggtcttgcagaacctggtgcactgtgctgatctgagcaaccccaccaagccgctgcccctgtaccgccagtggacggaccgcatcatggccgagttcttccagcagggagaccgcgagcgtgagtcgggcctggacatcagtcccatgtgtgacaagcatacggcctcagtggagaagtcccaggtgggtttcattgactacattgctcacccactgtgggagacttgggctgacctggtccacccagatgcacaggacctgctggacacgctggaggacaatcgagagtggtaccagagcaagatcccccgaagtccctcagacctcaccaaccccgagcgggacgggcctgacagattccagtttgaactgactctggaggaggcagaggaagaggatgaggaggaagaagaggagggggaagagacagctttagccaaagaggccttggagttgcctgacactgaactcctgtcccctgaagccggcccagaccctggggacttacccctcgacaaccagaggacttagggccagccctgcgtgaactgcaggggcaatggatggtaaagccctttggctcttggcaggcagactttccaggaagaggctccatgtggctcctgcttcactttcccayccatttagggagacaatcaagctcttagttataggtgsctcccagggtctaattggaggcacctggctggggtccactctgaccctagacttgcctaaaagagctctctaaggggcagcctcttacgatgccctggtgtctttctcctgggcttctatccctgtgaggagaggtgctgtctgctggagcctctagtccaccctctccagtggtcactcttgagtcacatctgtcacttaattatttccttctttatcaaatatttattgctcatctacttcgtgccagctttctgcctctgtagtagccctgcacaaagggtggggagtcaggagaccatcccaaaggcatctcccygtcttcctctaccaagcggctctctgcaagagcatggaaatgtgagtggggaaaattttcagcaccaaagcttcactcatacccagttttgtttctgaaactacggtagggggcaggaagaggagcagaaaagaagggctgggcaaggcatagtggcttatgcctgtaatcccggtactttgggaggctgaggtgggaggactgcttaagctcaggagtttgagaccagcctgggcaacatagcaagacccccaccatctctgaaaaaaaaaattagccaggcatggtggtgtgcacctgagaatcccagctactcagaaggttgagacaaaggggatcgcttgagcccaggagttggaggctgaagagagctatgactgcatcactgcactccagcctgggcaacacagcaagatcctgtctaaaaataaaaagaaaagagaaggaaaggaaagagacggggctctgaggccgagcacagtggcccatgcctataatcccagcactttgggaggctgaggcaggtggatcacctgaggttaggagttcgagaccagcctggccaacatggtgaaaccccatctctactaaaaatacaaaaattggctgggcatggtggcgggtgcctgtaatcccagctactggggaggctgaggcaggagaatcacttgaattcaggaggtggaggttgcagtgagccgacatcatgccactgcactccagcctgggcgacagagcaagacactgtctc

SEQ ID NO: 6100 - DNA, 1439 bp, Homo sapiens
atgtggggttatgagctgaaagcaataaggagctatgaagggtatctgagcagggggtgggtgggatgaggtcagatctgcctgatagaaattcctgcagcttttgcctcacacatgtcctgttttatgtttttgtcttcttattgccgcccagtggagtacagtggcgcaatcatggttcactgcagcctccaactcctgggctcaagcgatcctctcgcctcagcctcccaagtatagctgggactacaggcatgtgagcaccaccacgcctgagtaattttttattttgtgcagagacaggatccagaactcctgggctcaagtgatcctcccactttggtctcccaatgtgctagaattacagccctgagccacggccccatgccccgtttttaccagtgtatattttctactggaaaatgagacttttagggatgaatgtggacttgtctgttgaaacttgtaaatttgcttaaaaaaaaaaaaagatctccaagtcttcacaaaattttatattccccaaggctgccccatcacaatgcctgtgaagcttgactggcagacactgaggcctgaagctgggggctrcagggggtcactggctcacccggtccccccgtaatctgtaaaacatactgggtgagggaggctgctggaggacctgaatctctcccttctccaggcagtagtgaggcatatgcctgttggccttgggcccattaaagatcattccagccccagtgctgttctctgaattcttggggaacacagggatgggggctcctaatgaggaccccagaaactctgagctctcacaactttcaaaggacacttgcctccctcctctgcccacacctccaccattacagcatttgatcccacaagtaaggagggggcggtcctattccaccacctctctggtatccccccaaccttctgagttgtctgagacccaggaaagggttaagatcaggacccctctctcctgggctgaaagatatttctcacgtcagctctatgtggacacaggagtttctggctggcctggaactgcagacggagcttatctgccattaaaccactgcaggtgcactgcttagcatcccgtctgtgagtaggtgagagcagggaagtaagactttgactcaaacgggacggatgcatccacagttggaactctagcacaggcacttctgccattagcagccacaaaaagaagatgsatattttctggagttcctccagccatccagggaagatgctggaacagtaccaggtgggttttgaaggatgtgtaggagttcgccagccagaatattcactcatcaaacctcaaaccttccctggcactcccttatgctcagaccacaaaggtctcagcttcctgggaggaaggtgtcgccccttcctatggaaacaggagcccagaggctggg

SEQ ID NO: 6101 - DNA, 2869 bp, Homo sapiens
gtcaacctcaccagtcaaggaatgagacatgagtggaattaggttgccacttctggagctctgggagaccccaaccccctggcccatccctacctcccagaacctcactggtctgggcgtggctgggcactgagatagtagaactcaggcagcatgatgcagcctcccagaaatgatttctagaacagggcagtcgtgatacttggaggctgggctttgagctcggtcacctttgcacccagcttgggagtgagagagtttaaggtcatcctcyctcaaaaccagtattccagatcatttctctccattccaggaagtttgcatagctccctggacttctgctttgcactgccctgcaggagtgggtggggaaaggaagtggctttgaggcacacagaggggcttgktgaggccaccggaggaagcttctgccaccaatatgggacctgtgcccagcctaccagaagagagcatctgaaaacatgtatcgacatggtaacccctctgcttgaagcctcacatggctccctattgccttggtgctgaacaccctatggctgaccgtggcccagcctctgcaacagctctgcctcctctccagtgccttttcactttgtactcaaagccacatcgcattgaagccacaggtggggcaaggtcatgcatgacctgagtctccaaatcccttcaccctgtttggttctgcaacggggattaggggagccccacgatttgttttcaaaggatgtccgggctccaggacaggatgccctgggtcacctgatgacaggtgtggtggttggaaagggcctggtttcagctccgggtacacttcctccttccttctgctgcgtggtgtggcctcttccacgtcctcagaatccagctgttactccgtccgcggcctctcagctctagggccctctgcacactggcccccccagakactctgacccatggatcccctgggcccggccaagccacagtggtcgtggcgctgctgtctgaccacgctgctgtttcagctgctgatggctgtgtgtttcttctcctatctgcgtgtgtctcaagacgatcccactgtgtaccctaatgggtcccgcttcccagacagcacagggacccccgcccactccatccccctgatcctgctgtggacgtggccttttaacaaacccatagctctgccccgctgctcagagatggtgcctggcacggctgactgcaacatcactgccgaccgcaaggtgtatccacaggcagacgcggtcatcgtgcaccaccgagaggtcatgtacaaccccagtgcccagctcccacgctccycgaggcggcaggggcagcgatggatctggttcagcatggagtccccaagccactgctggcagctgaaagccatggacggatacttcaatctcaccatgtcctaccgcagcgactccgacatcttcacgccctacrgctggctggagccgtggtccggccagcctgcccacccaccgctcaacctctcggccaagaccgagctggtggcctgggcrgtgtccaactgggrgccaractcmgccagggtgcgctactaccagagcctgcaggcycatctcaaggtggacgtgtacggacgctcccacaagcccctgcccmagggraccatgatggagacgctgtcccggtacaagttctaystggccttcragaactccttgcaccccgactacatcaccgagaagctgtggaggaacgccctggaggcctgggccgtgcccgtggtgctgggccccagcagaagcaactaygagaggttcctgcyrcccgacgccttcatccacgtggaygacttccagagccccaaggacctggccsggtacctgcaggagctggacaaggaccacgcccgctamctgagctactttcgctggcgggagaygctgcrgcctcgctccttcagctgggcactsgctttctgcaaggcctgctggaaactgcaggaggaatccaggtaccagacacgcggcatagcggcttggttcacctgagaggctggtgtggggcctgggctgccaggaacctcattttcctggggcctcacctgagtgggggcctcatctacctaaggactcktttgcctgaagcttcacctgcctgaggactcacctgcctgggacggtcacctgttgcagcttcacctgcctggggattcacctacctgggtcctcactttcctggggcctcacctgctggagtcttcggtggccaggtatgtcccttacctgggatttcacatgctggcttccaggagcgtcccctgcggaagcctggcctgctggggatgtctcctggggactttgcctactggggacctcggctgttggggactttacctgctgggacctgctcccagagaccttccacactgaatctcacctgctaggagcctcacctgctggggacctcaccctggagggcactgggccctgggaactggcacccatggggccccacccatgagtgatggttctggctgatttgtttgtgatgttgttagccgcctgtgaggggtgcagagagataatcaccgcaccgtttccagatgtaatactgcaaaraaaaccgatgatgaggccgggtgcggtggctcacacctgtaatcccagcactttgggaggccgaggcaggcggatcacaaggtcaggagatcgagaccatcctggccaatatggtgaaacccgtctctaytaaaaatacaaaaatttgcygggcgtggtggtgcatgcctgtaatcccagctacttgggaagctgaggcaggagaatggcgtgaacccaagaggcggagcttgcatgagccaagatcgcgccagtgcactcca

SEQ ID NO: 6102 - DNA, 3350 bp, Homo sapiens
gtcaacctcaccagtcaaggaatgagacatgagtggaattaggttgccacttctggagctctgggagaccccaaccccctggcccatccctacctcccagaacctcactggtctgggcgtggctgggcactgagatagtagaactcaggcagcatgatgcagcctcccagaaatgatttctagaacagggcagtcgtgatacttggaggctgggctttgagctcggtcacctttgcacccagcttgggagtgagagagtttaaggtcatcctcyctcaaaaccagtattccagatcatttctctccattccaggaagtttgcatagctccctggacttctgctttgcactgccctgcaggagtgggtggggaaaggaagtggctttgaggcacacagaggggcttgktgaggccaccggaggaagcttctgccaccaatatgggacctgtgcccagcctaccagaagagagcatctgaaaacatgtatcgacatggtaacccctctgcttgaagcctcacatggctccctattgccttggtgctgaacaccctatggctgaccgtggcccagcctctgcaacagctctgcctcctctccagtggtgaagacccagcctgctgagactcctcctgcagttcctcaacatgcctgcatttctgctgcctcagggcctttgcgaaggttgttccttgtaactggaatgcccttccatcccttttttattcaaaaggctgcaattttaattgaagaaagttcccttccaaggttcatgagttgcctgacttgcccaccggtttcctgcaagatcccttggcctggcacttagtgctcaggaaatatttggtgatgggccaactgagtgagaaggtgggatctggtgggaaggaaagcggaaaggtagaaattctgctcacttcctcattcccacctcccaaggaacccctggtgtccctgtggaacccgctttgggaaccggtggttcaggtcagccttttcactttgtactcaaagccacatcgcattgaagccacaggtggggcaaggtcatgcatgacctgagtctccaaatcccttcaccctgtttggttctgcaacggggattaggggagccccacgatttgttttcaaaggatgtccgggctccaggacaggatgccctgggtcacctgatgacaggtgtggtggttggaaagggcctggtttcagctccgggtacacttcctccttccttctgctgcgtggtgtggcctcttccacgtcctcagaatccagctgttactccgtccgcggcctctcagctctagggccctctgcacactggcccccccaggtaaggcgggcatccagacgggatccagtgcatcctcttttagaagaaaggcctgtctccagatccccgagtccctctagcatctcccagaaggtgtcagacgcagcagtgtccagggagcggcagcaggtctctgacccatggatcccctgggcccggccaagccacagtggtcgtggcgctgctgtctgaccacgctgctgtttcagctgctgatggctgtgtgtttcttctcctatctgcgtgtgtctcaagacgatcccactgtgtaccctaatgggtcccgcttcccagacagcacagggacccccgcccactccatccccctgatcctgctgtggacgtggccttttaacaaacccatagctctgccccgctgctcagagatggtgcctggcacggctgactgcaacatcactgccgaccgcaaggtgtatccacaggcagacgcggtcatcgtgcaccaccgagaggtcatgtacaaccccagtgcccagctcccacgctccycgaggcggcaggggcagcgatggatctggttcagcatggagtccccaagccactgctggcagctgaaagccatggacggatacttcaatctcaccatgtcctaccgcagcgactccgacatcttcacgccctacrgctggctggagccgtggtccggccagcctgcccacccaccgctcaacctctcggccaagaccgagctggtggcctgggcrgtgtccaactgggrgccaractcmgccagggtgcgctactaccagagcctgcaggcycatctcaaggtggacgtgtacggacgctcccacaagcccctgcccmagggraccatgatggagacgctgtcccggtacaagttctaystggccttcragaactccttgcaccccgactacatcaccgagaagctgtggaggaacgccctggaggcctgggccgtgcccgtggtgctgggccccagcagaagcaactaygagaggttcctgcyrcccgacgccttcatccacgtggaygacttccagagccccaaggacctggccsggtacctgcaggagctggacaaggaccacgcccgctamctgagctactttcgctggcgggagaygctgcrgcctcgctccttcagctgggcactsgctttctgcaaggcctgctggaaactgcaggaggaatccaggtaccagacacgcggcatagcggcttggttcacctgagaggctggtgtggggcctgggctgccaggaacctcattttcctggggcctcacctgagtgggggcctcatctacctaaggactcktttgcctgaagcttcacctgcytgaggactcacctgcctgggacggtcacctgttgcagcttcacctgcctggggattcacctacctgggtcctcactttcctggggcctcacctgctggagtcttcggtggccaggtatgtcccttacctgggatttcacatgctggcttccaggagcgtcccctgcggaagcctggcctgctggggatgtctcctggggactttgcctactggggacctcggctgttggggactttacctgctgggacctgctcccagagaccttccacactgaatctcacctgctaggagcctcacctgctggggacctcaccctggagggcactgggccctgggaactggcacccatggggccccacccatgagtgatggttctggctgatttgtttgtgatgttgttagccgcctgtgaggggtgcagagagataatcaccgcaccgtttccagatgtaatactgcaaaraaaaccgatgatgaggccgggtgcggtggctcacacctgtaatcccagcactttgggaggccgaggcaggcggatcacaaggtcaggagatcgagaccatcctggccaatatggtgaaacccgtctctaytaaaaatacaaaaatttgtgggcgtggtattgggcgcctgtagtcccagctacttgggaggctgaggcaggagaatggcgtgaacccaagaggcggag

SEQ ID NO: 6103 - DNA, 2902 bp, Homo sapiens
gtcaacctcaccagtcaaggaatgagacatgagtggaattaggttgccacttctggagctctgggagaccccaaccccctggcccatccctacctcccagaacctcactggtctgggcgtggctgggcactgagatagtagaactcaggcagcatgatgcagcctcccagaaatgatttctagaacagggcagtcgtgatacttggaggctgggctttgagctcggtcacctttgcacccagcttgggagtgagagagtttaaggtcatcctcyctcaaaaccagtattccagatcatttctctccattccaggaagtttgcatagctccctggacttctgctttgcactgccctgcaggagtgggtggggaaaggaagtggctttgaggcacacagaggggcttgktgaggccaccggaggaagcttctgccaccaatatgggacctgtgcccagcctaccagaagagagcatctgaaaacatgtatcgacatggtaacccctctgcttgaagcctcacatggctccctattgccttggtgctgaacaccctatggctgaccgtggcccagcctctgcaacagctctgcctcctctccagtggtgaagacccagcctgctgagactcctcctgcagttcctcaacatgcctgcatttctgctgcctcagggcctttgcgaaggttgttccttgtaactggaatgcccttccatcccttttttattcaaaaggctgcaattttaattgaagaaagttcccttccaaggttcatgagttgcctgacttgcccaccggtttcctgcaagatcccttggcctggcacttagtgctcaggaaatatttggtgatgggccaactgagtgagaaggtgggatctggtgggaaggaaagcggaaaggtagaaattctgctcacttcctcattcccacctcccaaggaacccctggtgtccctgtggaacccgctttgggaaccggtggttcaggtcagccttttcactttgtactcaaagccacatcgcattgaagccacaggtggggcaaggtcatgcatgacctgagtctccaaatcccttcaccctgtttggttctgcaacggggattaggggagccccacgatttgttttcaaaggatgtccgggctccaggacaggatgccctgggtcacctgatgacaggtgtggtggttggaaagggcctggtttcagctccgggtacacttcctccttccttctgctgcgtggtgtggcctcttccacgtcctcagaatccagctgttactccgtccgcggcctctcagctctagggccctctgcacactggcccccccagtgtcacgggcatccagacgggatccagtgcatcctcttttagaagaaaggcctgtctccagatccccgagtccctctagcatctcccagaaggtgtcagacgcagcagtgtccagggagcggcagcaggtccttatcatggtccaagggtccctcccagcctccaagtctcaccccatacatgaaaaaaggtggccccggtttcccgccacctcctccacagcaccatctctttgaagacccagtgcccacactccgggggatttgggccctcccctgtctccctccagccccctggggccagtccgctgctgggtatctccaggacgggccaggctcagcaagttccaccaaagcctgcttctctcctgggggttccccatgtctctgggtggccccactgccctcctggtcagcatattgaggaagagtctggkgacacaccagaaaaggacaggatcaagakactctgacccatggatcccctgggcccggccaagccacagtggtcgtggcgctgctgtctgaccacgctgctgtttcagctgctgatggctgtgtgtttcttctcctatctgcgtgtgtctcaagacgatcccactgtgtaccctaatgggtcccgcttcccagacagcacagggacccccgcccactccatccccctgatcctgctgtggacgtggccttttaacaaacccatagctctgccccgctgctcagagatggtgcctggcacggctgactgcaacatcactgccgaccgcaaggtgtatccacaggcagacgcggtcatcgtgcaccaccgagaggtcatgtacaaccccagtgcccagctcccacgctccycgaggcggcaggggcagcgatggatctggttcagcatggagtccccaagccactgctggcagctgaaagccatggacggatacttcaatctcaccatgtcctaccgcagcgactccgacatcttcacgccctacrgctggctggagccgtggtccggccagcctgcccacccaccgctcaacctctcggccaagaccgagctggtggcctgggcrgtgtccaactgggrgccaractcmgccagggtgcgctactaccagagcctgcaggcycatctcaaggtggacgtgtacggacgctcccacaagcccctgcccmagggraccatgatggagacgctgtcccggtacaagttctaystggccttcragaactccttgcaccccgactacatcaccgagaagctgtggaggaacgccctggaggcctgggccgtgcccgtggtgctgggccccagcagaagcaactaygagaggttcctgcyrcccgacgccttcatccacgtggaygacttccagagccccaaggacctggccsggtacctgcaggagctggacaaggaccacgcccgctamctgagctactttcgctggcgggagaygctgcrgcctcgctccttcagctgggcactsgctttctgcaaggcctgctggaaactgcaggaggaatccagtgggggcctcatctacctaaggactcktttgcctgaagcttcacctgcctga

SEQ ID NO: 6104 - DNA, 3385 bp, Homo sapiens
gtcaacctcaccagtcaaggaatgagacatgagtggaattaggttgccacttctggagctctgggagaccccaaccccctggcccatccctacctcccagaacctcactggtctgggcgtggctgggcactgagatagtagaactcaggcagcatgatgcagcctcccagaaatgatttctagaacagggcagtcgtgatacttggaggctgggctttgagctcggtcacctttgcacccagcttgggagtgagagagtttaaggtcatcctcyctcaaaaccagtattccagatcatttctctccattccaggaagtttgcatagctccctggacttctgctttgcactgccctgcaggagtgggtggggaaaggaagtggctttgaggcacacagaggggcttgktgaggccaccggaggaagcttctgccaccaatatgggacctgtgcccagcctaccagaagagagcatctgaaaacatgtatcgacatggtaacccctctgcttgaagcctcacatggctccctattgccttggtgctgaacaccctatggctgaccgtggcccagcctctgcaacagctctgcctcctctccagtggtgaagacccagcctgctgagactcctcctgcagttcctcaacatgcctgcatttctgctgcctcagggcctttgcgaaggttgttccttgtaactggaatgcccttccatcccttttttattcaaaaggctgcaattttaattgaagaaagttcccttccaaggttcatgagttgcctgacttgcccaccggtttcctgcaagatcccttggcctggcacttagtgctcaggaaatatttggtgatgggccaactgagtgagaaggtgggatctggtgggaaggaaagcggaaaggtagaaattctgctcacttcctcattcccacctcccaaggaacccctggtgtccctgtggaacccgctttgggaaccggtggttcaggtcagccttttcactttgtactcaaagccacatcgcattgaagccacaggtggggcaaggtcatgcatgacctgagtctccaaatcccttcaccctgtttggttctgcaacggggattaggggagccccacgatttgttttcaaaggatgtccgggctccaggacaggatgccctgggtcacctgatgacaggtgtggtggttggaaagggcctggtttcagctccgggtacacttcctccttccttctgctgcgtggtgtggcctcttccacgtcctcagaatccagctgttactccgtccgcggcctctcagctctagggccctctgcacactggcccccccagtgtcacgggcatccagacgggatccagtgcatcctcttttagaagaaaggcctgtctccagatccccgagtccctctagcatctcccagaaggtgtcagacgcagcagtgtccagggagcggcagcagakactctgacccatggatcccctgggcccggccaagccacagtggtcgtggcgctgctgtctgaccacgctgctgtttcagctgctgatggctgtgtgtttcttctcctatctgcgtgtgtctcaagacgatcccactgtgtaccctaatgggtcccgcttcccagacagcacagggacccccgcccactccatccccctgatcctgctgtggacgtggccttttaacaaacccatagctctgccccgctgctcagagatggtgcctggcacggctgactgcaacatcactgccgaccgcaaggtgtatccacaggcagacgcggtcatcgtgcaccaccgagaggtcatgtacaaccccagtgcccagctcccacgctccycgaggcggcaggggcagcgatggatctggttcagcatggagtccccaagccactgctggcagctgaaagccatggacggatacttcaatctcaccatgtcctaccgcagcgactccgacatcttcacgccctacrgctggctggagccgtggtccggccagcctgcccacccaccgctcaacctctcggccaagaccgagctggtggcctgggcrgtgtccaactgggrgccaractcmgccagggtgcgctactaccagagcctgcaggcycatctcaaggtggacgtgtacggacgctcccacaagcccctgcccmagggraccatgatggagacgctgtcccggtacaagttctaystggccttcragaactccttgcaccccgactacatcaccgagaagctgtggaggaacgccctggaggcctgggccgtgcccgtggtgctgggccccagcagaagcaactaygagaggttcctgcyrcccgacgccttcatccacgtggaygacttccagagccccaaggacctggccsggtacctgcaggagctggacaaggaccacgcccgctamctgagctactttcgctggcgggagaygctgcrgcctcgctccttcagctgggcactsgctttctgcaaggcctgctggaaactgcaggaggaatccaggtaccagacacgcggcatagcggcttggttcacctgagaggctggtgtggggcctgggctgccaggaacctcattttcctggggcctcacctgagtgggggcctcatctacctaaggactcktttgcctgaagcttcacctgcctgaggactcacctgcctgggacggtcacctgttgcagcttcacctgcctggggattcacctacctgggtcctcactttcctggggcctcacctgctggagtcttcggtggccaggtatgtcccttacctgggatttcacatgctggcttccaggagcgtcccctgcggaagcctggcctgctggggatgtctcctggggactttgcctactggggacctcggctgttggggactttacctgctgggacctgctcccagagaccttccacactgaatctcacctgctaggagcctcacctgctggggacctcaccctggagggcactgggccctgggaactggcacccatggggccccacccatgagtgatggttctggctgatttgtttgtgatgttgttagccgcctgtgaggggtgcagagagataatcaccgcaccgtttccagatgtaatactgcaaaraaaaccgatgatgaggccgggtgcggtggctcacacctgtaatcccagcactttgggaggccgaggcaggcggatcacaaggtcaggagatcgagaccatcctggccaatatggtgaaacccgtctctaytaaaaatacaaaaatttgcygggcgtggtggtgcatgcctgtaatcccagctacttgggaagctgaggcaggagaatggcgtgaacccaagaggcggagcttgcatgagccaagatcgcgccagtgcactcca

SEQ ID NO: 6105 - DNA, 1821 bp, Homo sapiens
ccggaggagctgtcacggtggtttgctggaaaccccctttctgttgggaggattactgggtcacggtttcccaaggacatggaaacccttgctgaagcgctggaaccgctcggcacgaggcgtacgtcggtgggagctgtgtcagcccgctttcggccgtgtagctgctcccatccagactctagaaggggtcctctttgcgtcaggcccaatcacccccctccccgagcgactgcactgggtgtccctgcgccgcgcgtcccctccctctcgcccctccctcctggctgccatagaaaccagcttacaaggtccaggccggcgtccgggtgcactacaggccccccgtccctccttccccacgccagcccctygctccggattggtccttcaggaaacgctgtggggcgtctcggtccccgctgcggagccggcctaggccggagggcggrgtttgccctgggccgctgccggtcaggtcggccgcccctgacagctccgggagcctcaagcgcgacagcggcgccctcacctcgggacatccacacaccgaccgctcctgctccagaggcaacaacccagcgcgcctagcctggcgccgtgcagcgaagcccaagagctggcctcgccacgaaggctgcagacctgggtggctgaggaggaggcgcctctcctccccgcgacccaaggaagaaaggaagccctgccacggggtgtctgcgaagtggggtcagaagaaggctgatgctggacttcatggcagtggcctgtttcgtagtgttaggttccactgcacaccagagggaggcagcaagtggaattgggtgaaactggaccccagactggccttgtcactcactagctctctgagtttggacaaatgtctcatcctctttagtaatctcatcaaggcacctgactcggccccccagtctcccaaggccactcccccaggtatggcacagggcctcgcctcactaaggcagcagcacagcacacttgacttcatgcttggcaccaaagctgatggtgagaccattctaaaaggcctccagtccattttccaggatcaggggatggtggagttggtgcacacctggaaggaccatggctatttagcaacatgcacaaacaagaacggcagctttgccaatttgagaatttacccacatggattgtgttgctggatcttcagagttacaatggtgatgcacaaggcaaagaagagatcgacgattgaggtggtgtatgatgaagattcatcttatcaaaatataaaaattctacactcgaagcagtttggaaatattctcatcctgagtggggatgttaatttggcagagagtgatttggcatatacctgggacatcatgggaagtggcaaagattacactggcaaagatgtactcattctgggagagagagatgggggcatattgtgtgaaatagtcaaactaaaaccaaagatggtcactatggtagagcttgaccaaatggtgatcaatagatgaaagaaatatatgcgaaaaacgtgtggcgatgtcttagacaatcttaaaggagactgctatcaggttctaatagaagactgtattccggtactgaagaggtacaccaaagaagggagataattttattatgtgattaatgatttaacagctgttccaatctccatgtctccagaagaagattccacatgggagtttctcagactgaatcttgacctctcaatgaaagtattgaaacaggatgggaaatactttacacaggggaactgtgtcaatctgacggaagcgctgttgctctatgaagaacagctgg

SEQ ID NO: 6106 - DNA, 1303 bp, Homo sapiens
agggcggrgtttgccctgggccgctgccggtcaggtcggccgcccctgacagctccgggagcctcaagcgcgacagcggcgccctcacctcgggacatccacacaccgaccgctcctgctccagaggcaacaacccagcgcgcctagcctggcgccgtgcagcgaagcccaagagctggcctcgccacgaaggttgaaccagccaaattttcgagacagctcacggcttagaggaaggttcatctaaataaaggccggctaaagtgacattgcagggattaaatccttctttggctgcctgtgtgaccagaaggcttatttgcaagtttcttctttcctggggtccagattattaggtctccagcgccctgcagcttgacagaaagagaagcatgaaatgaaggtcagagatgagatcccgcagcagggacgtgggggcctcccaggggcatttacgcaccagagtgcaagattctctggccatcaagggaaatagcaaacagaagcctttgtcctggggcacagccacctaccacaaagcatcagactccacgtctggccagaaagttcctggagtcccatcaggccagtgggtatgtaacatgtgcctaattgtacagctagagcctgcaagttcaacgtgagggaaggtgggaaatgtcttgagtgaggcgagcagctcctggctgggctgggcagactcagctaccacgttcactgccttcctctcactaaagccgagagggaggctgctcagctctcaggaaaactcttttgaaccctgggcacctgctgtcctcagttggcatctcccaccctctgagcctcttctgctcctgcacaacctgcctcttcgctgagatggagacgtgagcccccgtggacgatgactgcagtgtatatgaatggaggtggcctggtgaacccccaytatgcccggtgggatcggcgcgacagtgtagaaagtggctgtcagaccgagagtagcaaggagggtgaggagggacagccccgccagctgacgcccttcgagaaactgacacaggacatgtcccaggatgagaargtggtgagggagatcacgctggggaaacggataggcttctaccgaattcgaggggaaatcggaagtggaaacttctcccaagtgaagcttgggattcactccctaaccaaaggaataggagaaagagcaaatttgggagggaaaaagttgagtgaaaacactgacatccagaaggagctgtctactgggcatgctccagtcatggacaagggcatgaggtcagaccaggatttgcat

SEQ ID NO: 6107 - DNA, 1194 bp, Homo sapiens
atgagtgaaagcaagagtaaagaacagggaaggaatgatggagagaatgaaccagaaaaggtggccattaagatcctggacaagaccaagttagaccagaaaacccagaggctactatcccgagaaatctccagcatggaaaagctgcaccatcccaacatcatccgcctttacgaagtrgtggagaccctatccaagctgcacttggtgatggagtatgcagggggtggggagctcttcggaaaaattagcactgaggggaagctctctgaaccagaaagcaagctcatcttctcccagattgtgtctgccgtgaagcacatgcatgaaaaccaaattattcatagagatctgaaagcagaaaatgtattctataccagtaatacttgtgtgaaggtgggcgattttggattcagcacagtaagcaaaaaaggtgaaatgctgaacactttctgtgggtctcctccctaygctgcgcctgaactcttccgggacgagcactacatcggcatttacgtggatatctgggccttgggggtgcttttgtacttcatggtgacyggcaccatgccatttcgggcagaaaccgtggccaaactaaaaaagagcatcctcgagggcacatacagtgtaccgccgcacgtgtcagagccctgccaccgactcatccgaggagtccttcagcagatccccacggagaggtacggaatcgactgcatcatraatgatgaatggatgcaaggggtgccataccctacacctttggaacctttccaactggatcccaaacatttgtcggaaaccagcactctcaaggaagaagaaaatgaggtcaaaagcactttagaacatttgggcattacagaagagcatattcgaaataaccaagggagagatgctcgcagctcaatcacaggggtctatagaattattttacatagagtccaaaggaagaaggctttggaaagtgtcccagtcatgatgctaccagaccctaaagaaagagacctcaaaaaagggtcccgtgtctacagagggataagacacacatccaaattttgctcgattttataaattgcactagactgcttgtaactaaccaagatgattgttgctgcttctaaatttttttcaaggacaacttgagtggagacatttttgtaatttttaaataaacttaaatttgagatatgc

SEQ ID NO: 6108 - DNA, 1732 bp, Homo sapiens
agggcggrgtttgccctgggccgctgccggtcaggtcggccgcccctgacagctccgggagcctcaagcgcgacagcggcgccctcacctcgggacatccacacaccgaccgctcctgctccagaggcaacaacccagcgcgcctagcctggcgccgtgcagcgaagcccaagagctggcctcgccacgaaggttgaaccagccaaattttcgagacagctcacggcttagaggaaggttcatctaaataaaggccggctaaagtgacattgcagggattaaatccttctttggctgcctgtgtgaccagaaggcttatttgcaagtttcttctttcctggggtccagattattaggtctccagcgccctgcagcttgacagaaagagaagcatgaaatgaaggtcagagatgagatcccgcagcagggacgtgggggcctcccaggggcatttacgcaccagagtgcaagattctctggccatcaagggaaatagcaaacagaagcctttgtcctggggcacagccacctaccacaaagcatcagactccacgtctggccagaaagttcctggagtcccatcaggccagtggaaaaggtggccattaagatcctggacaagaccaagttagaccagaaaacccagaggctactatcccgagaaatctccagcatggaaaagctgcaccatcccaacatcatccgcctttacgaagtrgtggagaccctatccaagctgcacttggtgatggagtatgcagggggtggggagctcttcggaaaaattagcactgaggggaagctctctgaaccagaaagcaagctcatcttctcccagattgtgtctgccgtgaagcacatgcatgaaaaccaaattattcatagagatctgaaagcagaaaatgtattctataccagtaatacttgtgtgaaggtgggcgattttggattcagcacagtaagcaaaaaaggtgaaatgctgaacactttctgtgggtctcctccctaygctgcgcctgaactcttccgggacgagcactacatcggcatttacgtggatatctgggccttgggggtgcttttgtacttcatggtgacyggcaccatgccatttcgggcagaaaccgtggccaaactaaaaaagagcatcctcgagggcacatacagtgtaccgccgcacgtgtcagagccctgccaccgactcatccgaggagtccttcagcagatccccacggagaggtacggaatcgactgcatcatraatgatgaatggatgcaaggggtgccataccctacacctttggaacctttccaactggatcccaaacatttgtcggaaaccagcactctcaaggaagaagaaaatgaggtcaaaagcactttagaacatttgggcattacagaagagcatattcgaaataaccaagggagagatgctcgcagctcaatcacaggggtctatagaattattttacatagagtccaaaggaagaaggctttggaaagtgtcccagtcatgatgctaccagaccctaaagaaagagacctcaaaaaagggtcccgtgtctacagagggataagacacacatccaaattttgctcgattttataaattgcactagactgcttgtaactaaccaagatgattgttgctgcttctaaatttttttcaaggacaacttgagtggagacatttttgtaatttttaaataaacttaaatttgagatatgc

SEQ ID NO: 6109 - DNA, 5097 bp, Homo sapiens
cacatttcttagcttctctgagcctccatttcagcatctgtaaaatgttactacctactttataggttttctgatgaggcttaagtgtggttgtgcatgtgaccatcttagcatagtgtgtggcaatggtaagcactcagtgctgtcagctgtttttaccgctgttattatattactgtgttttcccatgtcattaggtctgtgatccaggcttcagcagacaatccaggctgatgcttttgctgagtgcrctaagggatgctggcctggcgggatggtgaactggaagcagaaacgtcatcctctctcttccttcttgccatgcaggtgtggatgtgtgggggccgcatggaggacatcccctgctccagggtgggccatatctacaggaagtatgtgccctacaaggtcccggcyggagtcagcctggcccgggtaagaaccttaagcgggtggccgaagtgtggatggatgagtacgcagagtacatttaccagcgccggcctgaataccgccacctctccgctggggatgtcgcagtccagaaaaagctccgcagctcccttaactgcaagagtttcaagtggtttatgacgaagatagcctgggacctgcccaaattctacccacccgtggagcccccggctgcagcttggggggagatccgaaatgtgggcacagggctgtgtgcagacacaaagcayggggccttgggctccccactaaggctagagggctgcgtccgaggccgtggggaggctgcctggaacaacatgcaggtattcaccttcacctggagagaggacatccggcctggagacccccagcacaccaagaagttctgctttgatgccatttcccacaccagccctgtcaygctgtacgactgccacagcatgaarggcaaccagctgtggaaataccgcaaagacaagaccctgtaccaccctgtcagtggcagctgcatggactgcagtgaaagtgaccataggatcttcatgaacacctgcaacccatcctctctcacccagcagtggctrtttgaacacaccaactcaacagtcttggaaaaattcaataggaactgagccctcatgtccccttggcaggccccccagggtctggcactcactgcagacttcctctttcaagggaggcagggcccctgtgggcactaggtgtaaaaggtgctggccaaatggttcagggtgaagagggctcttgattcaggggctggggtctgcctggtccttgagcccctgagttgtgggggtagggtgaagagcatatcccacaagaggccccacagggagcagagactgctttaatccctgctgacatcacggaaaagcaacagagccttttcaactttgtcactatgtccccttgaacattatgtgggagaacaccaaggtagcctaggccacccaraagtgagtcctgcgaggttgcccagccctcagatggctctcctacatgatggtgctttagaaacaaaggtaaaatttgcctgtttggggcagcttttagtatcgatgccactcatctgcagcagaagagaaagaagtcctcttggggctttttagtttctgccgtcctgggggraacattgcagttactgcacagcttctgttctctgtcacaaccccaggtgatttggtcsggtcaaaggccatacttggggccctaagagtgttcagtattgaatgctgatcagctgccaggtgaggagtcagaagagggagcccccctagacatttctttgcagctatggacatgcgggatatctccccctgctctctgggtatttgaaatgtcaattttagcactctycaggcacaaggacagccyagcaccagctttacagggcagtgtttcagatggccctgagcccacggaaaaggccaggtagacctccaaactagaaatgctggctgatttgccctgatccatgcttccatttccctgtctctcttccccaggcaattactggcctcaaaagaggaacagaggtgctgcgaggtgctcacctcacagagtctggaggcctccaggatcaactgtgggcaaagtgcctgcctctgacctcatcatggttctagttctcatacagaactccagaatttttaaagaactctataattggattgcaaactaggatgctacataggattctggtattccacatccaatatggatttctagaatgctgtgattaaaggagccagccaggtgtaatacagtcaaggcagcccccagcctagagacaatctgtgaaatccaaagttggtggtgttgggaaagcagggggacatgtgtccctcagctcagcagaggctgtggtacaacatggtccttggtgaagacctgcacccctggaacctcccaccatcrtcacaactgtagtctcatttgcagtgragaaaagaacccgaygtcccacagccagatatacacccagctccatgccagcccttcatgtttaccttttgctttgttaattacatgtcagactcctagagggcctccagactaataggaagcatttctgtaaccaacctgccacccactgattcagaaatggaaatcacattccacaatctatggcttccaccagctagcccaggaaatacttgaaatcagcattccaattagtgttgagtctcttgattgtgtcatttaccaattaaataactgagacctaagtctgggaacagagccacgaatctgcctttgagatgctggcagatctcaaggccatcaattattgggggagggagggacaaacactcccaatcatccaccagtcagactgaatgtgtagctggcgaggaattacttccacttctggcccagcacaagccctgctttggccacctgtctgcaagagaggcggcccctgtgcttgcaacgcttacgtgttsatcccagtgtccttttccaaatgagtgctgtagctttagaagtggccctctatagaaagaagtcaaaagatgaggccccttctagaatctaggataacaagagtgttgacagtttgaggagtcgaattgagattcatcatcaaagagcaatgcagcgtcgttaaaataaaaactgtgccttttaaaaagaaaaatgcaaatatagagcaaatccctaaacttgaaccatttcctagtgccttgctagacaaacataaaggggcagggttgtggggaggggaacgtttttggtggtgtgtgcagttcctactggatgagtgtgtgtttcttaatgtctcatttcaagcaggagatgttgggtctggagcaagatctgagactgagatgtcccccaagggtgacaggtcagatttatttcagtcagtgcaagtcacactccaaactaaaggctgggcagtgcgtttagtctgtggcctagaagacctcatcagcccccgagaggaggccttgcattacctcactgggacctgtttgggggccatccctgcggtccaccctctgaacccccagcatgtttgtcctgtttctcaccattgggttaaggggtgccgagcactagctagacttccacatagtcccaccccaagtgggcggcagtgttcctggcatgaccaggattcctgtgaaagcaggagcagcagcaagccgtcccgggcctgcctttcccatcctttggttctcctttccagtctgggttcacaccctgaaaagggatgggtgtgtcctctgagcactcyggcatttgtcattgctgagcccatatcagtaggtcctgggacttgacaaagtatgtgggaggggaaggaaggacagaacttgactggctccatttcatggaccaactgatcaattgccagtactaagccactcattgttatggcttcctttttgaaaaccacctgtctcaaggattcaggtttctgctcacatccccagctgatgctcaataaaactcagccaggagcatatggagatgctgacagccaggtaatgggtgagactgtggggtcccttttcctctaaagcctttactctgaggataaggtcacaaagtagggtgtgacttgaaagtatcgtgaccatgtggcccaccagcagcctttccaaaggggaactccagagacatttcataatgcaaacagcactgttgctttaagaacaaggcctttggaggtggctaaacttgcacgcacgtgtgtgaaaagccatcccatcttctgcctccagttggagctttcagctgttaaaacagtcagaaactattgattcttccctttaggaaaaaatgctcaggcagaacggggtacatccacaggaggaatcggacgagaggatgtgacattcggtccaggagagaaagagcagtttctgttaaagatgtaacaaatggatttccaaagtctacatgacattcacttttcaaacttcccaccagttgaatttctttttttccttaagaaacaggtgatgtcttggaaaacagctccttatgtctctctgtgcatctccattttcctagtctctggagtctcaaaaagagtggcaaagcactttacagtagtaactgaggaatcagagtctctgcttcagcgatatctagtttgtacagttgggtgatcttttgtaattcctaggaggtaatgcatttttaatgttttctgaagctttgtaagtgtgagagagggacaagaagtgcagttctgttctggaattccttattgctttcaacggacactctttgtgaaaaatccaagtaatattttagttcaaacktgatcttgagccaaggcccactgccacctctgggatgggagtcggacctacataccaagtgacaagttcaccttaacatctgcttccagaatggctttgattcagccgtgccaggcaamagaacagggtcagactcctgctctgttattggcttgaagactaggatcccaaaggggttggaggcagggaatatttgaaaattcagactggaattccaggccaaaagctcaagaccaccagcctctcctcctgcctggaaaaataagcctttgtgaaagacwgatttaccatgtacaattgtgattgtgaacrttgttgagtaaacctccagactttctct

SEQ ID NO: 6110 - DNA, 8787 bp, Homo sapiens
agggctcacacagtcgacaaaagaaaacgtttttcttgggagatgggcagaagctgaaggactggcatgacaaggaggccatccggagggacgctcagcgcgtaggaaatggagaacaaggaagaccttaccccatgaccgatgctgagagagtggatcaggcataccgagaaaatggatttaacatctacgtcagtgataaaatctccttgaatcgctctctcccagatatccggcacccaaactgcaacagcaagcgctacctggagacacttcccaacacaagcatcatcatccccttccacaacgagggctggtcctccctcctccgcaccgtccacagtgtgctcaatcgctcgcctccagagctggtcgccgagattgtrctggtcgacgacttcagtgatcgagagcacctgaagaagcctcttgaagactacatggcccttttccccagtgtgaggattcttcgaaccaagaaacgggaagggctgataaggacccgaatgctgggggcctcagtggcaactggggatgtcatcacattcttggattcacactgtgaagccaatgtcaactggcttccccccttgcttgaccgcattgctcggaaccgcaagaccattgtgtgcccgatgattgatgtaattgaccatgacgactttcggtacgagacacaggcaggggatgccatgcggggagcctttgactgggagatgtactacwagyggatcccgatccctccagaactgcagaaagctgaccccagcgacccatttgagtctcccgtgatggccggtggactgttcgccgtggatcggaagtggttctgggaactcggcgggtatgacccaggcttggagatctggggaggggagcagtatgaaatctccttcaaggtgagccagctctccagacgccccgttcttggcacagcctcctgagtgcctgtcccagtaggtgtctcagcttctgcctgagcttggaaagactggaggcctcagggttctgtagcccttctgcccatcaggtgaagaagacaggggctcatgggccactctttgttgtggggtggggggrtgtgggagggaaggggagtactctccagctgccaaaggctggtcctcaccacagctctgactggcatttgccttgtgtcttcttaagatgttggaataaggtcttgcttctactcagatggcaggtctgagattgagatgtccagcaaataagcagtgggccagagaagctaggaaggccaaacrggatacgtaggcctagaggagtcctctcagtcaccccaagttttccctttgtacctgttgctctaggagtttgacaaagaccagtgagcataagctccagttgtaaagttacaaaggcctggattcagatcccagctccatcatcaggagctatctgactttgggcaagttagatcacccccccgagctttctttcctcatctgaaataagggaataataatactacctagcttacagagctatcgtgaagattaaatgagatcatgtctagaaagtgcttagcatacaacctgggaacatgaccagcaattaataattggtagaaattgttaaagtttcggtgagtaaatatttactgtaacctacttgaccagcctatggactctggaagctttctgacagtagtggtaaaggagttactagttaactaataactaattaagcacccaaacttccaaggctacattctccactttatttgtgggagtctgtcttgttctcaagtgaaagcttggaccttctgaggggagggttagcttgtcccatgcccttgtggcctgtcagagtcagcttctaacagcttagacccctggctaaggcatatccccagcccacaagggacagatagcaccattactgatctgacccctgtgaacacacaactctgatgccccctcatcgggcctcaactttcagtgcaaaggaccattgtcaggcacagtgaattaaggctttggtattggtgccagagtgccacgatcagatcctagctctgccgtgtcctgccagctgtgtgatcttgggcaaggaatcctcacctcactgagccttggtttctacttccataaagtgggtttaatgaaacgttaatcctcacagagttgttgagaggattaagtgagaccatgcttattaggtgcttcttaataaattatcctaaagattattatcaatacattaatattattatctgcaacagtggttgagtagttcagaactggagaacataaattcttgattagccaaaaaaaaaaaaaaacctacaattcttttgatgttatttaggtttgaaaagcagtttatatcctttttttttcttttcttttcttttgtttttttttttttgagatggagtttcactctgctgcccaggctggagtgcagtagtgcgatcttggctcactgcagcctccacctcctgggttcaagtgattctcctgcctcagcctcctgagtagctgggactacaggcgcccaccaccacgcccagctaatgtagagatagggtttcgacatgttgaccaggctggtcttgaccccctgacctcaggtgatccacccacctcggcctttcaaagtgctgggattacaggtgtgagccactgtgcctggccagtttatatctattttaaccaccagagttctgaagttgtctcccataaggagaccagccccctaaataaaattaatattcacataagggtaatgttcaaaatatgtaacaactgtgataacacaagcacatccagtcagaacagataccagctataaacaatggtgcatccactccagcgtgtaacaagtgaagttcggtcctgatcatagctaacaggacagtgtgccaagcccttcatacatgctgacttgtttaatcctcacaacaaccttaggagagttgtatcattattatacccgtttcaccaggaaggcaagcaaagctcagaccaaggcctcgcacagccggaagaagcagaactggggcccaaacgcaggtctgcttgactccaaagcccacgctctgacctgctatttttgttgttgtttaaatcatacccagactgttctgaaaacctgccatgttttatggacctctgcctcaccctttctgggattttttttttttttttgcctcttctggtattattcctagtttacttggatattctgcaatttcttagttaatggaattaataacaatctaagtcggaagtggcaaatagggccaggaatggtggccgagatgggaggatctcttgagcctaggagtttgagaccagcctggacaacacaacacgaccccatctcattaaaaaaaaaaaaaaaaagaaggaaagaaagagagagagagaaggagtggggagggagagagggagggggaaagggagagagagagacagagagagagacacagcaaataggtttctactccytgccaggccaactctgatccattggtaggggctgccccaggtgggtgttgatatgcattctgaggctgcttccaagcttatcagcaaagagtagtcmgtgggggagggatctttttgtgtttcactcaccgccatatcccaagtacctaaagcctggtccaacacagaaaagacactatgagaccaatttttatgagtcataatttttattattgkattaaatcttttctaaaattatatttatataaatatcttataaatattctaaaaatatgtaaaatgtataaaagtctagtagttctgatataacactgtcagccataattctggttatcatgttaaaatactacatataataaaataactaaattcaagaccagcctggccaacattgtgaaaccccatctttactaaaaatacaaaaattagccaggcgtggtggtacatgcctgtaattccagctactcaggaggtggagacaggagaattgcttgaagctgggaggcagaggttgcagtgagccgagatcgtgccactgcactctaatctgggcgacaaagcgagactccatgtcaaaaaaaaaaaaaaatcaaaaacctttatcaaattttaactgggattattctatttttctcacttatttagaattattattctaaattcttctataaaggcatttacaataaattctagtccaacattgcttttcataaaaaagactccaayaaatataagtataaaaaataatacaattaaaagtatacaaatatatattccaattttattaaatatcatattttttccagtctacaacagactttattactatgaagtctgtattactgtatagaatctataatatcctcataataatcctattaaaatattgtattaaatacaaaaaaaagacaccatcaaaaaccccctgcatcctactaatgagaactaaactcagtccaaaacatattttccaagaaaaggctaaaaaacacactaggtctgatacaactacaactaaaaattaccaaccttcctaaacaagagcccttctaactacagatggcaatcaayattaattmttaccaacacaaccaaacaatttatgaccaaaaacttcgtgaaacaaagtggcaaatgtaagaggccgtgtttgcccatttccctttgctgggagaatttcacaaagcccctgactccgggacactgtgcagctctctggaaaaatgttttaaaggcaaaacaggatagaacgcatggccccccatgtctctcgcctgagtcactaattccatcaaagataaatgaccctagtcctcgcctttctctactcataaaataacacccgacaagaatagtgactatgtttctgtaatctataaccagatgtactctaacacccaaaccttgatgtaatttttcacatactaaatcttcaccacctatgtataaactaaaatactacgttggaggagtctgagagaacctttctaamagcctcctcccaggctacaggccttggtctataatcctcaagaagacttctaaataaaactaactttaattctttaaaagcttcgttttttttctttagttgacagcagttaacaaatattggctgaatactccaagtaagtgtgtccctggccagaatcagcctccaagctcctaactggctccttgctctagaagaccctcttcagaacccccaccatggagaacagtgaatggagaaagatttgcacaaaggaatttctaaaccagcccaaaatgatttcattctatgtgtttcaaagacccatctactgatgctcatcaggcaattatggcagaacaaatggcatttttctccacagttatttacaatagacttggtaatgaagccatattggaagtatctcatccgggagggggaaggaggctggcttacatttccatttgatccaattatgtccgtcactctccagaggaaatgagacagtgtaatgaggaggctcctgaggtccggaagggagacttttctccctgggctttctctctcctggcttggaaaaggagagtttctggagccagcaacagcccatctgccagtgcactgtctcccaggaccctgtggaaagactgcctgcagggctgaggggaacaggtgagcccattcatccctggcagcgccctgctggaatgcaggtgttctctttcagccagagctggcatttacgaaggaccgaattccctctgattcatctctgctaagatcccttttcttggtgacagagagaagcctggtctgaaaggcatgagtgtattttcagaaattaagatcaatcaacacgtaccttcagggctgagggctgattccagaccggattctctatcctgatgagaaaatccccaaaaagtgtcccaacagctctgaaatttctagaaaagtcattgactttccctttccctccctccttctctgtctgtctctctcagcagagcaaagttctcacgtggaagtcagaatcttcctagttctagtggttggacaagtctttaactccatagcctagctccagctaggttcatgagctggccctactgctctctcctttccccttttcctcttatcccattgcattagtctggattcttgcttacagataaccaaaaccttagtcaatctgatttaagcaaaaaccagaattgataggctcacataactgaaattccagggtagaccctaaggccgggctggatgcagggactcagtcatctcactcgggctaggtctctctcaatgcctagtccctatttcatctgagttggcttccctctcaggtgggctttttctcatggagatcctcagcagcccatggaaggagagtgtttttcccatcatcttgtacaagtccccaggttgagtctcattggcctgctggccccatgcccatccctgaacaatactgcaattggtcacctgcagtcacatgccctgtgactgcaggaaggtggggatgggctagttacccaaaggaaagtccaggtgctgtgcccagaagggagaatggatgtggggcagagcaaaccgtagatgtctaccttacccagccagacaagactgcatgtaagaaccaggcttacgggccagcccctctctgcaggcccacactgtacactcctgaaatgccattccttagtctggccaaccctcattcacccttccaatctcagcttatatagatggctccccatgctgcctaggaactaccccacattgcactcccatctctgcatgctccctggaggcagggaggaggttttgtccacctctatatccccagtctctggcccacatcagtgttttcagtaagtgttagtgtgttagtggcatcacttccaactgatatacctccttggtactacccttcccagacttaggaggccatctttggacaatggtgtatggtgggaaagtgctcagcaaggaggctctccttccatcctaggaccctgggccagttgtttcacctctggtcctcataccccagactgtgctgatacggttttccttcctaccccacaagataggatcaaatgagatgctgtgtggacagccctctgacatacacagatatgaggggttgtttggattagggggggaggcagcaggatgagcagaaaggaaactgcacagtgtccccaggaggccatggttaggatatctccaactatgagatacgggagacagaaagtatccaaccaggacaatgtgaccaaactaaagtgagaaaaatgtaggctttggggcagtgtaagtgggtatatcttctgtgaatagcaatttggcaaaatccattacatttcagagcaagcacattctttgacctgaaattccatgcccaggagtttatataagagagacagtgatgagcaaagatttatttgctgaagtgttacttaccatagcagaagattgaaaatgacccaaatgcacgtcctttggggataaataagttagagcatatctaaacaagaaaatattacgtaaaataaattggaggtctccacaaaaaaaaaaaaaaaaaaaaacccattttttttcagacaggatctcacaccgttgcccaggctggagggcagtgacgtgatcagagctcactgcagcttcaacaccccagggctcgagcagttgtcccacttcagcctcccaaatagctgggactacaggtctacaccaccactcccggctaattttttaatattttgtaatgacagggtctccatatgttgcccaggctggtctcaaactcctggcctcaagcagtcttcctgcctcgggctcccaacatgctggcattacaggtatgagccaccgcgcccagcccatctcacttctgaaaatgactcagtgccatgaacccttcatccctagtggcctttgggggtgggaggtcttcaaagtacagccgtctctttctacctaatgtgtgtctgcaacatcgaacttgttcatcataagtacgtattacttctgtaaccaggaaaagttacaagaagaaggggccaggcacagtggctcatgcccgtaattctcacattttgggaggtcgaggcaggagtattgcttgagcccaaaagttcaagaccagctttgggcaacacagtgagacctcatctctaaaaaaaagttcttttrattagctgggcatggtggtgtgctgcgtgcctgtagtcccagctacttggaaggctaaggtaggaggaggattcctttagcctggaggtcaaggctgcaataagccatgttcatgacactgcactccagcctgggtgatagagtgagaacttgtctcaaaggaaagaaaaaaaaaataagaaaatgttgggttctcagcacttccagcccacccccatccatatacattccagcacattgttggggccatttgcaagctctgagatgagattctgcacaagtcagcagtgcagagactcccagggaaggcctgaggccgccaagagcaactctgcagggtctgctccaagaggcagaggtgggccccaccgtccttggcaaaatggagattggtctgagggttccatgaggcaggcttgcaggagcaagggagtgatagaaagccatgtgaggggacgagagggaggacaccctcccctgcagaagtcaggaaggtctttgagcttgttctgagaggaaaacccattctctgggtagaggaatgaagactcagaggagactggggttcgctttgtgtgatactgatatggttactgaaaggctagcccagtcccaggctacgtgaacagactt

SEQ ID NO: 6111 - DNA, 452 bp, Homo sapiens
agggctcacacagtcgacaaaagaaaacgtttttcttgggagatgggcagaagctgaaggactggcatgacaaggaggccatccggagggacgctcagcgcgtaggaaatggagaacaaggaagaccttaccccatgaccgatgctgagagagtggatcaggcataccgagaaaatggatttaacatctacgtcagtgataaaatctccttgaatcgctctctcccagatatccggcacccaaactgcaacagcaagcgctacctggagacacttcccaacacaagcatcatcatccccttccacaacgagggctggtcctccctcctccgcaccgtccacagtgtgctcaatcgctcgcctccagagctggtcgccgagattgtrctggtcgacgacttcagtgatcgagatctgccgactgcatcaactccctctccctttgtgtgctag

SEQ ID NO: 6112 - DNA, 5652 bp, Homo sapiens
cacagtcgacaaaagaaaacgtttttcttgggagatgggcagaagctgaaggactggcatgacaaggaggccatccggagggacgctcagcgcgaaatggagaacaaggaagaccttaccccatgaccgatgctgagagagtggatcaggcataccgagaaaatggatttaacatctacgtcagtgataaaatctccttgaatcgctctctcccagatatccggcacccaaactgcaacagcaagcgctacctggagacacttcccaacacaagcatcatcatccccttccacaacgagggctggtcctccctcctccgcaccgtccacagtgtgctcaatcgctcgcctccagagctggtcgccgagattgtrctggtcgacgacttcagtgatcgagagcacctgaagaagcctcttgaagactacatggcccttttccccagtgtgaggattcttcgaaccaagaaacgggaagggctgataaggacccgaatgctgggggcctcagtggcaactggggatgtcatcacattcttggattcacactgtgaagccaatgtcaactggcttccccccttgcttgaccgcattgctcggaaccgcaagaccattgtgtgcccgatgattgatgtaattgaccatgacgactttcggtacgagacacaggcaggggatgccatgcggggagcctttgactgggagatgtactacwagyggatcccgatccctccagaactgcagaaagctgaccccagcgacccatttgagtctcccgtgatggccggtggactgttcgccgtggatcggaagtggttctgggaactcggcgggtatgacccaggcttggagatctggggaggggagcagtatgaaatctccttcaaggtgtggatgtgtgggggccgcatggaggacatcccctgctccagggtgggccatatctacaggaagtatgtgccctacaaggtcccggcyggagtcagcctggcccggaaccttaagcgggtggccgaagtgtggatggatgagtacgcagagtacatttaccagcgccggcctgaataccgccacctctccgctggggatgtcgcagtccagaaaaagctccgcagctcccttaactgcaagagtttcaagtggtttatgacgaagatagcctgggacctgcccaaattctacccacccgtggagcccccggctgcagcttggggggagatccgaaatgtgggcacagggctgtgtgcagacacaaagcayggggccttgggctccccactaaggctagagggctgcgtccgaggccgtggggaggctgcctggaacaacatgcaggtattcaccttcacctggagagaggacatccggcctggagacccccagcacaccaagaagttctgctttgatgccatttcccacaccagccctgtcaygctgtacgactgccacagcatgaarggcaaccagctgtggaaataccgcaaagacaagaccctgtaccaccctgtcagtggcagctgcatggactgcagtgaaagtgaccataggatcttcatgaacacctgcaacccatcctctctcacccagcagtggctrtttgaacacaccaactcaacagtcttggaaaaattcaataggaactgagccctcatgtccccttggcaggccccccagggtctggcactcactgcagacttcctctttcaagggaggcagggcccctgtgggcactaggtgtaaaaggtgctggccaaatggttcagggtgaagagggctcttgattcaggggctggggtctgcctggtccttgagcccctgagttgtgggggtagggtgaagagcatatcccacaagaggccccacagggagcagagactgctttaatccctgctgacatcacggaaaagcaacagagccttttcaactttgtcactatgtccccttgaacattatgtgggagaacaccaaggtagcctaggccacccaraagtgagtcctgcgaggttgcccagccctcagatggctctcctacatgatggtgctttagaaacaaaggtaaaatttgcctgtttggggcagcttttagtatcgatgccactcatctgcagcagaagagaaagaagtcctcttggggctttttagtttctgccgtcctgggggraacattgcagttactgcacagcttctgttctctgtcacaaccccaggtgatttggtcsggtcaaaggccatacttggggccctaagagtgttcagtattgaatgctgatcagctgccaggtgaggagtcagaagagggagcccccctagacatttctttgcagctatggacatgcgggatatctccccctgctctctgggtatttgaaatgtcaattttagcactctycaggcacaaggacagccyagcaccagctttacagggcagtgtttcagatggccctgagcccacggaaaaggccaggtagacctccaaactagaaatgctggctgatttgccctgatccatgcttccatttccctgtctctcttccccaggcaattactggcctcaaaagaggaacagaggtgctgcgaggtgctcacctcacagagtctggaggcctccaggatcaactgtgggcaaagtgcctgcctctgacctcatcatggttctagttctcatacagaactccagaatttttaaagaactctataattggattgcaaactaggatgctacataggattctggtattccacatccaatatggatttctagaatgctgtgattaaaggagccagccaggtgtaatacagtcaaggcagcccccagcctagagacaatctgtgaaatccaaagttggtggtgttgggaaagcagggggacatgtgtccctcagctcagcagaggctgtggtacaacatggtccttggtgaagacctgcacccctggaacctcccaccatcrtcacaactgtagtctcatttgcagtgragaaaagaacccgaygtcccacagccagatatacacccagctccatgccagcccttcatgtttaccttttgctttgttaattacatgtcagactcctagagggcctccagactaataggaagcatttctgtaaccaacctgccacccactgattcagaaatggaaatcacattccacaatctatggcttccaccagctagcccaggaaatacttgaaatcagcattccaattagtgttgagtctcttgattgtgtcatttaccaattaaataactgagacctaagtctgggaacagagccacgaatctgcctttgagatgctggcagatctcaaggccatcaattattgggggagggagggacaaacactcccaatcatccaccagtcagactgaatgtgtagctggcgaggaattacttccacttctggcccagcacaagccctgctttggccacctgtctgcaagagaggcggcccctgtgcttgcaacgcttacgtgttsatcccagtgtccttttccaaatgagtgctgtagctttagaagtggccctctatagaaagaagtcaaaagatgaggccccttctagaatctaggataacaagagtgttgacagtttgaggagtcgaattgagattcatcatcaaagagcaatgcagcgtcgttaaaataaaaactgtgccttttaaaaagaaaaatgcaaatatagagcaaatccctaaacttgaaccatttcctagtgccttgctagacaaacataaaggggcagggttgtggggaggggaacgtttttggtggtgtgtgcagttcctactggatgagtgtgtgtttcttaatgtctcatttcaagcaggagatgttgggtctggagcaagatctgagactgagatgtcccccaagggtgacaggtcagatttatttcagtcagtgcaagtcacactccaaactaaaggctgggcagtgcgtttagtctgtggcctagaagacctcatcagcccccgagaggaggccttgcattacctcactgggacctgtttgggggccatccctgcggtccaccctctgaacccccagcatgtttgtcctgtttctcaccattgggttaaggggtgccgagcactagctagacttccacatagtcccaccccaagtgggcggcagtgttcctggcatgaccaggattcctgtgaaagcaggagcagcagcaagccgtcccgggcctgcctttcccatcctttggttctcctttccagtctgggttcacaccctgaaaagggatgggtgtgtcctctgagcactcyggcatttgtcattgctgagcccatatcagtaggtcctgggacttgacaaagtatgtgggaggggaaggaaggacagaacttgactggctccatttcatggaccaactgatcaattgccagtactaagccactcattgttatggcttcctttttgaaaaccacctgtctcaaggattcaggtttctgctcacatccccagctgatgctcaataaaactcagccaggagcatatggagatgctgacagccaggtaatgggtgagactgtggggtcccttttcctctaaagcctttactctgaggataaggtcacaaagtagggtgtgacttgaaagtatcgtgaccatgtggcccaccagcagcctttccaaaggggaactccagagacatttcataatgcaaacagcactgttgctttaagaacaaggcctttggaggtggctaaacttgcacgcacgtgtgtgaaaagccatcccatcttctgcctccagttggagctttcagctgttaaaacagtcagaaactattgattcttccctttaggaaaaaatgctcaggcagaacggggtacatccacaggaggaatcggacgagaggatgtgacattcggtccaggagagaaagagcagtttctgttaaagatgtaacaaatggatttccaaagtctacatgacattcacttttcaaacttcccaccagttgaatttctttttttccttaagaaacaggtgatgtcttggaaaacagctccttatgtctctctgtgcatctccattttcctagtctctggagtctcaaaaagagtggcaaagcactttacagtagtaactgaggaatcagagtctctgcttcagcgatatctagtttgtacagttgggtgatcttttgtaattcctaggaggtaatgcatttttaatgttttctgaagctttgtaagtgtgagagagggacaagaagtgcagttctgttctggaattccttattgctttcaacggacactctttgtgaaaaatccaagtaatattttagttcaaacktgatcttgagccaaggcccactgccacctctgggatgggagtcggacctacataccaagtgacaagttcaccttaacatctgcttccagaatggctttgattcagccgtgccaggcaamagaacagggtcagactcctgctctgttattggcttgaagactaggatcccaaaggggttggaggcagggaatatttgaaaattcagactggaattccaggccaaaagctcaagaccaccagcctctcctcctgcctggaaaaataagcctttgtgaaagacwgatttaccatgtacaattgtgattgtgaacrttgttgagtaaacctccagactttctct

SEQ ID NO: 6113 - DNA, 5664 bp, Homo sapiens
agggctcacacagtcgacaaaagaaaacgtttttcttgggagatgggcagaagctgaaggactggcatgacaaggaggccatccggagggacgctcagcgcgtaggaaatggagaacaaggaagaccttaccccatgaccgatgctgagagagtggatcaggcataccgagaaaatggatttaacatctacgtcagtgataaaatctccttgaatcgctctctcccagatatccggcacccaaactgcaacagcaagcgctacctggagacacttcccaacacaagcatcatcatccccttccacaacgagggctggtcctccctcctccgcaccgtccacagtgtgctcaatcgctcgcctccagagctggtcgccgagattgtrctggtcgacgacttcagtgatcgagagcacctgaagaagcctcttgaagactacatggcccttttccccagtgtgaggattcttcgaaccaagaaacgggaagggctgataaggacccgaatgctgggggcctcagtggcaactggggatgtcatcacattcttggattcacactgtgaagccaatgtcaactggcttccccccttgcttgaccgcattgctcggaaccgcaagaccattgtgtgcccgatgattgatgtaattgaccatgacgactttcggtacgagacacaggcaggggatgccatgcggggagcctttgactgggagatgtactacwagyggatcccgatccctccagaactgcagaaagctgaccccagcgacccatttgagtctcccgtgatggccggtggactgttcgccgtggatcggaagtggttctgggaactcggcgggtatgacccaggcttggagatctggggaggggagcagtatgaaatctccttcaaggtgtggatgtgtgggggccgcatggaggacatcccctgctccagggtgggccatatctacaggaagtatgtgccctacaaggtcccggcyggagtcagcctggcccggaaccttaagcgggtggccgaagtgtggatggatgagtacgcagagtacatttaccagcgccggcctgaataccgccacctctccgctggggatgtcgcagtccagaaaaagctccgcagctcccttaactgcaagagtttcaagtggtttatgacgaagatagcctgggacctgcccaaattctacccacccgtggagcccccggctgcagcttggggggagatccgaaatgtgggcacagggctgtgtgcagacacaaagcayggggccttgggctccccactaaggctagagggctgcgtccgaggccgtggggaggctgcctggaacaacatgcaggtattcaccttcacctggagagaggacatccggcctggagacccccagcacaccaagaagttctgctttgatgccatttcccacaccagccctgtcaygctgtacgactgccacagcatgaarggcaaccagctgtggaaataccgcaaagacaagaccctgtaccaccctgtcagtggcagctgcatggactgcagtgaaagtgaccataggatcttcatgaacacctgcaacccatcctctctcacccagcagtggctrtttgaacacaccaactcaacagtcttggaaaaattcaataggaactgagccctcatgtccccttggcaggccccccagggtctggcactcactgcagacttcctctttcaagggaggcagggcccctgtgggcactaggtgtaaaaggtgctggccaaatggttcagggtgaagagggctcttgattcaggggctggggtctgcctggtccttgagcccctgagttgtgggggtagggtgaagagcatatcccacaagaggccccacagggagcagagactgctttaatccctgctgacatcacggaaaagcaacagagccttttcaactttgtcactatgtccccttgaacattatgtgggagaacaccaaggtagcctaggccacccaraagtgagtcctgcgaggttgcccagccctcagatggctctcctacatgatggtgctttagaaacaaaggtaaaatttgcctgtttggggcagcttttagtatcgatgccactcatctgcagcagaagagaaagaagtcctcttggggctttttagtttctgccgtcctgggggraacattgcagttactgcacagcttctgttctctgtcacaaccccaggtgatttggtcsggtcaaaggccatacttggggccctaagagtgttcagtattgaatgctgatcagctgccaggtgaggagtcagaagagggagcccccctagacatttctttgcagctatggacatgcgggatatctccccctgctctctgggtatttgaaatgtcaattttagcactctycaggcacaaggacagccyagcaccagctttacagggcagtgtttcagatggccctgagcccacggaaaaggccaggtagacctccaaactagaaatgctggctgatttgccctgatccatgcttccatttccctgtctctcttccccaggcaattactggcctcaaaagaggaacagaggtgctgcgaggtgctcacctcacagagtctggaggcctccaggatcaactgtgggcaaagtgcctgcctctgacctcatcatggttctagttctcatacagaactccagaatttttaaagaactctataattggattgcaaactaggatgctacataggattctggtattccacatccaatatggatttctagaatgctgtgattaaaggagccagccaggtgtaatacagtcaaggcagcccccagcctagagacaatctgtgaaatccaaagttggtggtgttgggaaagcagggggacatgtgtccctcagctcagcagaggctgtggtacaacatggtccttggtgaagacctgcacccctggaacctcccaccatcrtcacaactgtagtctcatttgcagtgragaaaagaacccgaygtcccacagccagatatacacccagctccatgccagcccttcatgtttaccttttgctttgttaattacatgtcagactcctagagggcctccagactaataggaagcatttctgtaaccaacctgccacccactgattcagaaatggaaatcacattccacaatctatggcttccaccagctagcccaggaaatacttgaaatcagcattccaattagtgttgagtctcttgattgtgtcatttaccaattaaataactgagacctaagtctgggaacagagccacgaatctgcctttgagatgctggcagatctcaaggccatcaattattgggggagggagggacaaacactcccaatcatccaccagtcagactgaatgtgtagctggcgaggaattacttccacttctggcccagcacaagccctgctttggccacctgtctgcaagagaggcggcccctgtgcttgcaacgcttacgtgttsatcccagtgtccttttccaaatgagtgctgtagctttagaagtggccctctatagaaagaagtcaaaagatgaggccccttctagaatctaggataacaagagtgttgacagtttgaggagtcgaattgagattcatcatcaaagagcaatgcagcgtcgttaaaataaaaactgtgccttttaaaaagaaaaatgcaaatatagagcaaatccctaaacttgaaccatttcctagtgccttgctagacaaacataaaggggcagggttgtggggaggggaacgtttttggtggtgtgtgcagttcctactggatgagtgtgtgtttcttaatgtctcatttcaagcaggagatgttgggtctggagcaagatctgagactgagatgtcccccaagggtgacaggtcagatttatttcagtcagtgcaagtcacactccaaactaaaggctgggcagtgcgtttagtctgtggcctagaagacctcatcagcccccgagaggaggccttgcattacctcactgggacctgtttgggggccatccctgcggtccaccctctgaacccccagcatgtttgtcctgtttctcaccattgggttaaggggtgccgagcactagctagacttccacatagtcccaccccaagtgggcggcagtgttcctggcatgaccaggattcctgtgaaagcaggagcagcagcaagccgtcccgggcctgcctttcccatcctttggttctcctttccagtctgggttcacaccctgaaaagggatgggtgtgtcctctgagcactcyggcatttgtcattgctgagcccatatcagtaggtcctgggacttgacaaagtatgtgggaggggaaggaaggacagaacttgactggctccatttcatggaccaactgatcaattgccagtactaagccactcattgttatggcttcctttttgaaaaccacctgtctcaaggattcaggtttctgctcacatccccagctgatgctcaataaaactcagccaggagcatatggagatgctgacagccaggtaatgggtgagactgtggggtcccttttcctctaaagcctttactctgaggataaggtcacaaagtagggtgtgacttgaaagtatcgtgaccatgtggcccaccagcagcctttccaaaggggaactccagagacatttcataatgcaaacagcactgttgctttaagaacaaggcctttggaggtggctaaacttgcacgcacgtgtgtgaaaagccatcccatcttctgcctccagttggagctttcagctgttaaaacagtcagaaactattgattcttccctttaggaaaaaatgctcaggcagaacggggtacatccacaggaggaatcggacgagaggatgtgacattcggtccaggagagaaagagcagtttctgttaaagatgtaacaaatggatttccaaagtctacatgacattcacttttcaaacttcccaccagttgaatttctttttttccttaagaaacaggtgatgtcttggaaaacagctccttatgtctctctgtgcatctccattttcctagtctctggagtctcaaaaagagtggcaaagcactttacagtagtaactgaggaatcagagtctctgcttcagcgatatctagtttgtacagttgggtgatcttttgtaattcctaggaggtaatgcatttttaatgttttctgaagctttgtaagtgtgagagagggacaagaagtgcagttctgttctggaattccttattgctttcaacggacactctttgtgaaaaatccaagtaatattttagttcaaacktgatcttgagccaaggcccactgccacctctgggatgggagtcggacctacataccaagtgacaagttcaccttaacatctgcttccagaatggctttgattcagccgtgccaggcaamagaacagggtcagactcctgctctgttattggcttgaagactaggatcccaaaggggttggaggcagggaatatttgaaaattcagactggaattccaggccaaaagctcaagaccaccagcctctcctcctgcctggaaaaataagcctttgtgaaagacwgatttaccatgtacaattgtgattgtgaacrttgttgagtaaacctccagactttctct

SEQ ID NO: 6114 - DNA, 769 bp, Homo sapiens
ggattactcagtgtcatcttgatcagccaaccatcttcataacaagatttgtttacaagtcttggattttctgcaagagcttcattaatttcggttacttctgataaargagaatagagttcactagcagctttcacactttccaaagtaacccttcagaactagatgaacttatgagtgaagaagcctatgagaaatacataaaatctattgaggagtgaaaatggaactcctaaataaactagtatgaaataacgcaacccagcagagttgtcttaaattaatggtggacagaagacttagaatagcaacttttagcattaccgatggggggcggcggggggaaactactgttaacattgctaatgaaagaaaatgccctttaactttctaatgattatagataaatataataacgcatctttttcacaawatcctatgatttttagactaggctatagtgttcagaattcatgaaattatccatggtaaaaactagtttataaaaattacataattcaaagataacgttgttattcttaagccttatgtaatattgtaacttgcatrtatccatactggatttgggatgaaatacttaatgatctttccactggaaataactggaagttaagaggtttttgttgcttgtacagtgtcagatgaggaacaccaccatcttaattttgcaatacactgcatttgctggtgctatttttatacagtgaagcaacagctttgcagcaaaataataaaatacttcttcctt

SEQ ID NO: 6115 - DNA, 824 bp, Homo sapiens
atgccgccctcgcctgcgtcctgcggccgtcccgaggtgtcacgctgtcaacaacacaaagtcgtagttgacgtcgaccatgagcacttagcaggagggcacgcacagggacttgtgcccggcggggtccagctcctgcaccttcagctgccactccatcctctgcacagcgttcagggccgcagcctcgtgctgctgccgcatgaggaggaagaactagatgaacttatgagtgaagaagcctatgagaaatacataaaatctattgaggagtgaaaatggaactcctaaataaactagtatgaaataacgcaacccagcagagttgtcttaaattaatggtggacagaagacttagaatagcaacttttagcattaccgatggggggcggcggggggaaactactgttaacattgctaatgaaagaaaatgccctttaactttctaatgattatagataaatataataacgcatctttttcacaawatcctatgatttttagactaggctatagtgttcagaattcatgaaattatccatggtaaaaactagtttataaaaattacataattcaaagataacgttgttattcttaagccttatgtaatattgtaacttgcatrtatccatactggatttgggatgaaatacttaatgatctttccactggaaataactggaagttaagaggtttttgttgcttgtacagtgtcagatgaggaacaccaccatcttaattttgcaatacactgcatttgctggtgctatttttatacagtgaagcaacagctttgcagcaaaataataaaatacttcttcctt

SEQ ID NO: 6116 - DNA, 5053 bp, Homo sapiens
agaagaaggggagaggaggttgtgtgggacaaggtgctcctgacagaaggatgccacagctgagcctgtcctcgctgggcctttggccaatggcagcatccccgtggctgctcctgctgctggttggggcctcctggctcctggcccgcatcctggcctggacctataccttctatgacaactgctgccrcctccggtgtttcccgcaacccccgaaacggaattggttcttgggtcacctgggcctgattcacagctcrgaggaaggtctcctatacacacaaagcctggcatgcaccttcggkgatatgtgctgctggtgggtggggccctggcasgcaatcgtccgcatcttycaccccacctrcatcaagcctgtgctctttgctccagctgccattgtaccaaaggacaaggtcttctacagcttcctgaagccctggctgggggatgggctcctgctgagtgctggtgaaaagtggagccgccaccgtcggatgctgacgcctgccttccatttcaacatcctgaagccctrtatgaagattttcaatgagagtgtgaacatcatgcatgccaagtggcagctcctggcctcagagggtagtgcccgtctggacrtgtttgagcacatcagcctcatgaccttggacagtctrcagaaatgtgtcttcagctttgacagccattgccaggagaagcccagtgaatatattgccgccatcttggagctcagtgcccttgtgacaaaaagacaccagcagatcctcctgtacatagacttcctgtattatctcacccctgatgggcagcgtttccgcagggcctgccgcctggtgcacgacttcacagatgmcgtcatccaggagcggcgccgcaccctccctagccagggtgttgatgacttcctccaagccaaggccaaatccaagactttggacttcattgatgtactcctgctgagcaaggatgaagatgggaagaagttgtccgatgaggacataagagcagaagctgacacctttatgtttgagggccatgacaccacagccagtggtctctcctgggtcctgtaccaccttgcaaagcacccrgaataccaggagcgctgtcggcaggaggtrcaagagcttctgaaggaccgtgagcctaaagagattgaatgggacgacctggcccagctgcccttcctgaccatgtgcattaaggagagcctgaggctgcatcccccagtccctgccgtctctcgctgctgcacccaagacattgtgctcccagacggccgggtcatccccaaaggcattatctgcctcatcagtgtttttggaacccatcacaacccagccgtgtggccggaycctgaggtctatgacccctttcgctttgacccaaagaacatcaaggagaggtcacctctggcttttattcccttctcagcagggcccaggaactgcatcgggcaggcgttcgcgatggcggagatgaaggtggtcctggggctcacgctgctgcgcttccgcgtcctgcctgaccacaccgagccccgcaggaagccggagctggtcctgcgcgcagagggcggactttggctgcgggtggagcccctgagctgagttctgcagagacccactctgaccccactaaaatgacccctgattcatcaaaagtgaggcctagaattaccctaagaccctgttccacagtcctgtattccatcctagatatctactcaaaataattgagacaagtgttcaaacagaaagacgcttgtgcgtgaatgttcatggcagccctattcacagtagccaaacgatgaaaacaaccccaagctatatattaccagatgaaaggataaacaaaatatggtccatccatacamtggagtattacacagccataaaaaggaatgaagcagtgatccccactacactgtggatgaaccttgaatgcatgatactgaatgaaagacatcagatgcaaaaggtcacatagtgtactgtccttttatatgaaatttccagaacaggccaatctgaagagatgtatagtggattggtggctttcagcagctgtggggaggtgggactgaggagcgactgctaatcaggatggggtttyctcctgggatggtgaaaatgttccggamctagatagtgatgaaggtagcacracactgtgagtgcactaaatgctattgaattrgacactttagaatggttgaaatagtgatttttatgtgaattctacctaaacatgctattacagctcatatatactttttccatctggattcttcacaaaagaatatgttgtgagcatctttccatgatattaaatcatcttaggaaacattattttgtgttcttcaaaatgtgcatgttaagtattcaaatcagtcttaaatttttaaaaatatgtaattttagaaaataatttaaaaggttttgtttcagtttgtaagatttcttttctggcactttaatggcttgaggtatcattatcagttacaaattgagttattcttcatcaaatgacttttggagtagagattttatttttatagcaatagatgcacagatattcctgtaagatacaggtgtggttagacacttttctagaacaggcatgccctgcaaactccacagacactgactgtttttgtcctattaagaagtagaccactgagaagggagaaggtgacattttagctttcccaggtaaaagtggttttcatcctcacaccaattttatggactggacgttaactctcttgctcaaggtcactctgagtggaagagtggggataaatctggttcgtttggcatcagaggccatgacttttcctaccacagaagtaattttcaaagtaagtctctgccctaggcacatcagatcacctggggaccactccagagtgagtagacaagactttgacaggggtgcctaatttttttttttttttgagatggagtctcgctctgttgcccaggctggagtgcagtggcatgatctcagttcactgcaacctccgcctcctgcgttcaagtgattgtcctgtctcagcctcccaagtagctgggattacaggcacccaccaccacatccagctaattgttgtatttttaatagaggcggggtttcgccatgttgcactggctggtgttgaactcctaacctcaggtgatccacccgcctcggcctcccaaagtgctgggattacaggcccggtccagtttgatagtttgttatcatgttatacgtacacttagaataatgatccagccatctcattctaacagcaatgagaacttaggctcccctctctactaaartrcaaaagttagctggtcrtggtggtgcgggcctgtaatcccagctactcgggaggctgatgcrggagaatcacttgaaacccacaggcggaggttgcrgtgrgctgrggtggtgccactacgctccagcctgggggagggggacatagcgagactcggtctcaaaaacaaaacaaaacaaaacaaaacaaaacaaaaacaaaacaaaacaaaacaaaacactgccaaactgtttccaaagcatctgcatcgtgtttaatttccataagtaacgtatgagaattctaggtcctccaaataattagcagtccttcgtagkgtcagtttttgtttcagccttccttatgggtatgctgtggcatatccctgagattttaattcgcattttccagtgactaagggtgttgaaccactcgtgccttcctgtgcctatttgacactcctatattttctttggwgaagwgtctgttcaatcatctgctcattaaattttccttcgrttgtttgccttcttattgttggattttgagagttctatgtacaagtcctttgtcagtcgtgtgatttgcaagtcttcttcctagwctctgaagtttctttctttcayagagcaaaygttttaaatttttatgaagtaagacttctcagtwttatttttggtgaattatgtttatactgccatatataggaactctttgcttaactggaggtcatggagattttctcctacattttcttttaaaagttttatagtttcagagtttacatgtaattccataatctccatttagttaaattttgyrtggggtgtgaactgtggtttractgttttcttgtatatggatatccaattgtttcacacaatttttttgaaaagaatatccttggcagggcacggtagctcacacctgtaatcccagcactttaggaggtcaaggtgggcagatcatgaggtcaggagtttgagaccagcctggccaatatggtgaaaccacgtctctattaaaaatagaaaaattagccaggcgtggtggtgtgtgcctgtattcacagctgcttggatggctgaggcaggagaatcgcttgaacccaggagtcagaggtttcagtgagccgagattgtgccactgcactccagcctgggtgaaagagctagattctstctcwmaaaaaaaaaaaaaaaaaaaaggaaagaaagaaagaaaagaaaagaaaatcctttttgctttaacttgccttgcaggtttgtagaaaactcaattgttgaaatttgggtggatawatttctggattttctattctattccatgttggaccaataccacactgccctagtcactgttgcattatagtatatctttaaaggagtaatgggaatccttcaactacatttttttccccaataatttttggctattctgcttcytttgtgtttctatgtaaattttatcatcagtgtgtctatttctacaaatagtcctgatagggtttgaattgggatttctgtgaatctatagatcaatctgaggagacttaataatgatattgattctcccaattcatgaatatagtatacccctgtatttatttgttttcttgaatttcttttatcattgttytgtagttttcaccatgacagtcttgcacatattttgttaaatgtacagctgagaatttaattttttctggtgtacaatgctaataaaatggtgctttaaaag

SEQ ID NO: 6117 - DNA, 5097 bp, Homo sapiens
ctgccygtctctgcctctctccactgtccctggagctccctgggcccttccctgggcctcaggacctcactcaccaccccatctgccctgcaggatgccacagctgagcctgtcctcgctgggcctttggccaatggcagcatccccgtggctgctcctgctgctggttggggcctcctggctcctggcccgcatcctggcctggacctataccttctatgacaactgctgccrcctccggtgtttcccgcaacccccgaaacggaattggttcttgggtcacctgggcctggtcacccccacggagcagggcatgagggtcctgactcagctggtggccacctacccccagggctttaaggtctggatgggccccatcttccccgtcatccgtttttgccaccccaacatcatccggtctgtcatcaacgcctcagctgccattgtaccaaaggacaaggtcttctacagcttcctgaagccctggctgggggatgggctcctgctgagtgctggtgaaaagtggagccgccaccgtcggatgctgacgcctgccttccatttcaacatcctgaagccctrtatgaagattttcaatgagagtgtgaacatcatgcatgccaagtggcagctcctggcctcagagggtagtgcccgtctggacrtgtttgagcacatcagcctcatgaccttggacagtctrcagaaatgtgtcttcagctttgacagccattgccaggagtaacccagtgaatatattgccgccatcttggagctcagtgcccttgtgacaaaaagacaccagcagatcctcctgtacatagacttcctgtattatctcacccctgatgggcagcgtttccgcagggcctgccgcctggtgcacgacttcacagatgmcgtcatccaggagcggcgccgcaccctccctagccagggtgttgatgacttcctccaagccaaggccaaatccaagactttggacttcattgatgtactcctgctgagcaaggatgaagatgggaagaagttgtccgatgaggacataagagcagaagctgacacctttatgtttgagggccatgacaccacagccagtggtctctcctgggtcctgtaccaccttgcaaagcacccrgaataccaggagcgctgtcggcaggaggtrcaagagcttctgaaggaccgtgagcctaaagagattgaatgggacgacctggcccagctgcccttcctgaccatgtgcattaaggagagcctgaggctgcatcccccagtccctgccgtctctcgctgctgcacccaagacattgtgctcccagacggccgggtcatccccaaaggcattatctgcctcatcagtgtttttggaacccatcacaacccagccgtgtggccggaycctgaggtctatgacccctttcgctttgacccaaagaacatcaaggagaggtcacctctggcttttattcccttctcagcagggcccaggaactgcatcgggcaggcgttcgcgatggcggagatgaaggtggtcctggggctcacgctgctgcgcttccgcgtcctgcctgaccacaccgagccccgcaggaagccggagctggtcctgcgcgcagagggcggactttggctgcgggtggagcccctgagctgagttctgcagagacccactctgaccccactaaaatgacccctgattcatcaaaagtgaggcctagaattaccctaagaccctgttccacagtcctgtattccatcctagatatctactcaaaataattgagacaagtgttcaaacagaaagacgcttgtgcgtgaatgttcatggcagccctattcacagtagccaaacgatgaaaacaaccccaagctatatattaccagatgaaaggataaacaaaatatggtccatccatacamtggagtattacacagccataaaaaggaatgaagcagtgatccccactacactgtggatgaaccttgaatgcatgatactgaatgaaagacatcagatgcaaaaggtcacatagtgtactgtccttttatatgaaatttccagaacaggccaatctgaagagatgtatagtggattggtggctttcagcagctgtggggaggtgggactgaggagcgactgctaatcaggatggggtttyctcctgggatggtgaaaatgttccggamctagatagtgatgaaggtagcacracactgtgagtgcactaaatgctattgaattrgacactttagaatggttgaaatagtgatttttatgtgaattctacctaaacatgctattacagctcatatatactttttccatctggattcttcacaaaagaatatgttgtgagcatctttccatgatattaaatcatcttaggaaacattattttgtgttcttcaaaatgtgcatgttaagtattcaaatcagtcttaaatttttaaaaatatgtaattttagaaaataatttaaaaggttttgtttcagtttgtaagatttcttttctggcactttaatggcttgaggtatcattatcagttacaaattgagttattcttcatcaaatgacttttggagtagagattttatttttatagcaatagatgcacagatattcctgtaagatacaggtgtggttagacacttttctagaacaggcatgccctgcaaactccacagacactgactgtttttgtcctattaagaagtagaccactgagaagggagaaggtgacattttagctttcccaggtaaaagtggttttcatcctcacaccaattttatggactggacgttaactctcttgctcaaggtcactctgagtggaagagtggggataaatctggttcgtttggcatcagaggccatgacttttcctaccacagaagtaattttcaaagtaagtctctgccctaggcacatcagatcacctggggaccactccagagtgagtagacaagactttgacaggggtgcctaatttttttttttttttgagatggagtctcgctctgttgcccaggctggagtgcagtggcatgatctcagttcactgcaacctccgcctcctgcgttcaagtgattgtcctgtctcagcctcccaagtagctgggattacaggcacccaccaccacatccagctaattgttgtatttttaatagaggcggggtttcgccatgttgcactggctggtgttgaactcctaacctcaggtgatccacccgcctcggcctcccaaagtgctgggattacaggcccggtccagtttgatagtttgttatcatgttatacgtacacttagaataatgatccagccatctcattctaacagcaatgagaacttaggctcccctctctactaaartrcaaaagttagctggtcrtggtggtgcgggcctgtaatcccagctactcgggaggctgatgcrggagaatcacttgaaacccacaggcggaggttgcrgtgrgctgrggtggtgccactacgctccagcctgggggagggggacatagcgagactcggtctcaaaaacaaaacaaaacaaaacaaaacaaaacaaaaacaaaacaaaacaaaacaaaacactgccaaactgtttccaaagcatctgcatcgtgtttaatttccataagtaacgtatgagaattctaggtcctccaaataattagcagtccttcgtagkgtcagtttttgtttcagccttccttatgggtatgctgtggcatatccctgagattttaattcgcattttccagtgactaagggtgttgaaccactcgtgccttcctgtgcctatttgacactcctatattttctttggwgaagwgtctgttcaatcatctgctcattaaattttccttcgrttgtttgccttcttattgttggattttgagagttctatgtacaagtcctttgtcagtcgtgtgatttgcaagtcttcttcctagwctctgaagtttctttctttcayagagcaaaygttttaaatttttatgaagtaagacttctcagtwttatttttggtgaattatgtttatactgccatatataggaactctttgcttaactggaggtcatggagattttctcctacattttcttttaaaagttttatagtttcagagtttacatgtaattccataatctccatttagttaaattttgyrtggggtgtgaactgtggtttractgttttcttgtatatggatatccaattgtttcacacaatttttttgaaaagaatatccttggcagggcacggtagctcacacctgtaatcccagcactttaggaggtcaaggtgggcagatcatgaggtcaggagtttgagaccagcctggccaatatggtgaaaccacgtctctattaaaaatagaaaaattagccaggcgtggtggtgtgtgcctgtattcacagctgcttggatggctgaggcaggagaatcgcttgaacccaggagtcagaggtttcagtgagccgagattgtgccactgcactccagcctgggtgaaagagctagattctstctcwmaaaaaaaaaaaaaaaaaaaaggaaagaaagaaagaaaagaaaagaaaatcctttttgctttaacttgccttgcaggtttgtagaaaactcaattgttgaaatttgggtggatawatttctggattttctattctattccatgttggaccaataccacactgccctagtcactgttgcattatagtatatctttaaaggagtaatgggaatccttcaactacatttttttccccaataatttttggctattctgcttcytttgtgtttctatgtaaattttatcatcagtgtgtctatttctacaaatagtcctgatagggtttgaattgggatttctgtgaatctatagatcaatctgaggagacttaataatgatattgattctcccaattcatgaatatagtatacccctgtatttatttgttttcttgaatttcttttatcattgttytgtagttttcaccatgacagtcttgcacatattttgttaaatgtacagctgagaatttaattttttctggtgtacaatgctaataaaatggtgctttaaaag

SEQ ID NO: 6118 - DNA, 5067 bp, Homo sapiens
agaagaaggggagaggaggttgtgtgggacaaggtgctcctgacagaaggtgccagggtgggggatgccacagctgagcctgtcctcgctgggcctttggccaatggcagcatccccgtggctgctcctgctgctggttggggcctcctggctcctggcccgcatcctggcctggacctataccttctatgacaactgctgccrcctccggtgtttcccgcaacccccgaaacggaattggttcttgggtcacctgggcctgattcacagctcrgaggaaggtctcctatacacacaaagcctggcatgcaccttcggkgatatgtgctgctggtgggtggggccctggcasgcaatcgtccgcatcttycaccccacctrcatcaagcctgtgctctttgctccagctgccattgtaccaaaggacaaggtcttctacagcttcctgaagccctggctgggggatgggctcctgctgagtgctggtgaaaagtggagccgccaccgtcggatgctgacgcctgccttccatttcaacatcctgaagccctrtatgaagattttcaatgagagtgtgaacatcatgcatgccaagtggcagctcctggcctcagagggtagtgcccgtctggacrtgtttgagcacatcagcctcatgaccttggacagtctrcagaaatgtgtcttcagctttgacagccattgccaggagaagcccagtgaatatattgccgccatcttggagctcagtgcccttgtgacaaaaagacaccagcagatcctcctgtacatagacttcctgtattatctcacccctgatgggcagcgtttccgcagggcctgccgcctggtgcacgacttcacagatgmcgtcatccaggagcggcgccgcaccctccctagccagggtgttgatgacttcctccaagccaaggccaaatccaagactttggacttcattgatgtactcctgctgagcaaggatgaagatgggaagaagttgtccgatgaggacataagagcagaagctgacacctttatgtttgagggccatgacaccacagccagtggtctctcctgggtcctgtaccaccttgcaaagcacccrgaataccaggagcgctgtcggcaggaggtrcaagagcttctgaaggaccgtgagcctaaagagattgaatgggacgacctggcccagctgcccttcctgaccatgtgcattaaggagagcctgaggctgcatcccccagtccctgccgtctctcgctgctgcacccaagacattgtgctcccagacggccgggtcatccccaaaggcattatctgcctcatcagtgtttttggaacccatcacaacccagccgtgtggccggaycctgaggtctatgacccctttcgctttgacccaaagaacatcaaggagaggtcacctctggcttttattcccttctcagcagggcccaggaactgcatcgggcaggcgttcgcgatggcggagatgaaggtggtcctggggctcacgctgctgcgcttccgcgtcctgcctgaccacaccgagccccgcaggaagccggagctggtcctgcgcgcagagggcggactttggctgcgggtggagcccctgagctgagttctgcagagacccactctgaccccactaaaatgacccctgattcatcaaaagtgaggcctagaattaccctaagaccctgttccacagtcctgtattccatcctagatatctactcaaaataattgagacaagtgttcaaacagaaagacgcttgtgcgtgaatgttcatggcagccctattcacagtagccaaacgatgaaaacaaccccaagctatatattaccagatgaaaggataaacaaaatatggtccatccatacamtggagtattacacagccataaaaaggaatgaagcagtgatccccactacactgtggatgaaccttgaatgcatgatactgaatgaaagacatcagatgcaaaaggtcacatagtgtactgtccttttatatgaaatttccagaacaggccaatctgaagagatgtatagtggattggtggctttcagcagctgtggggaggtgggactgaggagcgactgctaatcaggatggggtttyctcctgggatggtgaaaatgttccggamctagatagtgatgaaggtagcacracactgtgagtgcactaaatgctattgaattrgacactttagaatggttgaaatagtgatttttatgtgaattctacctaaacatgctattacagctcatatatactttttccatctggattcttcacaaaagaatatgttgtgagcatctttccatgatattaaatcatcttaggaaacattattttgtgttcttcaaaatgtgcatgttaagtattcaaatcagtcttaaatttttaaaaatatgtaattttagaaaataatttaaaaggttttgtttcagtttgtaagatttcttttctggcactttaatggcttgaggtatcattatcagttacaaattgagttattcttcatcaaatgacttttggagtagagattttatttttatagcaatagatgcacagatattcctgtaagatacaggtgtggttagacacttttctagaacaggcatgccctgcaaactccacagacactgactgtttttgtcctattaagaagtagaccactgagaagggagaaggtgacattttagctttcccaggtaaaagtggttttcatcctcacaccaattttatggactggacgttaactctcttgctcaaggtcactctgagtggaagagtggggataaatctggttcgtttggcatcagaggccatgacttttcctaccacagaagtaattttcaaagtaagtctctgccctaggcacatcagatcacctggggaccactccagagtgagtagacaagactttgacaggggtgcctaatttttttttttttttgagatggagtctcgctctgttgcccaggctggagtgcagtggcatgatctcagttcactgcaacctccgcctcctgcgttcaagtgattgtcctgtctcagcctcccaagtagctgggattacaggcacccaccaccacatccagctaattgttgtatttttaatagaggcggggtttcgccatgttgcactggctggtgttgaactcctaacctcaggtgatccacccgcctcggcctcccaaagtgctgggattacaggcccggtccagtttgatagtttgttatcatgttatacgtacacttagaataatgatccagccatctcattctaacagcaatgagaacttaggctcccctctctactaaartrcaaaagttagctggtcrtggtggtgcgggcctgtaatcccagctactcgggaggctgatgcrggagaatcacttgaaacccacaggcggaggttgcrgtgrgctgrggtggtgccactacgctccagcctgggggagggggacatagcgagactcggtctcaaaaacaaaacaaaacaaaacaaaacaaaacaaaaacaaaacaaaacaaaacaaaacactgccaaactgtttccaaagcatctgcatcgtgtttaatttccataagtaacgtatgagaattctaggtcctccaaataattagcagtccttcgtagkgtcagtttttgtttcagccttccttatgggtatgctgtggcatatccctgagattttaattcgcattttccagtgactaagggtgttgaaccactcgtgccttcctgtgcctatttgacactcctatattttctttggwgaagwgtctgttcaatcatctgctcattaaattttccttcgrttgtttgccttcttattgttggattttgagagttctatgtacaagtcctttgtcagtcgtgtgatttgcaagtcttcttcctagwctctgaagtttctttctttcayagagcaaaygttttaaatttttatgaagtaagacttctcagtwttatttttggtgaattatgtttatactgccatatataggaactctttgcttaactggaggtcatggagattttctcctacattttcttttaaaagttttatagtttcagagtttacatgtaattccataatctccatttagttaaattttgyrtggggtgtgaactgtggtttractgttttcttgtatatggatatccaattgtttcacacaatttttttgaaaagaatatccttggcagggcacggtagctcacacctgtaatcccagcactttaggaggtcaaggtgggcagatcatgaggtcaggagtttgagaccagcctggccaatatggtgaaaccacgtctctattaaaaatagaaaaattagccaggcgtggtggtgtgtgcctgtattcacagctgcttggatggctgaggcaggagaatcgcttgaacccaggagtcagaggtttcagtgagccgagattgtgccactgcactccagcctgggtgaaagagctagattctstctcwmaaaaaaaaaaaaaaaaaaaaggaaagaaagaaagaaaagaaaagaaaatcctttttgctttaacttgccttgcaggtttgtagaaaactcaattgttgaaatttgggtggatawatttctggattttctattctattccatgttggaccaataccacactgccctagtcactgttgcattatagtatatctttaaaggagtaatgggaatccttcaactacatttttttccccaataatttttggctattctgcttcytttgtgtttctatgtaaattttatcatcagtgtgtctatttctacaaatagtcctgatagggtttgaattgggatttctgtgaatctatagatcaatctgaggagacttaataatgatattgattctcccaattcatgaatatagtatacccctgtatttatttgttttcttgaatttcttttatcattgttytgtagttttcaccatgacagtcttgcacatattttgttaaatgtacagctgagaatttaattttttctggtgtacaatgctaataaaatggtgctttaaaag

SEQ ID NO: 6119 - DNA, 5097 bp, Homo sapiens
ctgccygtctctgcctctctccactgtccctggagctccctgggcccttccctgggcctcaggacctcactcaccaccccatctgccctgcaggatgccacagctgagcctgtcctcgctgggcctttggccaatggcagcatccccgtggctgctcctgctgctggttggggcctcctggctcctggcccgcatcctggcctggacctataccttctatgacaactgctgccrcctccggtgtttcccgcaacccccgaaacggaattggttcttgggtcacctgggcctggtcacccccacggagcagggcatgagggtcctgactcagctggtggccacctacccccagggctttaaggtctggatgggccccatcttccccgtcatccgtttttgccaccccaacatcatccggtctgtcatcaacgcctcagctgccattgtaccaaaggacaaggtcttctacagcttcctgaagccctggctgggggatgggctcctgctgagtgctggtgaaaagtggagccgccaccgtcggatgctgacgcctgccttccatttcaacatcctgaagccctrtatgaagattttcaatgagagtgtgaacatcatgcatgccaagtggcagctcctggcctcagagggtagtgcccgtctggacrtgtttgagcacatcagcctcatgaccttggacagtctrcagaaatgtgtcttcagctttgacagccattgccaggagaagcccagtgaatatattgccgccatcttggagctcagtgcccttgtgacaaaaagacaccagcagatcctcctgtacatagacttcctgtattatctcacccctgatgggcagcgtttccgcagggcctgccgcctggtgcacgacttcacagatgmcgtcatccaggagcggcgccgcaccctccctagccagggtgttgatgacttcctccaagccaaggccaaatccaagactttggacttcattgatgtactcctgctgagcaaggatgaagatgggaagaagttgtccgatgaggacataagagcagaagctgacacctttatgtttgagggccatgacaccacagccagtggtctctcctgggtcctgtaccaccttgcaaagcacccrgaataccaggagcgctgtcggcaggaggtrcaagagcttctgaaggaccgtgagcctaaagagattgaatgggacgacctggcccagctgcccttcctgaccatgtgcattaaggagagcctgaggctgcatcccccagtccctgccgtctctcgctgctgcacccaagacattgtgctcccagacggccgggtcatccccaaaggcattatctgcctcatcagtgtttttggaacccatcacaacccagccgtgtggccggaycctgaggtctatgacccctttcgctttgacccaaagaacatcaaggagaggtcacctctggcttttattcccttctcagcagggcccaggaactgcatcgggcaggcgttcgcgatggcggagatgaaggtggtcctggggctcacgctgctgcgcttccgcgtcctgcctgaccacaccgagccccgcaggaagccggagctggtcctgcgcgcagagggcggactttggctgcgggtggagcccctgagctgagttctgcagagacccactctgaccccactaaaatgacccctgattcatcaaaagtgaggcctagaattaccctaagaccctgttccacagtcctgtattccatcctagatatctactcaaaataattgagacaagtgttcaaacagaaagacgcttgtgcgtgaatgttcatggcagccctattcacagtagccaaacgatgaaaacaaccccaagctatatattaccagatgaaaggataaacaaaatatggtccatccatacamtggagtattacacagccataaaaaggaatgaagcagtgatccccactacactgtggatgaaccttgaatgcatgatactgaatgaaagacatcagatgcaaaaggtcacatagtgtactgtccttttatatgaaatttccagaacaggccaatctgaagagatgtatagtggattggtggctttcagcagctgtggggaggtgggactgaggagcgactgctaatcaggatggggtttyctcctgggatggtgaaaatgttccggamctagatagtgatgaaggtagcacracactgtgagtgcactaaatgctattgaattrgacactttagaatggttgaaatagtgatttttatgtgaattctacctaaacatgctattacagctcatatatactttttccatctggattcttcacaaaagaatatgttgtgagcatctttccatgatattaaatcatcttaggaaacattattttgtgttcttcaaaatgtgcatgttaagtattcaaatcagtcttaaatttttaaaaatatgtaattttagaaaataatttaaaaggttttgtttcagtttgtaagatttcttttctggcactttaatggcttgaggtatcattatcagttacaaattgagttattcttcatcaaatgacttttggagtagagattttatttttatagcaatagatgcacagatattcctgtaagatacaggtgtggttagacacttttctagaacaggcatgccctgcaaactccacagacactgactgtttttgtcctattaagaagtagaccactgagaagggagaaggtgacattttagctttcccaggtaaaagtggttttcatcctcacaccaattttatggactggacgttaactctcttgctcaaggtcactctgagtggaagagtggggataaatctggttcgtttggcatcagaggccatgacttttcctaccacagaagtaattttcaaagtaagtctctgccctaggcacatcagatcacctggggaccactccagagtgagtagacaagactttgacaggggtgcctaatttttttttttttttgagatggagtctcgctctgttgcccaggctggagtgcagtggcatgatctcagttcactgcaacctccgcctcctgcgttcaagtgattgtcctgtctcagcctcccaagtagctgggattacaggcacccaccaccacatccagctaattgttgtatttttaatagaggcggggtttcgccatgttgcactggctggtgttgaactcctaacctcaggtgatccacccgcctcggcctcccaaagtgctgggattacaggcccggtccagtttgatagtttgttatcatgttatacgtacacttagaataatgatccagccatctcattctaacagcaatgagaacttaggctcccctctctactaaartrcaaaagttagctggtcrtggtggtgcgggcctgtaatcccagctactcgggaggctgatgcrggagaatcacttgaaacccacaggcggaggttgcrgtgrgctgrggtggtgccactacgctccagcctgggggagggggacatagcgagactcggtctcaaaaacaaaacaaaacaaaacaaaacaaaacaaaaacaaaacaaaacaaaacaaaacactgccaaactgtttccaaagcatctgcatcgtgtttaatttccataagtaacgtatgagaattctaggtcctccaaataattagcagtccttcgtagkgtcagtttttgtttcagccttccttatgggtatgctgtggcatatccctgagattttaattcgcattttccagtgactaagggtgttgaaccactcgtgccttcctgtgcctatttgacactcctatattttctttggwgaagwgtctgttcaatcatctgctcattaaattttccttcgrttgtttgccttcttattgttggattttgagagttctatgtacaagtcctttgtcagtcgtgtgatttgcaagtcttcttcctagwctctgaagtttctttctttcayagagcaaaygttttaaatttttatgaagtaagacttctcagtwttatttttggtgaattatgtttatactgccatatataggaactctttgcttaactggaggtcatggagattttctcctacattttcttttaaaagttttatagtttcagagtttacatgtaattccataatctccatttagttaaattttgyrtggggtgtgaactgtggtttractgttttcttgtatatggatatccaattgtttcacacaatttttttgaaaagaatatccttggcagggcacggtagctcacacctgtaatcccagcactttaggaggtcaaggtgggcagatcatgaggtcaggagtttgagaccagcctggccaatatggtgaaaccacgtctctattaaaaatagaaaaattagccaggcgtggtggtgtgtgcctgtattcacagctgcttggatggctgaggcaggagaatcgcttgaacccaggagtcagaggtttcagtgagccgagattgtgccactgcactccagcctgggtgaaagagctagattctstctcwmaaaaaaaaaaaaaaaaaaaaggaaagaaagaaagaaaagaaaagaaaatcctttttgctttaacttgccttgcaggtttgtagaaaactcaattgttgaaatttgggtggatawatttctggattttctattctattccatgttggaccaataccacactgccctagtcactgttgcattatagtatatctttaaaggagtaatgggaatccttcaactacatttttttccccaataatttttggctattctgcttcytttgtgtttctatgtaaattttatcatcagtgtgtctatttctacaaatagtcctgatagggtttgaattgggatttctgtgaatctatagatcaatctgaggagacttaataatgatattgattctcccaattcatgaatatagtatacccctgtatttatttgttttcttgaatttcttttatcattgttytgtagttttcaccatgacagtcttgcacatattttgttaaatgtacagctgagaatttaattttttctggtgtacaatgctaataaaatggtgctttaaaag

SEQ ID NO: 6120 - DNA, 3442 bp, Homo sapiens
agaccaaggtcagcggagagtaggcatgtagcttctgcagttgctcctcctcaccctccgcgacctgatttcctagaagggctctgtcacccgaaaagattttccactggcttagaggagggagggcccgccttcccccgttatccattggctgctcgttccgccgcaagttgggggcggggttagggcgcctttcgattgcatcagctggtccagccgaggccaagtcccgggcgctagcccacctccsacccgcctcttggctcctctcctctaggccgtcgctttcgggttctctcatcgcttcgtcgttcgccartgtttgaggagaaggccagcagtccttcagggaagatgggaggcgaggagaagccgattgrtgctggtgaagagaagcaaaaggaaggaggcaaaaagaagaacaaagaaggatctggagatggaggtcgagctgagtcaaggcctggccgacaacaccgttattgctaaagtaaataatgttgtgtgggacctggaccgccctctggaagaagattgtaccttggagcttctcaagtttgaggatgaggaagctcaggcagtgtattggcactctagtgctcacataatgggtgaagccatggaaagagtctatggtggatgtttatgctacggtccgccaatagaaaatggattctattatgacatgtacctcgaagaagggggtgtgtctagcaatgatttctcttctctggaggctttgtgtaagaaaatcattaaagaaaaacaagcttttgaaagactggaagttaagaaagaaactttactggcaatgtttaagtacaacaagttcaaatgccggatattgaatgaaaaggtgaatactccaactaccacagtctatagatgtggccctttgatagatctctgccggggtcctcatgttagacacacgggcaaaattaaggctttaaaaatacacaaaaattcctccacgtactgggaaggcaaagcagatatggagactctccagagaatttatggcatttcattcccagatcctaaaatgttgaaagagtgggagaagttycaagaggaagctaaaaaccgagatcataggaaaattggcagggaccaagaactatatttctttcatgaactcagccctggaagttgcttttttctgccaaaaggagcctacatttataatgcacttattgaattcattaggagcgaatataggaaaagaggattccaggaggtagtcaccccaaacatcttcaacagccgactctggatgacctcgggccactggcagcactacagcgagaacatgttctcctttgaggtggagaaggagctgtttgccctgaaacccatgaactgcccaggacactgccttatgtttgatcatcggccaaggtcctggcgagaactgcctctgcggctagctgattttggggtacttcataggaacgagctgtctggagcactcacaggactcayccgggtacgaagattccaacaggatgatgctcacatattctgtgccatggagcagattgaagatgaaataaaaggttgtttggattttctacgtacggtatatagcgtatttggattttcttttaaactaaacctttctactcgcccrgaaaaattccttggagatatcgaagtatgggatcaagctgagaaacaacttgaaaacagtctgaatgaatttggtgaaaagtgggagttaaactctggagayggagctttctatggcccaaagattgacatacagattaaagatgcrattgggcggtaccaccagtgtgcaaccatccagctggatttccagttgcccatcagatttaatcttacttatgtaagccatgatggtgatgataagaaaaggccagtgattgttcatcgagccatcttgggatcagtggaaagaatgattgctatcctcacagaaaactatgggggcaaatggcccttttggctgtcccctcgccaggtaatggtagttccagtgggaccaacctgtgatgaatatgcccaaaaggtacgacaacaattccacgatkccaaattcatggcagacattgatctggatccaggctgtacattgaataaaaagattcgaaatgcacagttagcacagtataacttcattttagttgttggtgaaaaagagaaaatcagtggcactgttaatatccgcacaagagacaataaggtccacggggaacgcaccatttctgaaactatsgagcggctacagcagctcaaagagttccgcagcaaacaggcagaagaagaattttaatgaaaaaattacccagattggctccatggaaaaggaggaacagcgtttccgtaaaattgactttgtactctgaaaaygtcaatttatattgaacttggaggagtttggcaaagtcygaataggtcaacctgcaggcgtaactatttttgacctagtcagtttttaaacaatgtgcatttgaaggagttaattaaaagagagccaataaaatgattttactcattcagtatctgagtactggaagtgaaacatgaggaatgctttagtgtaatgtgggagaacttttttgtaaatttaatgcaattgaaaaagttttcaaattcaattaagataactagaattggattatggtgtaaaaataaaaaaaaaatttattcacataagtttcaagactgctctgtccctcacatgtacacatacatgcctgagacagataatgtggttcagtatttatctttacagttttacagcaaatataatgcagggtggatggagacggggtaggtctgcagcatcataatgctattcataaactgggtgtgagctgggtgctggcttctcagaggataaacacttttgggagtgtcatttttacttaatgttggatggacaccttttcaaacaaaaactaccatggatctattacagagtagatttgcacaaatgtttaagataaaacgtgaatcttcagagaaatatctgtttatggcagactgttctggaccatagaatcacttggtttacaaattccctattttctcataagggatcattttcaaaatcttctaccaataaatggtgattgaaaggacagcacaaagtaaataatttcttatgtggataaatactaattcctccttgttagaatgatattttaaaagtaacatcttttttttaattttttttgagacaagatcctttgtcccccaggctggagtgtggtgccatgatctcggctcactgcaacctcagcctcccaagtaggtgggactaaagacatgtgccaccatgcctggctgatgtttgtattttctatagagatggtttcatcatgttgcccaggctggtatcaaactcctggataaaagagacccacctgcctcagtctcccaaagtgctgggattacagktgtgagccaccac

SEQ ID NO: 6121 - DNA, 3633 bp, Homo sapiens
agaccaaggtcagcggagagtaggcatgtagcttctgcagttgctcctcctcaccctccgcgacctgatttcctagaagggctctgtcacccgaaaagattttccactggcttagaggagggagggcccgccttcccccgttatccattggctgctcgttccgccgcaagttgggggcggggttagggcgcctttcgattgcatcagctggtccagccgaggccaagtcccgggcgctagcccacctccsacccgcctcttggctcctctcctctaggccgtcgctttcgggttctctcatcgcttcgtcgttcgccartgtttgaggagaaggccagcagtccttcagggaagatgggaggcgaggagaagccgattgrtgctggtgaagagaagcaaaaggaaggaggcaaaaagaagaacaaagaaggatctggagatggaggtcgagctgagttgaatccttggcctgaatatatttacacacgtcttgagatgtataatatactaaaagcagaacatgattccattctggcagaaaaggcagaaaaagatagcaagccaattaaagtcactttgcctgatggtaaacaggttgatgcggaatcttggaaaactacaccatatcaaattgcctgtggaattagtcaaggcctggccgacaacaccgttattgctaaagtaaataatgttgtgtgggacctggaccgccctctggaagaagattgtaccttggagcttctcaagtttgaggatgaggaagctcaggcagtgtattggcactctagtgctcacataatgggtgaagccatggaaagagtctatggtggatgtttatgctacggtccgccaatagaaaatggattctattatgacatgtacctcgaagaagggggtgtgtctagcaatgatttctcttctctggaggctttgtgtaagaaaatcattaaagaaaaacaagcttttgaaagactggaagttaagaaagaaactttactggcaatgtttaagtacaacaagttcaaatgccggatattgaatgaaaaggtgaatactccaactaccacagtctatagatgtggccctttgatagatctctgccggggtcctcatgttagacacacgggcaaaattaaggctttaaaaatacacaaaaattcctccacgtactgggaaggcaaagcagatatggagactctccagagaatttatggcatttcattcccagatcctaaaatgttgaaagagtgggagaagttycaagaggaagctaaaaaccgagatcataggaaaattggcagggaccaagaactatatttctttcatgaactcagccctggaagttgcttttttctgccaaaaggagcctacatttataatgcacttattgaattcattaggagcgaatataggaaaagaggattccaggaggtagtcaccccaaacatcttcaacagccgactctggatgacctcgggccactggcagcactacagcgagaacatgttctcctttgaggtggagaaggagctgtttgccctgaaacccatgaactgcccaggacactgccttatgtttgatcatcggccaaggtcctggcgagaactgcctctgcggctagctgattttggggtacttcataggaacgagctgtctggagcactcacaggactcayccgggtacgaagattccaacaggatgatgctcacatattctgtgccatggagcagattgaagatgaaataaaaggttgtttggattttctacgtacggtatatagcgtatttggattttcttttaaactaaacctttctactcgcccrgaaaaattccttggagatatcgaagtatgggatcaagctgagaaacaacttgaaaacagtctgaatgaatttggtgaaaagtgggagttaaactctggagayggagctttctatggcccaaagattgacatacagattaaagatgcrattgggcggtaccaccagtgtgcaaccatccagctggatttccagttgcccatcagatttaatcttacttatgtaagccatgatggtgatgataagaaaaggccagtgattgttcatcgagccatcttgggatcagtggaaagaatgattgctatcctcacagaaaactatgggggcaaatggcccttttggctgtcccctcgccaggtaatggtagttccagtgggaccaacctgtgatgaatatgcccaaaaggtacgacaacaattccacgatkccaaattcatggcagacattgatctggatccaggctgtacattgaataaaaagattcgaaatgcacagttagcacagtataacttcattttagttgttggtgaaaaagagaaaatcagtggcactgttaatatccgcacaagagacaataaggtccacggggaacgcaccatttctgaaactatsgagcggctacagcagctcaaagagttccgcagcaaacaggcagaagaagaattttaatgaaaaaattacccagattggctccatggaaaaggaggaacagcgtttccgtaaaattgactttgtactctgaaaaygtcaatttatattgaacttggaggagtttggcaaagtcygaataggtcaacctgcaggcgtaactatttttgacctagtcagtttttaaacaatgtgcatttgaaggagttaattaaaagagagccaataaaatgattttactcattcagtatctgagtactggaagtgaaacatgaggaatgctttagtgtaatgtgggagaacttttttgtaaatttaatgcaattgaaaaagttttcaaattcaattaagataactagaattggattatggtgtaaaaataaaaaaaaaatttattcacataagtttcaagactgctctgtccctcacatgtacacatacatgcctgagacagataatgtggttcagtatttatctttacagttttacagcaaatataatgcagggtggatggagacggggtaggtctgcagcatcataatgctattcataaactgggtgtgagctgggtgctggcttctcagaggataaacacttttgggagtgtcatttttacttaatgttggatggacaccttttcaaacaaaaactaccatggatctattacagagtagatttgcacaaatgtttaagataaaacgtgaatcttcagagaaatatctgtttatggcagactgttctggaccatagaatcacttggtttacaaattccctattttctcataagggatcattttcaaaatcttctaccaataaatggtgattgaaaggacagcacaaagtaaataatttcttatgtggataaatactaattcctccttgttagaatgatattttaaaagtaacatcttttttttaattttttttgagacaagatcctttgtcccccaggctggagtgtggtgccatgatctcggctcactgcaacctcagcctcccaagtaggtgggactaaagacatgtgccaccatgcctggctgatgtttgtattttctatagagatggtttcatcatgttgcccaggctggtatcaaactcctggataaaagagacccacctgcctcagtctcccaaagtgctgggattacagktgtgagccaccac

SEQ ID NO: 6122 - DNA, 1741 bp, Homo sapiens
ctcaataccccaagcaatacctgcaactgaggattcttcccggggagaccgcagcccatcggcatggctcaagagtttgtgaactgcaaaatccagcctgggaaggtggttgtgttcatcaagcccacctgcccgtactgcaggagggcccaagagatcctcagtcaattgcccatcaaacaagggcttctggaatttgtckatatcacagccrccaaccacactaacgagattcaagattatttgcaacagctcacgggagcaagaacggtgagtttcattttaaacggctagggaaaggctcccggattgccttttcttgtcagagctgtgcctttctttaggataaggctgcggctccgtacttcaaggcgtccagagggctgtgcggggcggggggtgtgggggagggcgccttagagaggatctcggtcacttgaatgagcggcggcactgcagccaaaggtcttcacggggcagaagagggagtacagctgatgtctgctgtgcggcagggtgcctcgagtctttatyggtaaagattgtataggcggatgcagtgatctagtctctttgcaacagagtggggaactgctgacgcggctaaagcagattggagctctgcagtaaccacagaacaggccccatgctgacgtccctcctcaagagctggatggcattgcaaatgatgacagcacttctggtggatgaatttgggggcacaaacagcttttttcctcttttggctcagtatttaaaagtggaccaacttgctcttaatcacagggccaagaaggttgacgggccatcttggttttcttctggatgwgctctttggttttcagaagactgtgacaagttctggcccaggattcgctcactgaccctcaattgtcctctttggcatgcgtttcttactgttctccatgtgtcggcatgtctctacctctaagccagtgtttttcaactatgtttatccagactccttctccacaatgatgaatccacagttggttatctgctactgcccattagctaaaatcattttgctgyttgactttatggagtttgtattatgaaatcagtgggtattttgaatgtgttctttctaactacatgcatctctccactcaactccaccccatcccatcccaccttgaaaatcrctgctctgaaccagtgttctccaccttgtcctccacasatctcataggaaatgttcaacaattctgtgaaaggtcacaggacccaattggagaaatcatatgaaaagcatagttggtcttggtgtcatatggatcagaggcacaagtgcagaggctgtggtcatgyggaacactctgttatttaagatggctatccagataatcctgaacactgtgtatttattttatttagactaccagcaaagattaaagcatgaaatgtaaaacatctgataaaacttacagccccctacaccaagagtgtatctgtgaaagrgctcctacactttgaaaacttaagaatcccttatcatgaagtttgcctgttctagaattgtaagattgttaatttccttcaatctctagtgacaacacttaatttcttttctaataaaaaaaacctatagatgattcagtgatttttgtccaattcatttscatgttctcaagacattaaggaatgttatgcgaaatacactaacttaaaactgtgtttatatttggccctgccattataaataaagacacgtgctgct

SEQ ID NO: 6123 - DNA, 1021 bp, Homo sapiens
gaagctgtccctttaaaactcgagcaagctaccaggcaaactccgcctccagggaggttccttattaaataggagccaactggctgggtcggggctcaataccccaagcaatacctgcaactgaggattcttcccggggagaccgcagcccatcggcatggctcaagagtttgtgaactgcaaaatccagcctgggaaggtggttgtgttcatcaagcccacctgcccgtactgcaggagggcccaagagatcctcagtcaattgcccatcaaacaagggcttctggaatttgtckatatcacagccrccaaccacactaacgagattcaagattatttgcaacagctcacgggagcaagaacggtgcctcgagtctttatyggtaaagattgtataggcggatgcagtgatctagtctctttgcaacagagtggggaactgctgacgcggctaaagcagattggagctctgcagtaaccacagatctcataggaaatgttcaacaattctgtgaaaggtcacaggacccaattggagaaatcatatgaaaagcatagttggtcttggtgtcatatggatcagaggcacaagtgcagaggctgtggtcatgyggaacactctgttatttaagatggctatccagataatcctgaacactgtgtatttattttatttagactaccagcaaagattaaagcatgaaatgtaaaacatctgataaaacttacagccccctacaccaagagtgtatctgtgaaagrgctcctacactttgaaaacttaagaatcccttatcatgaagtttgcctgttctagaattgtaagattgttaatttccttcaatctctagtgacaacacttaatttcttttctaataaaaaaaacctatagatgattcagtgatttttgtccaattcatttscatgttctcaagacattaaggaatgttatgcgaaatacactaacttaaaactgtgtttatatttggccctgccattataaataaagacacgtgctgcs

SEQ ID NO: 6124 - DNA, 1589 bp, Homo sapiens
gaagctgtccctttaaaactcgagcaagctaccaggcaaactccgcctccagggaggttccttattaaataggagccaactggctgggtcggggctcaataccccaagcaatacctgcaactgaggattcttcccggggagaccgcagcccatcggcatggctcaagagtttgtgaactgcaaaatccagcctgggaaggtggttgtgttcatcaagcccacctgcccgtactgcaggagggcccaagagatcctcagtcaattgcccatcaaacaagggcttctggaatttgtckatatcacagccrccaaccacactaacgagattcaagattatttgcaacagctcacgggagcaagaacggtgcctcgagtctttatyggtaaagattgtataggcggatgcagtgatctagtctctttgcaacagagtggggaactgctgacgcggctaaagcagattggagctctgcagtaaccacagaacaggccccatgctgacgtccctcctcaagagctggatggcattgcaaatgatgacagcacttctggtggatgaatttgggggcacaaacagcttttttcctcttttggctcagtatttaaaagtggaccaacttgctcttaatcacagggccaagaaggttgacgggccatcttggttttcttctggatgwgctctttggttttcagaagactgtgacaagttctggcccaggattcgctcactgaccctcaattgtcctctttggcatgcgtttcttactgttctccatgtgtcggcatgtctctacctctaagccagtgtttttcaactatgtttatccagactccttctccacaatgatgaatccacagttggttatctgctactgcccattagctaaaatcattttgctgyttgactttatggagtttgtattatgaaatcagtgggtattttgaatgtgttctttctaactacatgcatctctccactcaactccaccccatcccatcccaccttgaaaatcrctgctctgaaccagtgttctccaccttgtcctccacasatctcataggaaatgttcaacaattctgtgaaaggtcacaggacccaattggagaaatcatatgaaaagcatagttggtcttggtgtcatatggatcagaggcacaagtgcagaggctgtggtcatgyggaacactctgttatttaagatggctatccagataatcctgaacactgtgtatttattttatttagactaccagcaaagattaaagcatgaaatgtaaaacatctgataaaacttacagccccctacaccaagagtgtatctgtgaaagrgctcctacactttgaaaacttaagaatcccttatcatgaagtttgcctgttctagaattgtaagattgttaatttccttcaatctctagtgacaacacttaatttcttttctaataaaaaaaacctatagatgattcagtgatttttgtccaattcatttscatgttctcaagacattaaggaatgttatgcgaaatacactaacttaaaactgtgtttatatttggccctgccattataaataaagacacgtgctgct

SEQ ID NO: 6125 - DNA, 1445 bp, Homo sapiens
ctttctttgttttgctctgtcgtccaggtgtgagtgcaatggcaccatcacagcttactgcagcctcgacctcccgggccaaagcaatccttccacttcagcctcctgagtagctgggactacaggcatgcaccgccatgcctggctaatttttgtattttttgtagagacggggtctcacgatgttacctaggctagtcttgaactcctgggctcaagcgaccctcccacctcagcctcacaaaagtagtaggattacattcatgagccactgtgcctggccctcacctgtgttttaacaacacagagagatgattgtacttaataaaccatggacctgaaaaatcagagacgtaatgcaaatacttttccagctgtatttagaaacgaactccttccttcctgattgctgtgacccagtttacaatcttaggtgtggtccctgatgcagagaaagcagagttcaatctaggtggtctgactgcagccaatcagaattctccttctgaaacatgtttctgtagagtgaaatttttaaatccctttgacaagttggacaagctcatgcatagcacacaacttgaaaactcttctggcgtaaaaacattctcgagttaataatgttwccccttataacagaaaggaagtcctgtcctgtgagcatatacataaggaggttttaaagtgatttgaaaastttggaatcacgggaaatatttagtggtaggatagaaatgttctgtctaatctagtaatgtagtaatgtcctgggtcgtgtgcttttttaggtgcctcgagtctttatyggtaaagattgtataggcggatgcagtgatctagtctctttgcaacagagtggggaactgctgacgcggctaaagcagattggagctctgcagtaaccacagatctcataggaaatgttcaacaattctgtgaaaggtcacaggacccaattggagaaatcatstgaaaagcatagttggtcttggtgtcatatggatcagaggcacaagtgcagaggctgtggtcatgyggaacactctgttatttaagatggctatccagataatcctgaacactgtgtatttattttatttagactaccagcaaagattaaagcatgaaatgtaaaacatctgataaaacttacagccccctacaccaagagtgtatctgtgaaagrgctcctacactttgaaaacttaagaatcccttatcatgaagtttgcctgttctagaattgtaagattgttaatttccttcaatctctagtgacaacacttaatttcttttctaataaaaaaaacctatagatgattcagtgatttttgtccaattcatttscatgttctcaagacattaaggaatgttatgcgaaatacactaacttaaaactgtgtttatatttggccctgccattataaataaagacacgtgctgct

SEQ ID NO: 6126 - DNA, 2652 bp, Homo sapiens
gtctacaccagcggtgtcgctgcccgaaagtgagagaaggctgataytgctagctggaatccaggcctgggtgctgcatggtggcgcccctccccgtgaccaccgctgcgttttctcgggctttctctggggagctgctcttgtgctgtttggcccctgcctactcggaatggaacaaagcatcgaacaaacaactgagatcctgttgtgcctatcacctgttgaagttgccagtcttaaggaaggaatcaatttctttcgcaataagagcactggcaaagactacgtcttgtacaagaataagagccgactgagggcatgcaagaatatgtgcaagcaccaaggaggcctgttcataaaagatatcgaggatttagccggaagttgttgaartggatgaaaacaacggacttttgmttttagaactgaatcctcctaacccttgggacttacagcccagatctcctgaagagttggcttttggagaagtrcagataacatatctcactcatgcctgcatggacctcaagttaggagacaagagaatggtgtttgacccttggttaatcggtcytgcttttgcccgtggatggtggttgctccatgagcctccatctgattggctggagaggctgtgccaggcagacctcrtttacatcagtcatctgmactcagaccacctgagttaccccacactgaaaaagcttgctgggagaagaccagatattcccatttatgttggaaacacagaaaggcctgtattttggaatctgaatcagagcggtgtccagttgactaatatcaatgtcgtgccatttggaatatggcagcaggtggacaaaaatcttcgattcatgatcttgatggayggtgttcatcctgagatggacacttgcattattgtggagtacaaaggtcataaaatactcaatayagtagactgcaccagacccaatgggggaaggctgcctatgaaggttgctctaatgatgagtgattttgctggaggagcatcaggctttccaatgactttcagtggtggaaaatttacggaggaatggaaagcccaattcattaaaacagaaaggaagaagctcytgaactacaaggctyggctggtgaagaacctgcaaccccgaatttattgtccctttgctgggtattttgtggaatctcacccatcagacaagtacatcaaggaaacaaacaccaaaaatgacccaaatgaactcaacaatcttatcaagaaaaactctgatgtgataacatggacccctcgaccgggagccacccttgatctgggaagaatgctgaaggatcsaacagacagcaagggcatcatagagcctccagaggggacaaaaatttacaaggattcctgggattttgaaccttatttggaaatcttgaatgctgctctaggagatgaaatatttcttcactcatcctggataaaagaatacttcacttgggctggatttaaagattacaaccttgtggtcaggatgattgagacagatgaggacttcartccttttcctggaggatatgactatttggttgactttttagatttatccttcccaaaagaaagaccacaacgagaacatccctatgaggaaatcyatagccgggtggatgtcatcagacacgtggtgaagaatggtctactctgggatgagttgtatataggattccaaacacggctccagcgggatcctgacatataccatcacctgttttggaatcattttcaaataaaactccccctcacaccacccaactggaagtcattcctgatgtgctgtgagcagaatgggcctgygattttgcaagartgcaaaaccacatgaaaatttcaagaattcactgatctgatgcaaaataaaaatttatcattacatcttgaacccaggaagcttacagcaaagagactatgctttatgacgtcagcaatagataattccacgttgcctttgtgatttgtatatatagcttacatttgtggaycactacatagccagattcaaaaatattttacttsttccatccacagttctctacagaaagaaccaatgaacccaayaggaacaaattctctgtggaaaacaaagcatagctgtagtagatacgaatccaatcacagaggaaacaggaagagaaaaacatccaagactacagtgaaaactggaaatggtctgttttcgtgatattcgtatgattaagatgcaaattttttcttaggaaaatgtgattgttaactagcattctgttttacatgttgacatttctaacacacacaccactgatttgaacttcaaaatttattttctgattatatatgctaggtctgattctgaagatacaagaattcaatggtggaatttgtctcctgaaatttctagattcataattagaagtgtttattaccaacttctcacttagattaacatcartgatgtttgattattctggttaaccgctcacatgcataacaataatgctagaaattcaggaattataattttgtgatttatactgtgtggtaaattattcagttctcactgcaaataaatataatgtatatcaatgtaatgtaggtcagaatgtctatggtgagcaaataaaagattattttaaaatatgaatttt

SEQ ID NO: 6127 - DNA, 2691 bp, Homo sapiens
tgactcgcctgctgtgctcttgcctgctgtgctctcgtaattactttcggaaaggttttctggctacaataaaatctgattaaatttgttaccaagcaaattgaattgttcaggctgcaacctttctagaagttttaaacgttatttaaaagaagatttcaacctcactccatttcagctttctctggggagctgctcttgtgctgtttggcccctgcctactcggaatggaacaaagatcctgttgtgcctatcacctgttgaagttgccagtcttaaggaaggaatcaatttctttcgcaataagagcactggcaaagactacgtcttgtacaagaataagagccgactgagggcatgcaagaatatgtgcaagcaccaaggaggcctgttcataaaagatatcgaggatttagccggaagttgttgaartggatgaaaacaacggacttttgmttttagaactgaatcctcctaacccttgggacttacagcccagatctcctgaagagttggcttttggagaagtrcagataacatatctcactcatgcctgcatggacctcaagttaggagacaagagaatggtgtttgacccttggttaatcggtcytgcttttgcccgtggatggtggttgctccatgagcctccatctgattggctggagaggctgtgccaggcagacctcrtttacatcagtcatctgmactcagaccacctgagttaccccacactgaaaaagcttgctgggagaagaccagatattcccatttatgttggaaacacagaaaggcctgtattttggaatctgaatcagagcggtgtccagttgactaatatcaatgtcgtgccatttggaatatggcagcaggtggacaaaaatcttcgattcatgatcttgatggayggtgttcatcctgagatggacacttgcattattgtggagtacaaaggtcataaaatactcaatayagtagactgcaccagacccaatgggggaaggctgcctatgaaggttgctctaatgatgagtgattttgctggaggagcatcaggctttccaatgactttcagtggtggaaaatttacggaggaatggaaagcccaattcattaaaacagaaaggaagaagctcytgaactacaaggctyggctggtgaagaacctgcaaccccgaatttattgtccctttgctgggtattttgtggaatctcacccatcagacaagtacatcaaggaaacaaacaccaaaaatgacccaaatgaactcaacaatcttatcaagaaaaactctgatgtgataacatggacccctcgaccgggagccacccttgatctgggaagaatgctgaaggatcsaacagacagcaagggcatcatagagcctccagaggggacaaaaatttacaaggattcctgggattttgaaccttatttggaaatcttgaatgctgctctaggagatgaaatatttcttcactcatcctggataaaagaatacttcacttgggctggatttaaagattacaaccttgtggtcaggatgattgagacagatgaggacttcartccttttcctggaggatatgactatttggttgactttttagatttatccttcccaaaagaaagaccacaacgagaacatccctatgaggaaatcyatagccgggtggatgtcatcagacacgtggtgaagaatggtctactctgggatgagttgtatataggattccaaacacggctccagcgggatcctgacatataccatcacctgttttggaatcattttcaaataaaactccccctcacaccacccaactggaagtcattcctgatgtgctgtgagcagaatgggcctgygattttgcaagartgcaaaaccacatgaaaatttcaagaattcactgatctgatgcaaaataaaaatttatcattacatcttgaacccaggaagcttacagcaaagagactatgctttatgacgtcagcaatagataattccacgttgcctttgtgatttgtatatatagcttacatttgtggaycactacatagccagattcaaaaatattttacttsttccatccacagttctctacagaaagaaccaatgaacccaayaggaacaaattctctgtggaaaacaaagcatagctgtagtagatacgaatccaatcacagaggaaacaggaagagaaaaacatccaagactacagtgaaaactggaaatggtctgttttcgtgatattcgtatgattaagatgcaaattttttcttaggaaaatgtgattgttaactagcattctgttttacatgttgacatttctaacacacacaccactgatttgaacttcaaaatttattttctgattatatatgctaggtctgattctgaagatacaagaattcaatggtggaatttgtctcctgaaatttctagattcataattagaagtgtttattaccaacttctcacttagattaacatcartgatgtttgattattctggttaaccgctcacatgcataacaataatgctagaaattcaggaattataattttgtgatttatactgtgtggtaaattattcagttctcactgcaaataaatataatgtatatcaatgtaatgtaggtcagaatgtctatggtgagcaaataaaagattattttaaaatatgaatttt

SEQ ID NO: 6128 - DNA, 2588 bp, Homo sapiens
ctgcggcgagagaatctccaactcatggaggctgagcttctgcgggagaggccacagcctgaagaagaggtgggatcggaaataaacccgcctgggagacctgcaggcaccagcagcatcgaacaaacaactgagatcctgttgtgcctatcacctgttgaagttgccagtcttaaggaaggaatcaatttctttcgcaataagagcactggcaaagactacgtcttgtacaagaataagagccgactgagggcatgcaagaatatgtgcaagcaccaaggaggcctgttcataaaagatatcgaggatttagccggaagttgttgaartggatgaaaacaacggacttttgmttttagaactgaatcctcctaacccttgggacttacagcccagatctcctgaagagttggcttttggagaagtrcagataacatatctcactcatgcctgcatggacctcaagttaggagacaagagaatggtgtttgacccttggttaatcggtcytgcttttgcccgtggatggtggttgctccatgagcctccatctgattggctggagaggctgtgccaggcagacctcrtttacatcagtcatctgmactcagaccacctgagttaccccacactgaaaaagcttgctgggagaagaccagatattcccatttatgttggaaacacagaaaggcctgtattttggaatctgaatcagagcggtgtccagttgactaatatcaatgtcgtgccatttggaatatggcagcaggtggacaaaaatcttcgattcatgatcttgatggayggtgttcatcctgagatggacacttgcattattgtggagtacaaaggtcataaaatactcaatayagtagactgcaccagacccaatgggggaaggctgcctatgaaggttgctctaatgatgagtgattttgctggaggagcatcaggctttccaatgactttcagtggtggaaaatttacggaggaatggaaagcccaattcattaaaacagaaaggaagaagctcytgaactacaaggctyggctggtgaagaacctgcaaccccgaatttattgtccctttgctgggtattttgtggaatctcacccatcagacaagtacatcaaggaaacaaacaccaaaaatgacccaaatgaactcaacaatcttatcaagaaaaactctgatgtgataacatggacccctcgaccgggagccacccttgatctgggaagaatgctgaaggatcsaacagacagcaagggcatcatagagcctccagaggggacaaaaatttacaaggattcctgggattttgaaccttatttggaaatcttgaatgctgctctaggagatgaaatatttcttcactcatcctggataaaagaatacttcacttgggctggatttaaagattacaaccttgtggtcaggatgattgagacagatgaggacttcartccttttcctggaggatatgactatttggttgactttttagatttatccttcccaaaagaaagaccacaacgagaacatccctatgaggaaatcyatagccgggtggatgtcatcagacacgtggtgaagaatggtctactctgggatgagttgtatataggattccaaacacggctccagcgggatcctgacatataccatcacctgttttggaatcattttcaaataaaactccccctcacaccacccaactggaagtcattcctgatgtgctgtgagcagaatgggcctgygattttgcaagartgcaaaaccacatgaaaatttcaagaattcactgatctgatgcaaaataaaaatttatcattacatcttgaacccaggaagcttacagcaaagagactatgctttatgacgtcagcaatagataattccacgttgcctttgtgatttgtatatatagcttacatttgtggaycactacatagccagattcaaaaatattttacttsttccatccacagttctctacagaaagaaccaatgaacccaayaggaacaaattctctgtggaaaacaaagcatagctgtagtagatacgaatccaatcacagaggaaacaggaagagaaaaacatccaagactacagtgaaaactggaaatggtctgttttcgtgatattcgtatgattaagatgcaaattttttcttaggaaaatgtgattgttaactagcattctgttttacatgttgacatttctaacacacacaccactgatttgaacttcaaaatttattttctgattatatatgctaggtctgattctgaagatacaagaattcaatggtggaatttgtctcctgaaatttctagattcataattagaagtgtttattaccaacttctcacttagattaacatcartgatgtttgattattctggttaaccgctcacatgcataacaataatgctagaaattcaggaattataattttgtgatttatactgtgtggtaaattattcagttctcactgcaaataaatataatgtatatcaatgtaatgtaggtcagaatgtctatggtgagcaaataaaagattattttaaaatatgaatttt

SEQ ID NO: 6129 - DNA, 3256 bp, Homo sapiens
agtgcgcgctggcgcaaggttggtggaagtcgcgttgtgcaggttcgtgcccggctggcgcggcgtggtttcactgttacatgccttgaagtgatgaggaggtttctgttactatatgctacacagcagggacaggcaaaggccatygcagaagaaatrtgtgagcaagctgtggtacatggattttctgcagatcttcactgtattagtgaatccgataagtatgacctaaaaaccgaaacagctcctcttgttgttgtggtttctaccacgggcaccggagacccacccgacacagcccgcaagtttgttaaggaaatacagaaccaaacactgccggttgatttctttgctcacctgcggtatgggttactgggtctyggtgattcagaatacacctacttttgcaatggggggaagataattgataaaygacttcaagagcttggagcccggcatttctatgacactggacatrcagatgactgtgtaggtttagaacttgtggttgagccgtggattgctggactctggccagccctcagaaagcattttaggtcaagcagaggacaagaggagataagtggcgcactcccggtggcatcacctgcatcctygaggacagacctygtgaagtcagagctgctacacattgaatctcaagtcgagcttctgagattcgatgattcaggaagaaaggattctgaggttttgaagcaaaatgcagtgaacagcaaccaatccaatgttgtaattgaagactttgagtcctcacttacccgttcggtacccccactctcacaagcctctctgaatattcctggtttacccccagaatatttacaggtacatctgcaggagwctcttggccaggaggaaagccaagtatctgtgacttcagcagatccagtttttcaagtgccaatttcaaaggcagttcaacttactacgaatgatgccataaaaaccactctgctggtagaattggacatttcaaatacagacttttcctatcagcctggagatgccttcagcgtgatctgccctaacagtgattctgaggtacaaagcctactccaaagactgcagsttgaagataaaagagagcactgcgtccttttgaaaataaaggcagacacaargaagaaaggagctaccttaccccagcatatacctgcgggatgttctctccagttcatttttacctggtgtcttgaaatccgagcaattcctaaaaaggcatttttrcgagcccttgtggactataccagtgacagtgctgaaaagcgcaggctacaggagctgygcagtaaacaaggggcagccgattatagcygctttgtacgagatgcctgtgcctgcttgttggatctcctcctcgctttcccttcttgccagccaccactcagtctcctgctcgaacatcttcctaaacttcaacccagaccatattcgtgtgcaagctcaagtttatttcacccaggaaagctccattttgtcttcaacattgtggaatttctgtctactgccacaacagaggttctgcggaagrgagtrtgtacaggctggctggccttgttggttgcttcagttcttcagccaaacatacatgcatcccatgaagacagygggaaagccctggctcctaagatatccatctctcctcgaacaacaaattctttccacttaccagatgacccctcaatccccatcataatggtgggtccaggaaccggcatagccccgtttattrggttcctacaacatagagagaaactccaagaacaacacccagatggaaattttggagcaatgtggttgttttttggctgcaggcataaggatagggattayctattcagaaaagagctcagayatttccttaagcatgggatcttaactcatctaaaggtttccttctcaagagatgctcctgttggggaggaggaagccccagcaaagtatgtrcaagacaacatccagcttcatggccagcaggtggcragaatcctcctccaggagaacggccatatttatgtgtgtggagatgcaaagaatatggccaaggatgtacatgatgcccttgtgcaaataataagcaaagaggttggagttgaaaaactagaagcaatgaaaaccctggccactttaaaagaagaaaaacgctaccttcaggatatttggtcataaaaccagaaattaaagaaagaggattaagcttttttgactgaaagtactraaagtcagctttacyagtgccaaacctttaaattttcaaaagaaaattttctttcaacatttcttgaaggacatggagtggagattggatcatttaacaatrtaacaaaacttcctgatttgattttacgtatcttctatctacgcccttcctgtgcctgtgactctccccaaattgccctgttgccttgagctcttctgagctaaggcagccttcagtccctatcagcgcctcctttacttcccagagaacttcacagagactctgtccttccatgcaaaggcttcctgaaatagggagactgactgagtagctcattcttgtgacttrcagtgccaacatttaaaaaagtatgaaaatgatttatttttatatgaygtatacccataaagaatgctcatattaatgtacttaaattacacatgtagakcatatctgttatatgtttatgtaactatcaaatggttatttgttactaaagctatatttctrataaaaaatattttaggataattgcctacagagggatttatttttatgatgctggaaatatgaaatgtattttaaaatttcactctggcatatgatttatctatcaccattactttttttwaagtcacaatttcagaattttgggacatttgcattcaatttacaggtaccagtacgtacatattttaatagaaagatacaacctttttattttcactccttttatttctgctgcttggcacatttttgagttttcccacattatttgtctccatgataccactcaagcagtgtgctggacctaaaatactgactttagttagtatccttggatttttagattcccagtgtctaattccctgttataatttgcacaaacaaaacaaaatgttatgataatctttctccactgttctaatatatattgtatttttatttgatagcttgggatttaaaacatctctgttgaaggcttttgatccttttgagaaataaagatctgaaagaaatggcataatcttaaaa

SEQ ID NO: 6130 - DNA, 3274 bp, Homo sapiens
ggagctttctattggtccygggtaccgagcatgggcgctgcgtcagtgcgcgctggcgcaaggttggtggaagtcgcgttgtgcagtttcactgttacatgccttgaagtgatgaggaggtttctgttactatatgctacacagcagggacaggcaaaggccatygcagaagaaatrtgtgagcaagctgtggtacatggattttctgcagatcttcactgtattagtgaatccgataagtatgacctaaaaaccgaaacagctcctcttgttgttgtggtttctaccacgggcaccggagacccacccgacacagcccgcaagtttgttaaggaaatacagaaccaaacactgccggttgatttctttgctcacctgcggtatgggttactgggtctyggtgattcagaatacacctacttttgcaatggggggaagataattgataaaygacttcaagagcttggagcccggcatttctatgacactggacatrcagatgactgtgtaggtttagaacttgtggttgagccgtggattgctggactctggccagccctcagaaagcattttaggtcaagcagaggacaagaggagataagtggcgcactcccggtggcatcacctgcatcctygaggacagacctygtgaagtcagagctgctacacattgaatctcaagtcgagcttctgagattcgatgattcaggaagaaaggattctgaggttttgaagcaaaatgcagtgaacagcaaccaatccaatgttgtaattgaagactttgagtcctcacttacccgttcggtacccccactctcacaagcctctctgaatattcctggtttacccccagaatatttacaggtacatctgcaggagwctcttggccaggaggaaagccaagtatctgtgacttcagcagatccagtttttcaagtgccaatttcaaaggcagttcaacttactacgaatgatgccataaaaaccactctgctggtagaattggacatttcaaatacagacttttcctatcagcctggagatgccttcagcgtgatctgccctaacagtgattctgaggtacaaagcctactccaaagactgcagsttgaagataaaagagagcactgcgtccttttgaaaataaaggcagacacaargaagaaaggagctaccttaccccagcatatacctgcgggatgttctctccagttcatttttacctggtgtcttgaaatccgagcaattcctaaaaaggcatttttrcgagcccttgtggactataccagtgacagtgctgaaaagcgcaggctacaggagctgygcagtaaacaaggggcagccgattatagcygctttgtacgagatgcctgtgcctgcttgttggatctcctcctcgctttcccttcttgccagccaccactcagtctcctgctcgaacatcttcctaaacttcaacccagaccatattcgtgtgcaagctcaagtttatttcacccaggaaagctccattttgtcttcaacattgtggaatttctgtctactgccacaacagaggttctgcggaagrgagtrtgtacaggctggctggccttgttggttgcttcagttcttcagccaaacatacatgcatcccatgaagacagygggaaagccctggctcctaagatatccatctctcctcgaacaacaaattctttccacttaccagatgacccctcaatccccatcataatggtgggtccaggaaccggcatagccccgtttattrggttcctacaacatagagagaaactccaagaacaacacccagatggaaattttggagcaatgtggttgttttttggctgcaggcataaggatagggattayctattcagaaaagagctcagayatttccttaagcatgggatcttaactcatctaaaggtttccttctcaagagatgctcctgttggggaggaggaagccccagcaaagtatgtrcaagacaacatccagcttcatggccagcaggtggcragaatcctcctccaggagaacggccatatttatgtgtgtggagatgcaaagaatatggccaaggatgtacatgatgcccttgtgcaaataataagcaaagaggttggagttgaaaaactagaagcaatgaaaaccctggccactttaaaagaagaaaaacgctaccttcaggatatttggtcataaaaccagaaattaaagaaagaggattaagcttttttgactgaaagtactraaagtcagctttacyagtgccaaacctttaaattttcaaaagaaaattttctttcaacatttcttgaaggacatggagtggagattggatcatttaacaatrtaacaaaacttcctgatttgattttacgtatcttctatctacgcccttcctgtgcctgtgactctccccaaattgccctgttgccttgagctcttctgagctaaggcagccttcagtccctatcagcgcctcctttacttcccagagaacttcacagagactctgtccttccatgcaaaggcttcctgaaatagggagactgactgagtagctcattcttgtgacttrcagtgccaacatttaaaaaagtatgaaaatgatttatttttatatgaygtatacccataaagaatgctcatattaatgtacttaaattacacatgtagakcatatctgttatatgtttatgtaactatcaaatggttatttgttactaaagctatatttctrataaaaaatattttaggataattgcctacagagggatttatttttatgatgctggaaatatgaaatgtattttaaaatttcactctggcatatgatttatctatcaccattactttttttwaagtcacaatttcagaattttgggacatttgcattcaatttacaggtaccagtacgtacatattttaatagaaagatacaacctttttattttcactccttttatttctgctgcttggcacatttttgagttttcccacattatttgtctccatgataccactcaagcagtgtgctggacctaaaatactgactttagttagtatccttggatttttagattcccagtgtctaattccctgttataatttgcacaaacaaaacaaaatgttatgataatctttctccactgttctaatatatattgtatttttatttgatagcttgggatttaaaacatctctgttgaaggcttttgatccttttgagaaataaagatctgaaagaaatggcataatcttaaaa

SEQ ID NO: 6131 - DNA, 1185 bp, Homo sapiens
gctgctattgcgcccaaggatgatctctccatcaggttcctgaagccctggctgggagaagggatactgctgagtggcggtgacaagtggagccgccaccgtcggatgctgacgcccgccttccatttcaacatcctgaaaccctatataaagatcttcaacaggagtgtgaacatcatgcacgacaagtggcagcacctggcctcagagggcagcagtcgtctggacatgtttgagcacatcagcctcatgaccttggacagtctrcagaaatgcatcttcagctttgacagccattgtcaggagaggcccagtgaatatattgctaccatcttggagctcagtgcccttgtagaaaaaagaaaccagcatatcctccagcacatggactttctgtattacctctcccatgacgggyggcgcttccgcagggcckgccgcctgactttggatttcattgatgtgcttctgctgagcaaggatgaagatgggaaggtgttgtcagatgaggatgtaagagcagaggctgacaccttcatgtttgcaggccatgacaccacagccagtggtctctcctgggtcctgtacracctcgcgaggcacccagaataccaggagcactgccggcaggaggtgcaagagcttctgaaggaccgcgatcctaaagagattgaatggtacgacctggcccagctgcccttcctgaccatgtgcgtgaaggagagcctgcggttgcatccccctgttccgtacacctcccgccacygcatctgggacattgtgctcccagatggtagggtctacaaccccttccgcttcaactcagagaacagcaaggagaggtcacctctggcttttattcccttctctgcgggacccagtttatgggaaaaygtccatagaatgggggctgatctgggtgcggttgaggatcccgggccaggtttccggcgtgwtggggcccaaatgcggatcctgggcgcaktcacagtccccactcccacccgcaggaactgcatcgggcasgcgttcgccatggcgaagatgaaggtggtcctggcgctgacgctgctgcgcttccgcttcctgctggaccacacsgagccccgcaggaagccggagctgatcatgcgcgctgaaggaggactttggctgcgagtggagcccctgaacgcgggcttgcag

SEQ ID NO: 6132 - DNA, 1095 bp, Homo sapiens
gctgctattgcgcccaaggatgatctctccatcaggttcctgaagccctggctgggagaagggatactgctgagtggcggtgacaagtggagccgccaccgtcggatgctgacgcccgccttccatttcaacatcctgaaaccctatataaagatcttcaacaggagtgtgaacatcatgcacgacaagtggcagcacctggcctcagagggcagcagtcgtctggacatgtttgagcacatcagcctcatgaccttggacagtctrcagaaatgcatcttcagctttgacagccattgtcaggagaggcccagtgaatatattgctaccatcttggagctcagtgcccttgtagaaaaaagaaaccagcatatcctccagcacatggactttctgtattacctctcccatgacgggyggcgcttccgcagggcckgccgcctggtgcacgacttcacagaygccgtcatccaggagcggcgccatacccttcccactcagggtattgtgatttcctcaagaacaaagccaagtcctagactttggatttcattgatgtgcttctgctgagcaaggatgaagatgggaaggtgttgtcagatgaggatgtaagagcagaggctgacaccttcatgtttgcaggccatgacaccacagccagtggtctctcctgggtcctgtacracctcgcgaggcacccagaataccaggagcactgccggcaggaggtgcaagagcttctgaaggaccgcgatcctaaagagattgaatggcattatctgcatcatcaacattataggaatccatcacaacccaactgtgtgaccggatcctgaggtctacaaccccttccgcttcaactcagagaacagcaaggagaggtcacctctggcttttattcccttctctgcgggacccaggaactgcatcgggcasgcgttcgccatggcgaagatgaaggtggtcctggcgctgacgctgctgcgcttccgcttcctgctggaccacacsgagccccgcaggaagccggagctgatcatgcgcgctgaaggaggactttggctgcgagtggagcccctgaacgcgggcttgcag

SEQ ID NO: 6133 - DNA, 7145 bp, Homo sapiens
ggcggggccagccgcccgctcggctcaggcgctgcgggcgcctattgacccagcggctgctgcgccgccgctgtctcctcctgctcgtggcgggcggtgctggagcgccaagtggcgctggagaaccggcgcttcctttcgccgcttccgccgccatctccgcgtttgtggggcgggaaagagggagggggctagcggctgcagctggagcgggcttctctccggggacggtcctttcctccctgctctccttttccttctttccgcgttgccgccgcccgccccctgcgcctccccgcggagcctgggtccgggagggggaaggtaggggcggcggggggcgggagagtctggcgagcggacgctagctctgaggaaactcatcaatccgtgagccccggagtccggggtgcacatcggcccagccgcagcgtcggcggcggcggcggcagcagcacgaaggggctcagtcggggtaggcgggggcggtgccggtgccgcgggggcgggcccgaccgtcccgcccagaagttgtagggcttggctcctcgcgatcttgttcctttcccctccgcttctctgacctagctgcgcggccccggcccgggagctgccgaacccgcgcctcccctgggtgaggaggacackcctgccctcgtcgagaaaacttttcctgccgactcagttggggcggcggtggcaggaagtgcgggcagcgacctctcctccgcctgccccgcgcgccctgcsggaggtcggcgctgagcttgcgatcaagtttgtgggggccccccttcccagttgccggcgagtctcgcctcgagaggggcgcccgaccccggggagggcggcaggccagggcgaaggccaagggcgtgtggtggcgccggagactaggtgcggagcaaggcggggactcgcacccgcatccgagagcgcggaggtcgcgcagcccgggagaagggagcctccggcggctgcttcctagagtccacagtgcgctgtctcctttggctgaggagagtgtcctggccccgagtctatcgaggaaaatgaagttaagccgccagttcaccgtgttcggcagtgcgatcttctgtgtggtgattttctcgctctacctgatgctggaccggggtcacttagactaccccaggaacccgcgccgcgagggctccttccctcagggccagctctcaatgttgcaagaaaaaatagaccatttggagcgtttgctagctgagaataatgagatcatctcaaatattagagactcagtcatcaatttgagtgagtctgtggaggatggtccgaaaagttcacaaagcaatttcagccaaggtgctggctcacatcttctgccctcacaattatccctctcagttgacactgcagactgtctgtttgcttcacaaagtggaagtcacaattcagatgtgcagatgttggatgtttacagtctaatttcttttgacaatccagatggtggagtttggaagcaaggatttgacattacttatgaatctaatgaatgggacactgaaccccttcaagtctttgtggtgcctcattcccataacgacccaggttggttgaagactttcaatgactactttagagacaagactcagtatatttttaataacatggtcctaaagctgaaagaagactcacggaggaagtttatttggtctgagatctcttacctttcaaagtggtgggatattatagatattcagaagaaggatgctgttaaaagtttaatagaaaatggtcagcttgaaattgtgacaggtggctgggttatgcctgatgaagctactccacattattttgccttaattgatcaactaattgaaggacatcagtggctggaaaataatataggagtgaaacctcggtccggctgggctattgatccctttggacactcaccaacaatggcttatcttctaaaccgtgctggactttctcacatgcttatccagagagttcattatgcagttaaaaaacactttgcactgcataaaacattggagtttttttggagacagaattgggatctgggatctgtcacagatattttatgccacatgatgcccttctacagctatgacatccctcacacttgtggacctgatcctaaaatatgctgccagtttgattttaaacgtcttcctggaggcagatttggttgtccctggggagtccccccagaaacaatacatcctggaaatgtccaaagcagggctcggatgctactagatcagtaccgaaagaagtcaaagctttttcgwaccaaagttctcctggctccactaggagatgatttccgctactgtgaatacacrgaatgggatttacagtttaagaattatcagcagctttttgattatatgaattctcagtccaagtttaaagttaagatacagtttggaactttatcagatttttttgatgcgctggataaagcagatgaaactcagagagacaagggccartcgatgttccctgttttaagtggagattttttcacttatgccgatcgagatgatcattactggagtggctattttacatccagacccttttacaaacgaatggacagaatcatggaatctcatttaagggctgctgaaattctttactatttcgccctgagacaagctcacaaatacaagataaataaatttctctcatcatcactttacacggcactgacagaagccagaaggaatttgggactgtttcaacatcatgatgctatcacaggaactgcaaaagactgggtggttgtggattatggtaccagactttttcattcgttaatggttttggagaagataattggaaattctgcatttcttcttattttgaaggacaaactcacatacgactcttactctcctgataccttcctggagatggatttgaaacaaaaatcacaagattctctgccacaaaaaaatataataaggctgagtgcggagccaaggtaccttgtggtctayaatcctttagaacaagaccgaatctcgttggtctcagtctatgtgagttccccgacagtgcaagtgttctctgcttcaggaaaacctgtggaagttcaagtcagcgcagtttgggatacagcaaatactatttcagaaacagcctatgagatctcttttcgagcacatataccgccattgggactgaaagtgtataagattttggaatcagcaagttcaaattcacatttagctgattatgtcttgtataagaataaagtagaagatagcggaattttcaccataaagaatatgataaatactgaagaaggtataacactagagaactcctttgttttacttcggtttgatcaaactggacttatgaagcaaatgatgactaaagaagatggtaaacaccatgaagtaaatgtgcaattttcatggtatggaaccacaattaaaagagacaaaagtggtgcctacctcttcttacctgatggtaatgccaagccttatgtttacacaacaccgccctttgtcagagtgacacatggaaggatttattcggaagtgacttgcttttttgaccatgttactcatagagtccgactataccacatacagggaatagaaggacagtctgtggaagtttccaatattgtggacatccgaaaagtatataaccgtgagattgcaatgaaaatttcttctgatataaaaagccaaaatagattttatactgacctaaatgggtaccagattcaacctagaatgacactgagcaaattgcctcttcaagcaaatgtctatcccatgaccacaatggcctatatccaggatgccaaacatcgtttgacactgctctctgctcagtcwttaggggtttcgagtttgaatagtggtcagattgaagttatcatggatcgaagactcatgcaagatgataatcgtggccttgagcaaggtatccaggataacaagattacagctaatctatttcgaatactactagaaaaaagaagtgctgttaatacggaagaagaaaagaagtcggtcagttatccttctctccttagccacataacttcttctctcatgaatcatccagtcattccaatggcaaataagttctcctcrcctacccttgagctgcaaggtgaattctctccattacagtcatctttgccttgtgacattcatctggttaatttgagaacaatacagtcaaaggtgggcaatgggcactccaatgaggcagccttgatcctccacagaaaagggtttgattgtcggttctctagcaaaggcacagggctgttttgttctactactcagggaaagatattggtacagaaacttttaaacaagtttattgtcraaagtctcacaccttcatcactatccttgatgcattcacctcccggcactcagaatataagtgagatcaacttgagtccaatggaartcagcacattccgaatccagttgaggtgaacctgactttcacatttggattgagratcattggcttttatacctttcttggtttgacgtgcaataaagaagcacattattttagcttctggctactgtgagaacatgaattctgtgattctgtgggttttttcttttttcttttaccagtacagtaagaaaaaaaaaaaaaaaaaaaaagccatgctatcaatcaagattctttttttttaaactttctcccatgaactaccaccatcagtatgaattgatgcaacaaatgaagaaatatttaaagacagcctctcaacagattgtatctcaggttaaatgctaactaattatgtctgtgttgggggttgcraagagattcttaaaagtatctgtgtgttgatcatcagttttacaaaaacacctatttggctgaaatggaataaaatgtttgtgggtaaaagctaatggccaaaatggttgcaatcattcatactagttagaaaaattatgtgttgaaataagtggaaaagtgcaatccatccacccttatgattaacgtagatgatttttatacctttttctgatgtacctcttgaccttctccttcccttcctaccctttctragtatttccagaaatacctgattttgaatcattcaacagtagaaaaagaggcatattttcattacttgacaatgtgggatgggtgcaatttattccatcttcactaaaatagaagcaattccataggtaccataaacctattttaggtaccacaaggtgtctttttacacagctcatttgaatacaggtgttctgagaaggggtttctattttaaaattaccatatcaaaataaatgtgccttatttttttataagtcttgttaaatcagtgtccatattactgtttggggaagggggaatgttgtggggtctgggagagggtgggtactttctatgacacataaattgtgtaatttttgcctgacaatgctggccacattctgatctgtttcattaaatttgtggtgatgttacwctaaacattttgactatttgaatgtactgagatgtcagaaaacaaaacaaggaaggaaaatattgttaattaaaatgtgctgctgccaaggaaactgcaacttgaagcaaggattttgtaaaatgcaaaatccagctactgtttccatttcacagtagttaactatattaaagagagaatgctttaaaattgatcttgttttgaaaccyacttttatgtagctcatcatggtttatcttactaaggaatatgtttgttcattcagttctcaacttttgtatgtgctaaccttaaagtgaagttctgagcccrtgtgccattacagtgcttttaataaaatttatwtgggattattgtttccttaacattaaaatratagcgacatttagactatkcaattttagcatagaaaggagtctttgagtatgtacagttttgaaaattctctttgagataattgatttcatattctgtggctttcaacctccatttacctcttgtcattccaacatctttatagagaaatraaaacccaatttctytttcaccatttagtttgattatcatctggattttcactcaagatgcagctcctaagattattgttatgttaaattcataaactccttcacctttaataattaaggaaacaataccagtgttgataaagatattacaaggggtaatttcatgcaataaacatgtaccgtaagttttcttccacatattttgggaaaaaactaaaaaaagaaaaaggacttcctttttgtggacatctacagatgttagggttgccagaagcaaatcccaggaatgagatcagtattttcattgcatcttaaatgtataaccttcctgtgggagttcagtttgtctgtggttaagtgggtgtgcttaatcattctcgaaattgtgatcagatgaaataaaaaaaaaatcttgatgcaataacagtggttttgccacttctggttgtttgcgatggatctgtcccatgtcagtctggggttttattcagcttgtgttgctaccagcagttcacaggtaaagcagaaattctctttaaccagcaagtttctgctttttaaggttacttttagaataaatcatcagggaaacagagaggatgctttgctttgggttgtagtcaaaaactgattaaataatttaatgtctctggcacacactaaaaaccatacacttcagttgtgatctcagtggcatatttatttggttaggtttcgttacatttattattacagatgttcagttgaccaagtagttcagtgttttctttcctttttttggaaattttagtttgagtttgtgactgcagtgttcaagaactcagcatccttgttttctacaaatactgattaaaataaaatgctgtaaaatgtgatgtaaaacattatcatgatcttcccatgcctttgttgtacttgtgccgaagtgttttgatattcctttgtctggaagaaaatgtttgctttcattttgatcattttgttcaccttggaatcaacaggttttgatattttctcttggaagattttatatctttttgggaatatgtaatataagatctctaataaaagataatcttatcatgtacatggtcctctagagtagttcttaatcctat

SEQ ID NO: 6134 - DNA, 2061 bp, Homo sapiens
ggcggggccagccgcccgctcggctcaggcgctgcgggcgcctattgacccagcggctgctgcgccgccgctgtctcctcctgctcgtggcgggcggtgctggagcgccaagtggcgctggagaaccggcgcttcctttcgccgcttccgccgccatctccgcgtttgtggggcgggaaagagggagggggctagcggctgcagctggagcgggcttctctccggggacggtcctttcctccctgctctccttttccttctttccgcgttgccgccgcccgccccctgcgcctccccgcggagcctgggtccgggagggggaaggtaggggcggcggggggcgggagagtctggcgagcggacgctagctctgaggaaactcatcaatccgtgagccccggagtccggggtgcacatcggcccagccgcagcgtcggcggcggcggcggcagcagcacgaaggggctcagtcggggtaggcgggggcggtgccggtgccgcgggggcgggcccgaccgtcccgcccagaagttgtagggcttggctcctcgcgatcttgttcctttcccctccgcttctctgacctagctgcgcggccccggcccgggagctgccgaacccgcgcctcccctgggtgaggaggacackcctgccctcgtcgagaaaacttttcctgccgactcagttggggcggcggtggcaggaagtgcgggcagcgacctctcctccgcctgccccgcgcgccctgcsggaggtcggcgctgagcttgcgatcaagtttgtgggggccccccttcccagttgccggcgagtctcgcctcgagaggggcgcccgaccccggggagggcggcaggccagggcgaaggccaagggcgtgtggtggcgccggagactaggtgcggagcaaggcggggactcgcacccgcatccgagagcgcggaggtcgcgcagcccgggagaagggagcctccggcggctgcttcctagagtccacagtgcgctgtctcctttggctgaggagagtgtcctggccccgagtctatcgaggaaaatgaagttaagccgccagttcaccgtgttcggcagtgcgatcttctgtgtggtgattttctcgctctacctgatgctggaccggggtcacttagactaccccaggaacccgcgccgcgagggctccttccctcagggccagctctcaatgttgcaagaaaaaatagaccatttggagcgtttgctagctgagaataatgagatcatctcaaatattagagactcagtcatcaatttgagtgagtctgtggaggatggtccgaaaagttcacaaagcaatttcagccaaggtgctggctcacatcttctgccctcacaattatccctctcagttgacactgcagactgtctgtttgcttcacaaagtggaagtcacaattcagatgtgcagatgttggatgtttacagtctaatttcttttgacaatccagatggtggagtttggaagcaaggatttgacattacttatgaatctaatgaatgggacactgaaccccttcaagtctttgtggtgcctcattcccataacgacccaggttggttgaagactttcaatgactactttagagacaagactcagtatatttttaataacatggtcctaaagctgaaagaagactcacggaggaagtttatttggtctgagatctcttacctttcaaagtggtgggatattatagatattcagaagaaggatgctgttaaaagtttaatagaaaatggtcagcttgaaattgtgacaggtggctgggttatgcctgatgaagctactccacattattttgccttaattgatcaactaattgaaggacatcagtggctggaaaataatataggagtgaaacctcggtccggctgggctattgatccctttggacactcaccaacaatggcttatcttctaaaccgtgctggactttctcacatgcttatccagagagttcattatgcagttaaaaaacactttgcactgcataaaacattggagtttttttggagacagaattggg

SEQ ID NO: 6135 - DNA, 960 bp, Homo sapiens
atgaaggagacgactgtttgcatggtcagcatagaacgggcacccggttccaactgctggatcccctttgaccaggccccaactgttggacccccgacaaccaggtcccaactgcctgattccgccaaccaggccccaactggtccccacatgaaggagggcatgagagttctgactcagctggtggccacttacccccagggctttaagatctggaygaaccccattactcccatcatcaggttgtgccaccccaacrtcatctggtctgtcatcaatgcctcagccaccattgcaccaaaagacgaggccttctacaagttcctgaagccctggctgggggatgggctcctggtaaatgccrgtgacaagtggagcygccaccrtcagatgctgatgcccrccttccatttcaacatgctgaagccctatatgaagtttttcactgacagtgtgaatatsatgcacgccaagtggcagctcctggcctcagggggcagtgcccatctggacatgtttgagcacaccagcctcatgaccttggacagtgtgcagaaatgtgtcttcagctttgacagccattgtcaggacggatggcgcttccgcagggcctgctgcctggttcatgacttcacagaagctatcatccaggagcagcgccacacccttactagccagggtgttgattatttccacsaagtaaaggccaagtccaagactttggacttcactgatgtactcctgctgagcaaggatgaagattggaaggagttgtctgatgaggaaataagagcagaagctgacaccttcatgtttgaggatgagtgtcccagtcataacaccacggccagtggcctctcctgggtcctatactaccttgcaaggcacccagaataccaggagcactgctggcaggaggtgcaaaagcttctgaaggatcacgagcctaaagagattgaa

SEQ ID NO: 6136 - DNA, 3325 bp, Homo sapiens
cctttctaaagctctttcaccatgcctggatcacttcctttgaatgcagaagcttgctggccaaaagatgtgggaattgttgcccttgagatctattttccttctcaatatgttgatcaagcagagttggaaaaataygatggtgtagatgctggaaagtataccattggcttgggccaggccaagatgggcttctgcacagatagagaagatattaactctctttgcatgactgtggttcagaatcttatggagagaaataacctttcctatgattgcattgggcggctggaagttggaacagagacaatcatcgacaaatcaaagtctgtgaagactaatttgatgcagctgtttgaagagtctgggaatacagatatagaaggaatcgacacaactaatgcatgctatggaggcacagctgctgtcttcaatgctgttaactggattgagtccagctcttgggatggacggtatgccctggtagttgcaggagatattgctgtatatgccacaggaaatgctagacctacaggtggagttggagcagtagctctgctaattgggccaaatgctcctttaatttttgaacgagggcttcgtgggacacatatgcaacatgcctatgatttttacaagcctgatatgctatctgaatatcctatagtagatggaaaactctccatacagtgctacctcagtgcattagaccgctgctaytctgtctactgcaaaaagatccatgcccagtggcagaaagagggaaatgataaagattttaccttgaatgattttggcttcatgatctttcactcaccatattgtaaactggttcagaaatctctagctcggatgttgctgaatgacttccttaatgaccagaatagagataaaaatagtatctatagtggcctggaagcctttggggatgttaaattagaagacacctactttgatagagatgtggagaaggcatttatgaaggctagctctgaactcttcagtcagaaaacaaaggcatctttacttgtatcaaatcaaaatggaaatatgtacacatcttcagtatatggttcccttgcatctgttctagcacagtactcacctcagcaattagcagggaagagaattggagtgttttcttatggttctggtttggctgccactctrtactctcttaaagtcacacaagatgctacaccggggtctgctcttgataaaataacagcaagtttatgtgatcttaaatcaaggcttgattcaagaactggtgtggcaccagatgtcttcgctgaaaacatgaagctcagagaggacacccatcatttggtcaactatattccccagggttcaatagattcactctttgaaggaacgtggtacttagttagggtggatgaaaagcacagaagaacttacgctcggcgtcccactccaaatgatgacactttggatgaaggagtaggacttgtgcattcaaacatagcaactgagcatattccaagccctgccaagaaagtaccaagactccctgccacagcagcagaacctgaagcagctgtcattagtaatggggaacattaagatactctgtgaggtgcaagacttcagggtggggtgggcatggggtgggggtatgggaacagttggaggaatgggatatctggggataattttaaaggattacatgttatgtaaatttttatgtgactgacatggagcctggatgactatcgtgtacttgggaaagtctctttgctctatttgctgacatgcttcctgttgtggtctggccaatgccaaatgtactcgaatgatgttaagggctctgtaaaacttcatacctctttggccatttgtatgcatgatgtttggtttttaaacatggtataatgaattgtgtacttctgtcagaagaaagcagakgtactaatctccaattaaaaaattttttaacatgtaagaattttgtactttgaacaacaagattacagaaagtacctgtggtttttggaaaacatttctagcttggggaatgtgacaacattccccagtgtggtaaaattggggtaaaatgtggtaaaatgtgatacgcacaaaccctttgaaaatagcawaacaaacatgccctttttctaaaattgataaatcctaaagaggaagaaaagagctgggacaataaaacactggctctggaatctggaatgttaagtccaggccagcagtgacaaaagttattgtaatgacctctgaacagagaaacactgccattgaagaggcttctggtatagaaaacatggtacattcaggagctgtgaatatagctctaggtgtgcycctgaatcagttcatggtagattatgctgaacaacagtgagatgttattggaggtgtggatgagggagtttgttgttgcagtccttctttgcaccttattttaaagaataaatgaaacatttttctggttacttttttaaaaatttaaaatggaagggaagaataggggcagggcattattaggctatttctgatgcttcagtgttataaattcaacatagaggctgacaacctaaattcatggtgtaacacagctcttttccttttccttttttttttttttttggtatctgttcaatgaaaataaggtatgacccaagtttttacctagtctgactagaagtattccacttcaaggtctgaagtaggacttttaccttaaaaaacaacaacaaacaaaactatcacacaggatagataagaagattggttaaacagttttgtgtagatctttttggtgctgaactatgacatgagccttatagattgtaaaatagggatagttggaactaatgtacagaactaaattttttaaactttatttgctgttaaattctgtgaagtttcagttatctaaaataaatatacacaaatatgaaatataatgtttcagattgcaaggtaatatgtaatagtagtgtttgtaagatactcttgtctratattaactagtagtattttgatttgtacagtcataatttgttaaaatgacttcatttaacattcactgatgtagattaataatgtaagttctgatttaaagaatggtggsaaaatggtgcatgtaatacttttgcaagtgttggggagatcggtatgttttgaaaagagtaatttaacttttgggtgccaggaaatgggttttctcaaagtccattgccggcaatgggcaggcctgcaaatactggcacagagcattaatcatacaccttattaacggtgaggtgaataactttgaaataaagttttagagaaatgtttcagatac

SEQ ID NO: 6137 - DNA, 3396 bp, Homo sapiens
ccgcctcccagcgactctcggcggtgccggagtcgggtgggttggcggctataaagctggtrgcgaaggggaggcgccgcggactgtcctttcgtggctcactccctttcctctgctgccgctcggtcacgcttgctctttcaccatgcctggatcacttcctttgaatgcagaagcttgctggccaaaagatgtgggaattgttgcccttgagatctattttccttctcaatatgttgatcaagcagagttggaaaaataygatggtgtagatgctggaaagtataccattggcttgggccaggccaagatgggcttctgcacagatagagaagatattaactctctttgcatgactgtggttcagaatcttatggagagaaataacctttcctatgattgcattgggcggctggaagttggaacagagacaatcatcgacaaatcaaagtctgtgaagactaatttgatgcagctgtttgaagagtctgggaatacagatatagaaggaatcgacacaactaatgcatgctatggaggcacagctgctgtcttcaatgctgttaactggattgagtccagctcttgggatggacggtatgccctggtagttgcaggagatattgctgtatatgccacaggaaatgctagacctacaggtggagttggagcagtagctctgctaattgggccaaatgctcctttaatttttgaacgagggcttcgtgggacacatatgcaacatgcctatgatttttacaagcctgatatgctatctgaatatcctatagtagatggaaaactctccatacagtgctacctcagtgcattagaccgctgctaytctgtctactgcaaaaagatccatgcccagtggcagaaagagggaaatgataaagattttaccttgaatgattttggcttcatgatctttcactcaccatattgtaaactggttcagaaatctctagctcggatgttgctgaatgacttccttaatgaccagaatagagataaaaatagtatctatagtggcctggaagcctttggggatgttaaattagaagacacctactttgatagagatgtggagaaggcatttatgaaggctagctctgaactcttcagtcagaaaacaaaggcatctttacttgtatcaaatcaaaatggaaatatgtacacatcttcagtatatggttcccttgcatctgttctagcacagtactcacctcagcaattagcagggaagagaattggagtgttttcttatggttctggtttggctgccactctrtactctcttaaagtcacacaagatgctacaccggggtctgctcttgataaaataacagcaagtttatgtgatcttaaatcaaggcttgattcaagaactggtgtggcaccagatgtcttcgctgaaaacatgaagctcagagaggacacccatcatttggtcaactatattccccagggttcaatagattcactctttgaaggaacgtggtacttagttagggtggatgaaaagcacagaagaacttacgctcggcgtcccactccaaatgatgacactttggatgaaggagtaggacttgtgcattcaaacatagcaactgagcatattccaagccctgccaagaaagtaccaagactccctgccacagcagcagaacctgaagcagctgtcattagtaatggggaacattaagatactctgtgaggtgcaagacttcagggtggggtgggcatggggtgggggtatgggaacagttggaggaatgggatatctggggataattttaaaggattacatgttatgtaaatttttatgtgactgacatggagcctggatgactatcgtgtacttgggaaagtctctttgctctatttgctgacatgcttcctgttgtggtctggccaatgccaaatgtactcgaatgatgttaagggctctgtaaaacttcatacctctttggccatttgtatgcatgatgtttggtttttaaacatggtataatgaattgtgtacttctgtcagaagaaagcagakgtactaatctccaattaaaaaattttttaacatgtaagaattttgtactttgaacaacaagattacagaaagtacctgtggtttttggaaaacatttctagcttggggaatgtgacaacattccccagtgtggtaaaattggggtaaaatgtggtaaaatgtgatacgcacaaaccctttgaaaatagcawaacaaacatgccctttttctaaaattgataaatcctaaagaggaagaaaagagctgggacaataaaacactggctctggaatctggaatgttaagtccaggccagcagtgacaaaagttattgtaatgacctctgaacagagaaacactgccattgaagaggcttctggtatagaaaacatggtacattcaggagctgtgaatatagctctaggtgtgcycctgaatcagttcatggtagattatgctgaacaacagtgagatgttattggaggtgtggatgagggagtttgttgttgcagtccttctttgcaccttattttaaagaataaatgaaacatttttctggttacttttttaaaaatttaaatgttataaattcaacatagaggctgacaacctaaattcatggtgtaacacagctcttttccttttccttttttttttttttttggtatctgttcaatgaaaataaggtatgacccaagtttttacctagtctgactagaagtattccacttcaaggtctgaagtaggacttttaccttaaaaaacaacaacaaacaaaactatcacacaggatagataagaagattggttaaacagttttgtgtagatctttttggtgctgaactatgacatgagccttatagattgtaaaatagggatagttggaactaatgtacagaactaaattttttaaactttatttgctgttaaattctgtgaagtttcagttatctaaaataaatatacacaaatatgaaatataatgtttcagattgcaaggtaatatgtaatagtagtgtttgtaagatactcttgtctratattaactagtagtattttgatttgtacagtcataatttgttaaaatgacttcatttaacattcactgatgtagattaataatgtaagttctgatttaaagaatggtggsaaaatggtgcatgtaatacttttgcaagtgttggggagatcggtatgttttgaaaagagtaatttaacttttgggtgccaggaaatgggttttctcaaagtccattgccggcaatgggcaggcctgcaaatactggcacagagcattaatcatacaccttattaacggtgaggtgaataactttgaaataaagttttagagaaatgtttcagatac

SEQ ID NO: 6138 - DNA, 3323 bp, Homo sapiens
ccgcctcccagcgactctcggcggtgccggagtcgggtgggttggcggctataaagctggtrgcgaaggggaggcgccgcggactgtcctttcgtggctcactccctttcctctgctgccgctcggtcacgcttgctctttcaccatgcctggatcacttcctttgaatgcagaagcttgctggccaaaagatgtgggaattgttgcccttgagatctattttccttctcaatatgttgatcaagcagagttggaaaaataygatggtgtagatgctggaaagtataccattggcttgggccaggccaagatgggcttctgcacagatagagaagatattaactctctttgcatgactgtggttcagaatcttatggagagaaataacctttcctatgattgcattgggcggctggaagttggaacagagacaatcatcgacaaatcaaagtctgtgaagactaatttgatgcagctgtttgaagagtctgggaatacagatatagaaggaatcgacacaactaatgcatgctatggaggcacagctgctgtcttcaatgctgttaactggattgagtccagctcttgggatgggcttcgtgggacacatatgcaacatgcctatgatttttacaagcctgatatgctatctgaatatcctatagtagatggaaaactctccatacagtgctacctcagtgcattagaccgctgctaytctgtctactgcaaaaagatccatgcccagtggcagaaagagggaaatgataaagattttaccttgaatgattttggcttcatgatctttcactcaccatattgtaaactggttcagaaatctctagctcggatgttgctgaatgacttccttaatgaccagaatagagataaaaatagtatctatagtggcctggaagcctttggggatgttaaattagaagacacctactttgatagagatgtggagaaggcatttatgaaggctagctctgaactcttcagtcagaaaacaaaggcatctttacttgtatcaaatcaaaatggaaatatgtacacatcttcagtatatggttcccttgcatctgttctagcacagtactcacctcagcaattagcagggaagagaattggagtgttttcttatggttctggtttggctgccactctrtactctcttaaagtcacacaagatgctacaccggggtctgctcttgataaaataacagcaagtttatgtgatcttaaatcaaggcttgattcaagaactggtgtggcaccagatgtcttcgctgaaaacatgaagctcagagaggacacccatcatttggtcaactatattccccagggttcaatagattcactctttgaaggaacgtggtacttagttagggtggatgaaaagcacagaagaacttacgctcggcgtcccactccaaatgatgacactttggatgaaggagtaggacttgtgcattcaaacatagcaactgagcatattccaagccctgccaagaaagtaccaagactccctgccacagcagcagaacctgaagcagctgtcattagtaatggggaacattaagatactctgtgaggtgcaagacttcagggtggggtgggcatggggtgggggtatgggaacagttggaggaatgggatatctggggataattttaaaggattacatgttatgtaaatttttatgtgactgacatggagcctggatgactatcgtgtacttgggaaagtctctttgctctatttgctgacatgcttcctgttgtggtctggccaatgccaaatgtactcgaatgatgttaagggctctgtaaaacttcatacctctttggccatttgtatgcatgatgtttggtttttaaacatggtataatgaattgtgtacttctgtcagaagaaagcagakgtactaatctccaattaaaaaattttttaacatgtaagaattttgtactttgaacaacaagattacagaaagtacctgtggtttttggaaaacatttctagcttggggaatgtgacaacattccccagtgtggtaaaattggggtaaaatgtggtaaaatgtgatacgcacaaaccctttgaaaatagcawaacaaacatgccctttttctaaaattgataaatcctaaagaggaagaaaagagctgggacaataaaacactggctctggaatctggaatgttaagtccaggccagcagtgacaaaagttattgtaatgacctctgaacagagaaacactgccattgaagaggcttctggtatagaaaacatggtacattcaggagctgtgaatatagctctaggtgtgcycctgaatcagttcatggtagattatgctgaacaacagtgagatgttattggaggtgtggatgagggagtttgttgttgcagtccttctttgcaccttattttaaagaataaatgaaacatttttctggttacttttttaaaaatttaaaatggaagggaagaataggggcagggcattattaggctatttctgatgcttcagtgttataaattcaacatagaggctgacaacctaaattcatggtgtaacacagctcttttccttttccttttttttttttttttggtatctgttcaatgaaaataaggtatgacccaagtttttacctagtctgactagaagtattccacttcaaggtctgaagtaggacttttaccttaaaaaacaacaacaaacaaaactatcacacaggatagataagaagattggttaaacagttttgtgtagatctttttggtgctgaactatgacatgagccttatagattgtaaaatagggatagttggaactaatgtacagaactaaattttttaaactttatttgctgttaaattctgtgaagtttcagttatctaaaataaatatacacaaatatgaaatataatgtttcagattgcaaggtaatatgtaatagtagtgtttgtaagatactcttgtctratattaactagtagtattttgatttgtacagtcataatttgttaaaatgacttcatttaacattcactgatgtagattaataatgtaagttctgatttaaagaatggtggsaaaatggtgcatgtaatacttttgcaagtgttggggagatcggtatgttttgaaaagagtaatttaacttttgggtgccaggaaatgggttttctcaaagtccattgccggcaatgggcaggcctgcaaatactggcacagagcattaatcatacaccttattaacggtgaggtgaataactttgaaataaagttttagagaaatgtttcagatac

SEQ ID NO: 6139 - DNA, 1792 bp, Homo sapiens
gattgcgcggagcccacgcgatccctgggacgccggagacaacggggctcttgggaaggcgcggagcccgggraagccggggatgtgcgcgtgagccgtgcccgcagkgtctccccgcctccgccacctttcttgggtggctctccgcctcgtcctccctccgagggccgttggtacattcctagtgactccaagcgcttaaaaggggcccgggaggatgaaccccacagatctgaacctgatttgtgtgtgcaccgcgtctccagcgatcccggatccactgcgctgccaggggcctgggggtgggtctcttgctgtctctgcgacgacatcyttacgtttcggcactctaatgctgggtttgtgcgtgtgtgtctgcttagcggtctagcgggctgttaggctccctcgcccccagctccttggctcgctcagctcctccaccgcagcccagcagtgagacgcgcgcgcagccagctccccacgagatggaacagaccgaagtgctgaagccacggaccctggctgatctgatccgcatcctgcaccagctctttgccggcgatgaggtcaatgtagaggaggtgcaggccatcatggaagcctacgagagcgaccccaccgagtgggcaatgtacgccaagttcgaccagtacaggtatacccgaaatcttgtggatcaaggaaatggaaaatttaatctgatgattctctgttggggtgaaggacatggcagcagtattcatgatcataccaactcccactgctttctgaagatgctacagggaaatctaaaggagacattatttgcctggcctgacaaaaaatccaatgagatggtcaagaagtctgaaagagtcttgagggaaaaccagtgtgcctacatcaatgattccattggcttacatcgagtagagaacatcagccatacggaacctgctgtgagccttcacttgtacagtccaccttttgatacatgccatgcctttgatcaaagaacaggacataaaaacaaagtcacaatgacattccatagtaaatttggaatcagaactccaaatgcaacttcrggctcgctggagaacaactaaggggcaccaaaccctctgaggttttactttaagkttcgctgtatgtttgccttggacaaaaaggctacctaccacgtgctatccagtaatatacttaaataagccaatacttagatctactgtaaggcagatgctaattataaggcattaagtaagcaaatagtgccctcagctactgcagaagaaaagtcccactgaggaaaagaaagtcttgtgatttttaaaggcaagttttcaagtgctctcatagttctatcctctaattccattaaatccatactaggagcgtcagtgagggttttcatagcttttggaaatactttggtctctgaactgtaattagcaagaagtaaaaacagaaacgtcaaacgtcaaatgtttgctttgttacctggaggactaaatgtakatgtctttagtatactttgtatgttcttaatattggaagataattttgtgaatctgtagattttattttttcagtcttaccttacaaatttcttttctatgaataatagaggaactyacggcactctgccayttgttaatgaaaggaagtgcagaggattwagaaaagtacatgatccccagaccacaacaaaccaaaacataaactcatgtctgtgtcccatggtcatagtcaaagattttgtactgctaaaattaycaaataatttaaataaagtggatttgaacacaat

SEQ ID NO: 6140 - DNA, 2360 bp, Homo sapiens
gcatctctttcaaggtttctgctgggtttctgaactgctgggtttctgcttgytcctctggagatgcagcgtctgttgactccagtgaagcgcattctgcaactgacaagagcggtgcaggaaacctccctcacacctgctcgcctgctcccagtagcccaccaaaggttttctacagcctctgctgtccccctggccaaaacagatacttggccaaaggacgtgggcatcctggccctggaggtctacttcccagcccaatatgtggaccaaactgacctggagaagtataacaatgtggaagcaggaaagtatacagtgggcttgggccagacccgtatgggcttctgctcagtccaagaggacatcaactccctgtgcctgacggtggtgcaacggctgatggagcgcatacagctcccatgggactctgtgggcaggctggaagtaggcactgagaccatcattgacaagtccaaagctggcatagataccaccaatgcctgctacggtggtactgcctccctcytcaatgctgccaactggatggagtccagttcctgggatggtcgttatgccatggtggtctgtggagacattgccgtctatcccagtggtaatgctcgtcccacaggtggggccrgagctgtggctatgctgattgggcccaaggcccctctggccctggagcgagggctgaggggaacccatatggagaatgtgtatgacttctacaaaccaaatttggcctcggagtacccaatagtggatgggaagctttccatccagtgctacttgcgggccttggatcgatgttacacatcataccgtaaaaaaatccagaatcagtggaagcaagctggcagygatcgacccttcacccttgacgatttacagtayatgatctttcatacacccttttgcaagatggtccagaagtctctggctcgcctgatgttcaatgacttcctgtcagccagcagtgacacacaaaccagcttatataaggggctggaggctttcggggggctaaagctggaagacacctacaccaacaaggacctggataaagcacttctaaaggcctctcaggacatgttcgacaagaaaaccaaggcttccctttacctctccactcacaatgggaacatgtacacctcawccctgtacgggtgcctggcctcgcttctgtcccaccactctgcccaagaactggctggctccaggattggtgccttctcttatggctctggtttagcagcaagtttyttttcatttygagtatcccaggatgctgctccaggctctcccctggacaagttggtgtccagcacatcagacctgccaaaasgcctagcctcccgaaagtgtgtgtctcctgaggagttcacagaaataatgaaccaaagagagcaattctaccataaggtgaatttctccccacctggtgacacaaacagccttttcccaggtacttggtacctggagcgagtggacgagcagcatcrccgaaagtatgcccggcgtcccgtctaaaggtgttctgcagatccatggaaagcttcctgggaaacgtatgctagcagagcttctccccgtgaatcatatttttaagatcccactcttagctggtaaatgaatttgaatcgacatagtagccccataagcatcagccctgtagagtgaggagccatctctagcgggcccttcattcctctccatgctgcaatcactgtcctgggcttatggtgctatggactaggggtcctttgtgaaagagcaagatggagcaatggagagaagacctcttcctgaatcactggactccagaaatgtgcatgcagatcagctgttgccttcaagatccagataaactttcctgtcatgtgttagaactttattattattaatattgttaaacttctgtgctgttcctgtgaatctccaaattttgtaccttgttctaagctaatatatagcaattaaaaagagagaaagaggaaatgattcctgcgtttcttggaacccagaatacaaacccagcctaacatgcagcaagcctgctagaccttgtgggtcagagggctgggtccttgcctcacaggctgcctctgtccccttgcaattccattctatttctgccacatgccaagtgctatgacaggtacaaggcaaataagaacggtagaacacagcttcccccagcccacttycctgttctaaagacaccacatagacagagagcagcagacaggggccagcaggagctgtagttcagatcttcttggtcattccttgccgctgttatttgaacaaataaacacagcgcaaaggttaacaagtttttgccttctatagcc

SEQ ID NO: 6141 - DNA, 2414 bp, Homo sapiens
gcatctctttcaaggtttctgctgggtttctgaactgctgggtttctgcttgytcctctggagatgcagcgtctgttgactccagtgaagcgcattctgcaactgacaagagcggtgcaggaaacctccctcacacctgctcgcctgctcccagtagcccaccaaaggttttctacagcctctgctgtccccctggccaaaacagatacttggccaaaggacgtgggcatcctggccctggaggtctacttcccagcccaatatgtggaccaaactgacctggagaagtataacaatgtggaagcaggaaagtatacagtgggcttgggccagacccgtatgggcttctgctcagtccaagaggacatcaactccctgtgcctgacggtggtgcaacggctgatggagcgcatacagctcccatgggactctgtgggcaggctggaagtaggcactgagaccatcattgacaagtccaaagctgtcaaaacagtgctcatggaactcttccaggattcaggcaatactgatattgagggcatagataccaccaatgcctgctacggtggtactgcctccctcytcaatgctgccaactggatggagtccagttcctgggatggtcgttatgccatggtggtctgtggagacattgccgtctatcccagtggtaatgctcgtcccacaggtggggccrgagctgtggctatgctgattgggcccaaggcccctctggccctggagcgagggctgaggggaacccatatggagaatgtgtatgacttctacaaaccaaatttggcctcggagtacccaatagtggatgggaagctttccatccagtgctacttgcgggccttggatcgatgttacacatcataccgtaaaaaaatccagaatcagtggaagcaagctggcagygatcgacccttcacccttgacgatttacagtayatgatctttcatacacccttttgcaagatggtccagaagtctctggctcgcctgatgttcaatgacttcctgtcagccagcagtgacacacaaaccagcttatataaggggctggaggctttcggggggctaaagctggaagacacctacaccaacaaggacctggataaagcacttctaaaggcctctcaggacatgttcgacaagaaaaccaaggcttccctttacctctccactcacaatgggaacatgtacacctcawccctgtacgggtgcctggcctcgcttctgtcccaccactctgcccaagaactggctggctccaggattggtgccttctcttatggctctggtttagcagcaagtttyttttcatttygagtatcccaggatgctgctccaggctctcccctggacaagttggtgtccagcacatcagacctgccaaaasgcctagcctcccgaaagtgtgtgtctcctgaggagttcacagaaataatgaaccaaagagagcaattctaccataaggtgaatttctccccacctggtgacacaaacagccttttcccaggtacttggtacctggagcgagtggacgagcagcatcrccgaaagtatgcccggcgtcccgtctaaaggtgttctgcagatccatggaaagcttcctgggaaacgtatgctagcagagcttctccccgtgaatcatatttttaagatcccactcttagctggtaaatgaatttgaatcgacatagtagccccataagcatcagccctgtagagtgaggagccatctctagcgggcccttcattcctctccatgctgcaatcactgtcctgggcttatggtgctatggactaggggtcctttgtgaaagagcaagatggagcaatggagagaagacctcttcctgaatcactggactccagaaatgtgcatgcagatcagctgttgccttcaagatccagataaactttcctgtcatgtgttagaactttattattattaatattgttaaacttctgtgctgttcctgtgaatctccaaattttgtaccttgttctaagctaatatatagcaattaaaaagagagaaagaggaaatgattcctgcgtttcttggaacccagaatacaaacccagcctaacatgcagcaagcctgctagaccttgtgggtcagagggctgggtccttgcctcacaggctgcctctgtccccttgcaattccattctatttctgccacatgccaagtgctatgacaggtacaaggcaaataagaacggtagaacacagcttcccccagcccacttycctgttctaaagacaccacatagacagagagcagcagacaggggccagcaggagctgtagttcagatcttcttggtcattccttgccgctgttatttgaacaaataaacacagcgcaaaggttaacaagtttttgccttctatagcc

SEQ ID NO: 6142 - DNA, 1830 bp, Homo sapiens
cgcgggtccacttgggacgggtccctgagtaggtgaggaggtgggtaggagcttgcttatagaaaagtggaatcgagtagtccttgctggtggagccgctgccgccagggaactcagggccggctcctgttccttcaagagtgctggaggccaaacttgaaatacaagtttaatgttcctcgtcgggcaaaagataargatccgatctcccccggcccggtgtgcagcaggagcgaccaaccccgacccgggttaaaactcccagggactcttcgctgctgccacctcttgttctctcccccgttcccactcggggtctccctcagggccgggaggcacagcggtccctgcttgctgarrggctggatgtacgcatccgcaggttcccgcggacttgggggcgcccgctgagccccggcgcccgcagaagacttgtgtttgcctcctgcagcctcaacccggagggcagcgagggcctaccaccatgatcactggtgtgttcagcatgcgcttgtggaccccagtgggcgtcctgacctcgctggcgtactgcctgcaccagcggcgggtggccctggccgagctgcaggaggccgatggccagtgtccggtcgaccgcagcctgctgaagttgaaaatggtgcaggtcgtgtttcgacacggggctcggagtcctctcaagccgctcccgctggaggagcaggtagagtggaacccccagctattagaggtcccaccccaaactcagtttgattacacagtcaccaatctagctggtggtccgaaaccatattctccttacgactctcaataccatgagaccaccctgaaggggggcatgtttgctgggcagctgaccaaggtgggcatgcagcaaatgtttgccttgggagagagactgaggaagaactatgtggaagacattccctttctttcaccaaccttcaacccacaggaggtctttattcgttccactaacatttttcggaatctggagtccacccgttgtttgctrgctgggcttttccagtgtcagaaagaaggacccatcatcatccacactgatgaagcagattcagaagtcttgtatcccaactaccaaagctgctggagcctgaggcagagaaccagaggccggaggcagactgcctctttrcagccaggaatctcagaggatttgaaaaaggtgaaggacaggatgggcattgacagtagtgataaagtggacttcttcatcctcctggacaacgtggctgccgagcaggcacacaacctcccaagctgccccatgctgaagagatttgcamggatgatcgaacagagagctgtggacacatccttgtacatactgcccaaggaagacagggaaagtcttcagatggcagtaggcccattcctccacatcctagagagcaacctgctgaaagccrtggactctgccactgcccccgacaagatcagaaagctgtatctctatgcggctcatgatgtgaccttcataccgctcttaatgaccctggggatttttgaccacaaatggccaccgtttgctgttgacctgaccatggaactttaccagcacctggaatctaaggagtggtttgtgcagctctattaccacgggaaggagcaggtgccgagaggttgccctgatgggctctgcccgctggacatgttcttgaatgccatgtcagtttataccttaagcccagaaaaataccaygcactctgctctcaaactcaggtgatggaagttggaaatgaagagtaactgatttataaaagcaggatgtgttgattttaaaataaagtgcctttatacaatgcctc

SEQ ID NO: 6143 - DNA, 5003 bp, Homo sapiens
tgcgagcggctggcggcttcgaggggagctgaggcgcggaggggctcggcggcagcggcggcggctcggcactgttacctctcggtccggctggcgccggggcgcgcggtttggtcctttccgggcgcgcgggggcgacagcggcagcgacccgaggcctgcggcctaggcctcagcgcggcggcgggctcgagtgcagcgcggaaccggcccgagggccctacccggaggcaccatgagcgtggaggcgtacgggcccagctcgcagactctcactttcctggacacggaggaggccgagctgcttggcgccgacacacagggctccgagttcgagttcaccgactttactcttcctagccagacgcagacgccccccggcggccccggcggcccgggcggtggcggcgcgggaggcccgggcggcgcgggcgcgggcgctgcggcgggacagctcgacgcgcaggttgggccygaaggcatcctgcagaacggggctgtggacgacagtgtagccaagaccagccagttgttggctgagttgaacttcgaggaagatgaagaagacacctattacacgaaggacctccccatacacgcctgcagttactgtggaatacacgatcctgcctgcgtggtttactgtaataccagcaagaagtggttctgcaacggacgtggaaatacttctggcagccacattgtaaatcaccttgtgagggcaaaatgcaaagaggtgaccctgcacaaggacgggcccctgggggagacagtcctggagtgctacaactgcggctgtcgcaacgtcttcctcctcggcttcatcccggccaaagctgactcagtggtggtgctgctgtgcaggcagccctgtgccagccagagcagcctcaaggacatcaactgggacagctcgcagtggcagccgctgatccaggaccgctgcttcctgtcctggctggtcaagatcccctccgagcaggagcagctgcggrcacgccagatcacggcacagcagatcaacaagctggaggagctgtggaaggaaaacccttctgccacgctggaggacctggagaagccgggggtggacgaggagccgcagcatgtcctcctgcggtacgaggacgcctaccagtaccagaacatattcgggcccctggtcaagctggaggccgactacgacaagaagctgaaggagtcccagactcaagataacatcactgtcaggtgggacctgggccttaacaagaagagaatcgcctacttcactttgcccaagactgactctggtaatgaggatttagtcataatttggttaagagacatgcggctcatgcagggggatgagatatgcctgcggtacaaaggggaccttgcgcccctgtggaaagggatcggccacgtcatcaaggtccctgataattatggcgatgagatcgccattgagctgcggagcagcgtgggtgcacctgtggaggtgactcacaacttccaggtggattttgtgtggaagtcgacctcctttgacaggatgcagagcgcattgaaaacgtttgccgtggatgagacctcggtgtctggctacatctaccacaagctgttgggccacgaggtggaggacgtaatcatcaagtgccagctgcccaagcgcttcacggcgcagggcctccccgacctcaaccactcccaggtttatgccgtgaagactgtgctgcaaagaccactgagcctgatccagggcccgccaggcacggggaagacggtgacgtcggccaccatcgtctaccacctggcccggcaaggcaacgggccggtgctggtgtgtgctccgagcaacatcgccgtggaccagctaacggagaagatccaccagacggggctaaaggtcgtgcgcctctgcgccaagagccgtgaggccatcgactccccggtgtcttttctggccctgcacaaccagatcaggaacatggacagcatgcctgagctgcagaagctgcagcagctgaaagaygagactggggagctgtcgtctgccgacgagaagcggtaccgggccttgaagcgcaccgcagagagagagctgctgatgaacgcagatgtcatctgctgcacatgtgtgggcgcyggtgacccgaggctggccaagatgcagttccgctccattttaatcgacgaaagcacccaggccaccgagccggagtgcatggttcccgtggtcctcggggccaagcagctgatccttgtaggcgaccactgccagctgggcccagtggtgatgtgcaagaaggcggccaaggccgggctgtcacagtcgctcttcgagcgcctggtggtgctgggcatccggcccatccgcctgcaggtccagtaccggatgcaccctgcactcagcgccttcccatccaacatcttctacgagggctccctccagaatggtgtcactgcagcggatcgtgtgaagaagggatttgacttccagtggccccaacccgataaaccgatgttcttctacgtgacccagggccaagaggagattgccagctcgggcacctcctacctgaacaggaccgaggctgcgaacgtggagaagatcaccacgaagttgctgaaggcaggcgccaagccggaccagattggcatcatcacgccctacgagggccagcgctcctacctggtgcagtacatgcagttcagcggctccctgcacaccaagctctaccaggaggtggagatcgccagtgtggacgcctttcagggacgcgagaaggacttcatcatcctgtcctgtgtgcgggccaacgagcaccaaggcattggctttttaaatgaccccaggcgtctgaacgtggccctgaccagagcaaggtatggcgtcatcattgtgggcaacccgaaggcactatcaaagcagccgctctggaaccacctgctgawctactataaggagcagaaggtgctggtggaggggccgctcaacaacctgcgtgagagcctcatgcagttcagcaagccacggaagctggtcaacactatcaacccgggagcccgcttcatgaccacagccatgtatgatgcccgggaggccatcatcccaggctccgtctatgatcggagcagccagggccggccttccagcatgtacttccagacccatgaccagattggcatgatcagtgccggccctagccacgtggctgccatgaacattcccatccccttcaacctggtcatgccacccatgccaccgcctggctattttggacaagccaacgggcctgctgcagggcgaggcaccccgaaaggcaagactggtcgtgggggacgccagaagaaccgctttgggcttcctggacccagccagactaacctccccaacagccaagccagccaggatgtggcgtcacagcccttctctcagggcgccctgacgcagggctacatctccatgagccagccttcccagatgagccagcccggcctctcccagccggagctgtcccaggacagttaccttggtgacgagtttaaatcacaaatcgacgtggcgctctcacaggactccacgtaccagggagagcgggcttaccagcatggcggggtgacggggctgtcccagtattaaaaggtggcggcggaagagctaagcaacgtggcttagtccatcagcatcttattctgggtaataaaaaataaaaataaacggatacctgttttccactgctaaaactgaagcaccactgtgtgagcaacaggaagggagagcgcacgagggagaggagccgaggccgagcgccccctgctggcccgcggcggcgaggagcagagggagcggaggaggggccggcccgcgggagccgcggccaccaggaggccccgctccgtcccatcggggctgcggccagggcggagggaggaagaccctcatctcagagtagccctttcctctgttcttttatttctttttctctttgattgaaaggggactacgtcttagcaggaaaaaaaacttcgcatttctgtgcccgagcaggctccttgcaaagacagcagcgtgcggggcagagccccgggagggcgcgtctgtccacgcctaccggacgcgccgaggtcgcgctgcctgtgttctccgagggccttcatttaaagaaaataagggtgttttgggtttttctctttgtttttttcaagattcttttaaaggagtactgaagaatactttcctaagtttgtctstaaaatcttagcggtggacctgggagatttgagaagcttccagaaacagtttaaacaagccagcgctactggagaagaggagcaacacctgtgccgcggccggaggagttttgttgttggttttagcttccagtggcttctttctgcggggcatcaggctgctggggtagccgcccgccgagcctggaagctgctcgttctccgctggactcagaagccaagctgcttcccgcctagactcggcgcagggccccgcaccggtgaggaaggtgcttttggccccattgcgaggggccttggccaggactggccctgtggccaggaggcgagaaggtggctgttcccggattgacggctttttcccgggggcctttggaagatttggtggaaggacaagagggcctgtccctgtccccgtccccaggaggtaccgacagtccctgtgctggttagacacggagcgctgcacaccgaaagcccaaattgggagctctgcctgccggcaactttgctgatggggtgattgctgcttctggggggtaaggaaacaagttacagaaattaccgcgttctgtgtgaagggactgagggtgtggtgtcattggcagagggccgctttgcctctgcttcgccctgtgctgtgttctccagctttgtagcagcagccttgacaaacccaggcgcactgtaccaaggcaatgtaacttttgattttcggtcaatttaagttcttttgtcaccaaatattaataaacagttttgacttc

SEQ ID NO: 6144 - DNA, 4970 bp, Homo sapiens
tgcgagcggctggcggcttcgaggggagctgaggcgcggaggggctcggcggcagcggcggcggctcggcactgttacctctcggtccggctggcgccggggcgcgcggtttggtcctttccgggcgcgcgggggcgacagcggcagcgacccgaggcctgcggcctaggcctcagcgcggcggcgggctcgagtgcagcgcggaaccggcccgagggccctacccggaggcaccatgagcgtggaggcgtacgggcccagctcgcagactctcactttcctggacacggaggaggccgagctgcttggcgccgacacacagggctccgagttcgagttcaccgactttactcttcctagccagacgcagacgccccccggcggccccggcggcccgggcggtggcggcgcgggaggcccgggcggcgcgggcgcgggcgctgcggcgggacagctcgacgcgcaggttgggccygaaggcatcctgcagaacggggctgtggacgacagtgtagccaagaccagccagttgttggctgagttgaacttcgaggaagatgaagaagacacctattacacgaaggacctccccatacacgcctgcagttactgtggaatacacgatcctgcctgcgtggtttactgtaataccagcaagaagtggttctgcaacggacgtggaaatacttctggcagccacattgtaaatcaccttgtgagggcaaaatgcaaagaggtgaccctgcacaaggacgggcccctgggggagacagtcctggagtgctacaactgcggctgtcgcaacgtcttcctcctcggcttcatcccggccaaagctgactcagtggtggtgctgctgtgcaggcagccctgtgccagccagagcagcctcaaggacatcaactgggacagctcgcagtggcagccgctgatccaggaccgctgcttcctgtcctggctggtcaagatcccctccgagcaggagcagctgcggrcacgccagatcacggcacagcagatcaacaagctggaggagctgtggaaggaaaacccttctgccacgctggaggacctggagaagccgggggtggacgaggagccgcagcatgtcctcctgcggtacgaggacgcctaccagtaccagaacatattcgggcccctggtcaagctggaggccgactacgacaagaagctgaaggagtcccagactcaagataacatcactgtcaggtgggacctgggccttaacaagaagagaatcgcctacttcactttgcccaagactgactctgacatgcggctcatgcagggggatgagatatgcctgcggtacaaaggggaccttgcgcccctgtggaaagggatcggccacgtcatcaaggtccctgataattatggcgatgagatcgccattgagctgcggagcagcgtgggtgcacctgtggaggtgactcacaacttccaggtggattttgtgtggaagtcgacctcctttgacaggatgcagagcgcattgaaaacgtttgccgtggatgagacctcggtgtctggctacatctaccacaagctgttgggccacgaggtggaggacgtaatcatcaagtgccagctgcccaagcgcttcacggcgcagggcctccccgacctcaaccactcccaggtttatgccgtgaagactgtgctgcaaagaccactgagcctgatccagggcccgccaggcacggggaagacggtgacgtcggccaccatcgtctaccacctggcccggcaaggcaacgggccggtgctggtgtgtgctccgagcaacatcgccgtggaccagctaacggagaagatccaccagacggggctaaaggtcgtgcgcctctgcgccaagagccgtgaggccatcgactccccggtgtcttttctggccctgcacaaccagatcaggaacatggacagcatgcctgagctgcagaagctgcagcagctgaaagaygagactggggagctgtcgtctgccgacgagaagcggtaccgggccttgaagcgcaccgcagagagagagctgctgatgaacgcagatgtcatctgctgcacatgtgtgggcgcyggtgacccgaggctggccaagatgcagttccgctccattttaatcgacgaaagcacccaggccaccgagccggagtgcatggttcccgtggtcctcggggccaagcagctgatccttgtaggcgaccactgccagctgggcccagtggtgatgtgcaagaaggcggccaaggccgggctgtcacagtcgctcttcgagcgcctggtggtgctgggcatccggcccatccgcctgcaggtccagtaccggatgcaccctgcactcagcgccttcccatccaacatcttctacgagggctccctccagaatggtgtcactgcagcggatcgtgtgaagaagggatttgacttccagtggccccaacccgataaaccgatgttcttctacgtgacccagggccaagaggagattgccagctcgggcacctcctacctgaacaggaccgaggctgcgaacgtggagaagatcaccacgaagttgctgaaggcaggcgccaagccggaccagattggcatcatcacgccctacgagggccagcgctcctacctggtgcagtacatgcagttcagcggctccctgcacaccaagctctaccaggaggtggagatcgccagtgtggacgcctttcagggacgcgagaaggacttcatcatcctgtcctgtgtgcgggccaacgagcaccaaggcattggctttttaaatgaccccaggcgtctgaacgtggccctgaccagagcaaggtatggcgtcatcattgtgggcaacccgaaggcactatcaaagcagccgctctggaaccacctgctgawctactataaggagcagaaggtgctggtggaggggccgctcaacaacctgcgtgagagcctcatgcagttcagcaagccacggaagctggtcaacactatcaacccgggagcccgcttcatgaccacagccatgtatgatgcccgggaggccatcatcccaggctccgtctatgatcggagcagccagggccggccttccagcatgtacttccagacccatgaccagattggcatgatcagtgccggccctagccacgtggctgccatgaacattcccatccccttcaacctggtcatgccacccatgccaccgcctggctattttggacaagccaacgggcctgctgcagggcgaggcaccccgaaaggcaagactggtcgtgggggacgccagaagaaccgctttgggcttcctggacccagccagactaacctccccaacagccaagccagccaggatgtggcgtcacagcccttctctcagggcgccctgacgcagggctacatctccatgagccagccttcccagatgagccagcccggcctctcccagccggagctgtcccaggacagttaccttggtgacgagtttaaatcacaaatcgacgtggcgctctcacaggactccacgtaccagggagagcgggcttaccagcatggcggggtgacggggctgtcccagtattaaaaggtggcggcggaagagctaagcaacgtggcttagtccatcagcatcttattctgggtaataaaaaataaaaataaacggatacctgttttccactgctaaaactgaagcaccactgtgtgagcaacaggaagggagagcgcacgagggagaggagccgaggccgagcgccccctgctggcccgcggcggcgaggagcagagggagcggaggaggggccggcccgcgggagccgcggccaccaggaggccccgctccgtcccatcggggctgcggccagggcggagggaggaagaccctcatctcagagtagccctttcctctgttcttttatttctttttctctttgattgaaaggggactacgtcttagcaggaaaaaaaacttcgcatttctgtgcccgagcaggctccttgcaaagacagcagcgtgcggggcagagccccgggagggcgcgtctgtccacgcctaccggacgcgccgaggtcgcgctgcctgtgttctccgagggccttcatttaaagaaaataagggtgttttgggtttttctctttgtttttttcaagattcttttaaaggagtactgaagaatactttcctaagtttgtctstaaaatcttagcggtggacctgggagatttgagaagcttccagaaacagtttaaacaagccagcgctactggagaagaggagcaacacctgtgccgcggccggaggagttttgttgttggttttagcttccagtggcttctttctgcggggcatcaggctgctggggtagccgcccgccgagcctggaagctgctcgttctccgctggactcagaagccaagctgcttcccgcctagactcggcgcagggccccgcaccggtgaggaaggtgcttttggccccattgcgaggggccttggccaggactggccctgtggccaggaggcgagaaggtggctgttcccggattgacggctttttcccgggggcctttggaagatttggtggaaggacaagagggcctgtccctgtccccgtccccaggaggtaccgacagtccctgtgctggttagacacggagcgctgcacaccgaaagcccaaattgggagctctgcctgccggcaactttgctgatggggtgattgctgcttctggggggtaaggaaacaagttacagaaattaccgcgttctgtgtgaagggactgagggtgtggtgtcattggcagagggccgctttgcctctgcttcgccctgtgctgtgttctccagctttgtagcagcagccttgacaaacccaggcgcactgtaccaaggcaatgtaacttttgattttcggtcaatttaagttcttttgtcaccaaatattaataaacagttttgacttc

SEQ ID NO: 6145 - DNA, 5311 bp, Homo sapiens
tgcgagcggctggcggcttcgaggggagctgaggcgcggaggggctcggcggcagcggcggcggctcggcactgttacctctcggtccggctggcgccggggcgcgcggtttggtcctttccgggcgcgcgggggcgacagcggcagcgacccgaggcctgcggcctaggcctcagcgcggcggcgggctcgagtgcagcgcggaaccggcccgagggccctacccggaggcaccatgagcgtggaggcgtacgggcccagctcgcagactctcactttcctggacacggaggaggccgagctgcttggcgccgacacacagggctccgagttcgagttcaccgactttactcttcctagccagacgcagacgccccccggcggccccggcggcccgggcggtggcggcgcgggaggcccgggcggcgcgggcgcgggcgctgcggcgggacagctcgacgcgcaggttgggccygaaggcatcctgcagaacggggctgtggacgacagtgtagccaagaccagccagttgttggctgagttgaacttcgaggaagatgaagaagacacctattacacgaaggacctccccatacacgcctgcagttactgtggaatacacgatcctgcctgcgtggtttactgtaataccagcaagaagtggttctgcaacggacgtggaaatacttctggcagccacattgtaaatcaccttgtgagggcaaaatgcaaagaggtgaccctgcacaaggacgggcccctgggggagacagtcctggagtgctacaactgcggctgtcgcaacgtcttcctcctcggcttcatcccggccaaagctgactcagtggtggtgctgctgtgcaggcagccctgtgccagccagagcagcctcaaggacatcaactgggacagctcgcagtggcagccgctgatccaggaccgctgcttcctgtcctggctggtcaagatcccctccgagcaggagcagctgcggrcacgccagatcacggcacagcagatcaacaagctggaggagctgtggaaggaaaacccttctgccacgctggaggacctggagaagccgggggtggacgaggagccgcagcatgtcctcctgcggtacgaggacgcctaccagtaccagaacatattcgggcccctggtcaagctggaggccgactacgacaagaagctgaaggagtcccagactcaagataacatcactgtcaggtgggacctgggccttaacaagaagagaatcgcctacttcactttgcccaagactgactctgacatgcggctcatgcagggggatgagatatgcctgcggtacaaaggggaccttgcgcccctgtggaaagggatcggccacgtcatcaaggtccctgataattatggcgatgagatcgccattgagctgcggagcagcgtgggtgcacctgtggaggtgactcacaacttccaggtggattttgtgtggaagtcgacctcctttgacaggatgcagagcgcattgaaaacgtttgccgtggatgagacctcggtgtctggctacatctaccacaagctgttgggccacgaggtggaggacgtaatcatcaagtgccagctgcccaagcgcttcacggcgcagggcctccccgacctcaaccactcccaggtttatgccgtgaagactgtgctgcaaagaccactgagcctgatccagggcccgccaggcacggggaagacggtgacgtcggccaccatcgtctaccacctggcccggcaaggcaacgggccggtgctggtgtgtgctccgagcaacatcgccgtggaccagctaacggagaagatccaccagacggggctaaaggtcgtgcgcctctgcgccaagagccgtgaggccatcgactccccggtgtcttttctggccctgcacaaccagatcaggaacatggacagcatgcctgagctgcagaagctgcagcagctgaaagaygagactggggagctgtcgtctgccgacgagaagcggtaccgggccttgaagcgcaccgcagagagagagctgctgatgaacgcagatgtcatctgctgcacatgtgtgggcgcyggtgacccgaggctggccaagatgcagttccgctccattttaatcgacgaaagcacccaggccaccgagccggagtgcatggttcccgtggtcctcggggccaagcagctgatccttgtaggcgaccactgccagctgggcccagtggtgatgtgcaagaaggcggccaaggccgggctgtcacagtcgctcttcgagcgcctggtggtgctgggcatccggcccatccgcctgcaggtccagtaccggatgcaccctgcactcagcgccttcccatccaacatcttctacgagggctccctccagaatggtgtcactgcagcggatcgtgtgaagaagggatttgacttccagtggccccaacccgataaaccgatgttcttctacgtgacccagggccaagaggagattgccagctcgggcacctcctacctgaacaggaccgaggctgcgaacgtggagaagatcaccacgaagttgctgaaggcaggcgccaagccggaccagattggcatcatcacgccctacgagggccagcgctcctacctggtgcagtacatgcagttcagcggctccctgcacaccaagctctaccaggaggtggagatcgccagtgtggacgcctttcagggacgcgagaaggacttcatcatcctgtcctgtgtgcgggccaacgagcaccaaggcattggctttttaaatgaccccaggcgtctgaacgtggccctgaccagagcaaggtatggcgtcatcattgtgggcaacccgaaggcactatcaaagcagccgctctggaaccacctgctgawctactataaggagcagaaggtgctggtggaggggccgctcaacaacctgcgtgagagcctcatgcagttcagcaagccacggaagctggtcaacactatcaacccgggagcccgcttcatgaccacagccatgtatgatgcccgggaggccatcatcccaggctccgtctatgatcggagcagccagggccggccttccagcatgtacttccagacccatgaccagattggcatgatcagtgccggccctagccacgtggctgccatgaacattcccatccccttcaacctggtcatgccacccatgccaccgcctggctattttggacaagccaacgggcctgctgcagggcgaggcaccccgaaaggcaagactggtcgtgggggacgccagaagaaccgctttgggcttcctggacccagccagactaacctccccaacagccaagccagccaggatgtggcgtcacagcccttctctcagggcgccctgacgcagggctacatctccatgagccagccttcccagatgagccagcccggcctctcccagccggagctgtcccaggacagttaccttggtgacgagtttaaatcacaaatcgacgtggcgctctcacaggactccacgtaccagggagagcgggcttaccagcatggcggggtgacggggctgtcccagtattaaaaggtggcggcggaagagctaagcaacgtggcttagtccatcagcatcttattctgggtaataaaaaataaaaataaacggatacctgttttccactgctaaaactgaagcaccactgtgtgagcaacaggaagggagagcgcacgagggagaggagccgaggccgagcgccccctgctggcccgcggcggcgaggagcagagggagcggaggaggggccggcccgcgggagccgcggccaccaggaggccccgctccgtcccatcggggctgcggccagggcggagggaggaagaccctcatctcagagtagccctttcctctgttcttttatttctttttctctttgattgaaaggggactacgtcttagcaggaaaaaaaacttcgcatttctgtgcccgagcaggctccttgcaaagacagcagcgtgcggggcagagccccgggagggcgcgtctgtccacgcctaccggacgcgccgaggtcgcgctgcctgtgttctccgagggccttcatttaaagaaaataagggtgttttgggtttttctctttgtttttttcaagattcttttaaaggagtactgaagaatactttcctaagtttgtctstaaaatcttagcggtggacctgggagatttgagaagcttccagaaacagtttaaacaagccagcgctactggagaagaggagcaacacctgtgccgcggccggaggagttttgttgttggttttagcttccagtggcttctttctgcggggcatcaggctgctggggtagccgcccgccgagcctggaagctgctcgttctccgctggactcagaagccaagctgcttcccgcctagactcggcgcagggccccgcaccggtgaggaaggtgcttttggccccattgcgaggggccttggccaggactggccctgtggccaggaggcgagaaggtggctgttcccggattgacggctttttcccgggggcctttggaagatttggtggaaggacaagagggcctgtccctgtccccgtccccaggaggtaccgacagtccctgtgctggttagacacggagcgctgcacaccgaaagcccaaattgggagctctgcctgccggcaactttgctgatggggtgattgctgcttctggggggtaaggaaacaagttacagaaattaccgcgttctgtgtgaagggactgagggtgtggtgtcattggcagagggtcattttaggagagctgccccagcccctcgaacgcctggcttggggtgtcattctgcctggcggccaggcctccagcttcccctgccccgggcctggggctgtcactggccctgatccgaacacctccagattccggcttctacatgggacagacggggacgcacaggccaccttccttctggcagggactcttatttattcccattgctctagggctttcggtttccccttcttccggtaggccgcgtagaggcatgcaccgggtaggtttyygcggtgaccccgcggcggcctgagggacgctccctgccccatcccggctgttgggctgggccgctttgcctctgcttcgccctgtgctgtgttctccagctttgtagcagcagccttgacaaacccaggcgcactgtaccaaggcaatgtaacttttgattttcggtcaatttaagttcttttgtcaccaaatattaataaacagttttgacttcacaccaa

SEQ ID NO: 6146 - DNA, 4969 bp, Homo sapiens
tgcgagcggctggcggcttcgaggggagctgaggcgcggaggggctcggcggcagcggcggcggctcggcactgttacctctcggtccggctggcgccggggcgcgcggtttggtcctttccgggcgcgcgggggcgacagcggcagcgacccgaggcctgcggcctaggcctcagcgcggcggcgggctcgagtgcagcgcggaaccggcccgagggccctacccggaggcaccatgagcgtggaggcgtacgggcccagctcgcagactctcactttcctggacacggaggaggccgagctgcttggcgccgacacacagggctccgagttcgagttcaccgactttactcttcctagccagacgcagacgccccccggcggccccggcggcccgggcggtggcggcgcgggaggcccgggcggcgcgggcgcgggcgctgcggcgggacagctcgacgcgcaggttgggccygaaggcatcctgcagaacggggctgtggacgacagtgtagccaagaccagccagttgttggctgagttgaacttcgaggaagatgaagaagacacctattacacgaaggacctccccatacacgcctgcagttactgtggaatacacgatcctgcctgcgtggtttactgtaataccagcaagaagtggttctgcaacggacgtggaaatacttctggcagccacattgtaaatcaccttgtgagggcaaaatgcaaagaggtgaccctgcacaaggacgggcccctgggggagacagtcctggagtgctacaactgcggctgtcgcaacgtcttcctcctcggcttcatcccggccaaagctgactcagtggtggtgctgctgtgcaggcagccctgtgccagccagagcagcctcaaggacatcaactgggacagctcgcagtggcagccgctgatccaggaccgctgcttcctgtcctggctggtcaagatcccctccgagcaggagcagctgcggrcacgccagatcacggcacagcagatcaacaagctggaggagctgtggaaggaaaacccttctgccacgctggaggacctggagaagccgggggtggacgaggagccgcagcatgtcctcctgcggtacgaggacgcctaccagtaccagaacatattcgggcccctggtcaagctggaggccgactacgacaagaagctgaaggagtcccagactcaagataacatcactgtcaggtgggacctgggccttaacaagaagagaatcgcctacttcactttgcccaagactgactctgacatgcggctcatgcagggggatgagatatgcctgcggtacaaaggggaccttgcgcccctgtggaaagggatcggccacgtcatcaaggtccctgataattatggcgatgagatcgccattgagctgcggagcagcgtgggtgcacctgtggaggtgactcacaacttccaggtggattttgtgtggaagtcgacctcctttgacaggatgcagagcgcattgaaaacgtttgccgtggatgagacctcggtgtctggctacatctaccacaagctgttgggccacgaggtggaggacgtaatcatcaagtgccagctgcccaagcgcttcacggcgcagggcctccccgacctcaaccactcccaggtttatgccgtgaagactgtgctgcaaagaccactgagcctgatccagggcccgccaggcacggggaagacggtgacgtcggccaccatcgtctaccacctggcccggcaaggcaacgggccggtgctggtgtgtgctccgagcaacatcgccgtggaccagctaacggagaagatccaccagacggggctaaaggtcgtgcgcctctgcgccaagagccgtgaggccatcgactccccggtgtcttttctggccctgcacaaccagatcaggaacatggacagcatgcctgagctgcagaagctgcagcagctgaaagaygagactggggagctgtcgtctgccgacgagaagcggtaccgggccttgaagcgcaccgcagagagagagctgctgatgaacgcagatgtcatctgctgcacatgtgtgggcgcyggtgacccgaggctggccaagatgcagttccgctccattttaatcgacgaaagcacccaggccaccgagccggagtgcatggttcccgtggtcctcggggccaagcagctgatccttgtaggcgaccactgccagctgggcccagtggtgatgtgcaagaaggcggccaaggccgggctgtcacagtcgctcttcgagcgcctggtggtgctgggcatccggcccatccgcctgcaggtccagtaccggatgcaccctgcactcagcgccttcccatccaacatcttctacgagggctccctccagaatggtgtcactgcagcggatcgtgtgaagaagggatttgacttccagtggccccaacccgataaaccgatgttcttctacgtgacccagggccaagaggagattgccagctcgggcacctcctacctgaacaggaccgaggctgcgaacgtggagaagatcaccacgaagttgctgaaggcaggcgccaagccggaccagattggcatcatcacgccctacgagggccagcgctcctacctggtgcagtacatgcagttcagcggctccctgcacaccaagctctaccaggaggtggagatcgccagtgtggacgcctttcagggacgcgagaaggacttcatcatcctgtcctgtgtgcgggccaacgagcaccaaggcattggctttttaaatgaccccaggcgtctgaacgtggccctgaccagagcaaggtatggcgtcatcattgtgggcaacccgaaggcactatcaaagcagccgctctggaaccacctgctgawctactataaggagcagaaggtgctggtggaggggccgctcaacaacctgcgtgagagcctcatgcagttcagcaagccacggaagctggtcaacactatcaacccgggagcccgcttcatgaccacagccatgtatgatgcccgggaggccatcatcccaggctccgtctatgatcggagcagccagggccggccttccagcatgtacttccagacccatgaccagattggcatgatcagtgccggccctagccacgtggctgccatgaacattcccatccccttcaacctggtcatgccacccatgccaccgcctggctattttggacaagccaacgggcctgctgcagggcgaggcaccccgaaaggcaagactggtcgtgggggacgccagaagaaccgctttgggcttcctggacccagccagactaacctccccaacagccaagccagccaggatgtggcgtcacagcccttctctcagggcgccctgacgcagggctacatctccatgagccagccttcccagatgagccagcccggcctctcccagccggagctgtcccaggacagttaccttggtgacgagtttaaatcacaaatcgacgtggcgctctcacaggactccacgtaccagggagagcgggcttaccagcatggcggggtgacggggctgtcccagtattaaaagtggcggcggaagagctaagcaacgtggcttagtccatcagcatcttattctgggtaataaaaaataaaaataaacggatacctgttttccactgctaaaactgaagcaccactgtgtgagcaacaggaagggagagcgcacgagggagaggagccgaggccgagcgccccctgctggcccgcggcggcgaggagcagagggagcggaggaggggccggcccgcgggagccgcggccaccaggaggccccgctccgtcccatcggggctgcggccagggcggagggaggaagaccctcatctcagagtagccctttcctctgttcttttatttctttttctctttgattgaaaggggactacgtcttagcaggaaaaaaaacttcgcatttctgtgcccgagcaggctccttgcaaagacagcagcgtgcggggcagagccccgggagggcgcgtctgtccacgcctaccggacgcgccgaggtcgcgctgcctgtgttctccgagggccttcatttaaagaaaataagggtgttttgggtttttctctttgtttttttcaagattcttttaaaggagtactgaagaatactttcctaagtttgtctstaaaatcttagcggtggacctgggagatttgagaagcttccagaaacagtttaaacaagccagcgctactggagaagaggagcaacacctgtgccgcggccggaggagttttgttgttggttttagcttccagtggcttctttctgcggggcatcaggctgctggggtagccgcccgccgagcctggaagctgctcgttctccgctggactcagaagccaagctgcttcccgcctagactcggcgcagggccccgcaccggtgaggaaggtgcttttggccccattgcgaggggccttggccaggactggccctgtggccaggaggcgagaaggtggctgttcccggattgacggctttttcccgggggcctttggaagatttggtggaaggacaagagggcctgtccctgtccccgtccccaggaggtaccgacagtccctgtgctggttagacacggagcgctgcacaccgaaagcccaaattgggagctctgcctgccggcaactttgctgatggggtgattgctgcttctggggggtaaggaaacaagttacagaaattaccgcgttctgtgtgaagggactgagggtgtggtgtcattggcagagggccgctttgcctctgcttcgccctgtgctgtgttctccagctttgtagcagcagccttgacaaacccaggcgcactgtaccaaggcaatgtaacttttgattttcggtcaatttaagttcttttgtcaccaaatattaataaacagttttgacttc

SEQ ID NO: 6147 - DNA, 2928 bp, Homo sapiens
ggcgccggggattgggagggcttcttgcaggctgctgggctggggctaagggctgctcagtttccttcagcggggcactgggaagcgccatggcactgcagggcatctcggtcrtggagctgtccggcctggccccgggcccgttctgtgctatggtcctggctgacttcggggcgcgtgtggtacgcgtggaccggcccggctcccgctacgacgtgagccgcttgggccggggcaagcgcycgctagtgctggacctgaagcagccgcggggagccgccgtgctgcggcgtctgtgcaagcggtcggatgtgctgctggagcccttccgccgcggtgtcatggagaaactccagctgggcccagagattctgcagcgggaaaatccaaggcttatttatgccaggcygagtggatttggccagtcaggaagcttctgccrgttagctggccacgatatcaactatttggctttgtcaggtgttctctcaaaaattggcagaagtggtgagaatccgtatgccccgctgaatctcctggctgactttgctggtggtggccttatgtgtgcactgggcattataatggctctttttgaccgcacacgcactggcaagggtcaggtcattgatgcaaatatggtggaaggaacagcatatttaagttcttttctgtggaaaactcagaaatygagtctgtgggaagcacctcgaggacagaacatgttggatggtggagcacctttctatacgacttacaggacagcagatggggaattcatggctgttggagcaatagaaycccakttctacgagctgctgatcaaaggacttggactaaagtctgatgaacttcccaatcagatgagcayggatgattggccagaaatgaagaagaagtttgcagatgtatttgcaragaagacgaaggcagagtggtgtcaaatctttgacggcacagatgcctgtgtgactccggttctgacttttgaggaggttgttcatcatgatcacaacaaggaacggggctcgtttatcaccagtgaggagcaggacgtgagcccccgccytgcacctctgctgttaaacaccccagccatcccttctttcaaaagggatcctttcataggagaacacactgaggagatacttgaagaatttggattcagccgcgaagagatttatcagcttaactcagataaaatcattgaaagtaataaggtaaaagctagtctctaacttccaggcccacggctcaagtgaatttgaatactgcatttacagtgtagagtaacacataacattgtatgcatggaaacatggaggaacagtattacagtgtcctaccactctaatcaagaaaagaattacagactctgattctacagtgatgattgaattctaaaaatggttatcattagggcttttgatttataaaactttgggtacttatactaaattatggtagttattctgccttccagtttgcttgatatatttgttgatattaagattcttgacttatattttgaatgggttctagtgaaaaaggaatgatatattcttgaagacatcgatatacatttatttacactcttgattctacaatgtagaaaatgaggaaatgccacaaattgtatggtgataaaagtcacgtgaaacagagtgattggttgcatccaggccttttgtcttggtgttcatgatctccctctaagcacattccaaactttagcaacagttatcacactttgtaatttgcaaagaaaagtttcacctgtattgaatcagaatgccttcaactgaaaaaaacatatccaaaataatgaggaaatgtgttggctcactacgtagagtccagagggacagtcagttttagggttgcctgtatccagtaactcrgggcctgtttccccgtgggtctctgggctgtcagctttcctttctccatgtgtttgatttctcctcaggctggtagcaagttctggatcttatacccaacacacagcaacatccagaaataaagatctcaggaccccccagcaagtcgttttgtgtctccttggactgagttaagttacaagcctttcttatacctgtctttgacaaagaagacgggattgtctttacataaaaccagcctgctcctggagcttccctggactcaacttcctaaaggcatgtgaggaaggggtagattccacaatctaatccgggtgccatcagagtagagggagtagagaatggatgttgggtaggccatcaataaggtccattctgcgcagtatctcaactgccgttcaacaatcgcaagaggaaggtggagcaggtttcttcatcttacagttgagaaaacagagactcagaagggcttcttagttcrtgtttcccttagcgcctcagtgattttttcatggtggcttaggccaaaagaaatatctaaccattcaatttataaataattaggtccccaacgaattaaatattatgtcctaccaacttattagctgcttgaaaaatataatacacataaataaaaaaatatatttttcatttctatttcattgttaatcacaactacttactaaggagatgtatgcacctattggacactgtgcaacttctcacctggaatgagattggacactgctgccctcattttctgctccatgttggtgtccatatagtacttgattttttatcagatggcctggaaaacccagtctcacaaaaatatgaaattatcagaaggattatagtgcaatcttatgttgaaagaatgaactacctcactagtagttcacgtgatgtctgacagatgttgagtttcattgtgtttgtgtgttcaaatttttaaatattctgagatactcttgtgaggtcactctaatgccctgggtgccttggcacagttttagaaataccagtt

SEQ ID NO: 6148 - DNA, 2897 bp, Homo sapiens
ggcgccggggattgggagggcttcttgcaggctgctgggctggggctaagggctgctcagtttccttcagcggggcactgggaagcgccatggcactgcagggcatctcggtcrtggagctgtccggcctggccccgggcccgttctgtgctatggtcctggctgacttcggggcgcgtgtggtacgcgtggaccggcccggctcccgctacgacgtgagccgcttgggccggggcaagcgcycgctagtgctggacctgaagcagccgcggggagccgccgtgctgcggcgtctgtgcaagcggtcggatgtgctgctggagcccttccgccgcgaaactccagctgggcccagagattctgcagcgggaaaatccaaggcttatttatgccaggcygagtggatttggccagtcaggaagcttctgccrgttagctggccacgatatcaactatttggctttgtcaggtgttctctcaaaaattggcagaagtggtgagaatccgtatgccccgctgaatctcctggctgactttgctggtggtggccttatgtgtgcactgggcattataatggctctttttgaccgcacacgcactggcaagggtcaggtcattgatgcaaatatggtggaaggaacagcatatttaagttcttttctgtggaaaactcagaaatygagtctgtgggaagcacctcgaggacagaacatgttggatggtggagcacctttctatacgacttacaggacagcagatggggaattcatggctgttggagcaatagaaycccakttgacttggactaaagtctgatgaacttcccaatcagatgagcayggatgattggccagaaatgaagaagaagtttgcagatgtatttgcaragaagacgaaggcagagtggtgtcaaatctttgacggcacagatgcctgtgtgactccggttctgacttttgaggaggttgttcatcatgatcacaacaaggaacggggctcgtttatcaccagtgaggagcaggacgtgagcccccgccytgcacctctgctgttaaacaccccagccatcccttctttcaaaagggatcctttcataggagaacacactgaggagatacttgaagaatttggattcagccgcgaagagatttatcagcttaactcagataaaatcattgaaagtaataaggtaaaagctagtctctaacttccaggcccacggctcaagtgaatttgaatactgcatttacagtgtagagtaacacataacattgtatgcatggaaacatggaggaacagtattacagtgtcctaccactctaatcaagaaaagaattacagactctgattctacagtgatgattgaattctaaaaatggttatcattagggcttttgatttataaaactttgggtacttatactaaattatggtagttattctgccttccagtttgcttgatatatttgttgatattaagattcttgacttatattttgaatgggttctagtgaaaaaggaatgatatattcttgaagacatcgatatacatttatttacactcttgattctacaatgtagaaaatgaggaaatgccacaaattgtatggtgataaaagtcacgtgaaacagagtgattggttgcatccaggccttttgtcttggtgttcatgatctccctctaagcacattccaaactttagcaacagttatcacactttgtaatttgcaaagaaaagtttcacctgtattgaatcagaatgccttcaactgaaaaaaacatatccaaaataatgaggaaatgtgttggctcactacgtagagtccagagggacagtcagttttagggttgcctgtatccagtaactcrgggcctgtttccccgtgggtctctgggctgtcagctttcctttctccatgtgtttgatttctcctcaggctggtagcaagttctggatcttatacccaacacacagcaacatccagaaataaagatctcaggaccccccagcaagtcgttttgtgtctccttggactgagttaagttacaagcctttcttatacctgtctttgacaaagaagacgggattgtctttacataaaaccagcctgctcctggagcttccctggactcaacttcctaaaggcatgtgaggaaggggtagattccacaatctaatccgggtgccatcagagtagagggagtagagaatggatgttgggtaggccatcaataaggtccattctgcgcagtatctcaactgccgttcaacaatcgcaagaggaaggtggagcaggtttcttcatcttacagttgagaaaacagagactcagaagggcttcttagttcrtgtttcccttagcgcctcagtgattttttcatggtggcttaggccaaaagaaatatctaaccattcaatttataaataattaggtccccaacgaattaaatattatgtcctaccaacttattagctgcttgaaaaatataatacacataaataaaaaaatatatttttcatttctatttcattgttaatcacaactacttactaaggagatgtatgcacctattggacactgtgcaacttctcacctggaatgagattggacactgctgccctcattttctgctccatgttggtgtccatatagtacttgattttttatcagatggcctggaaaacccagtctcacaaaaatatgaaattatcagaaggattatagtgcaatcttatgttgaaagaatgaactacctcactagtagttcacgtgatgtctgacagatgttgagtttcattgtgtttgtgtgttcaaatttttaaatattctgagatactcttgtgaggtcactctaatgccctgggtgccttggcacagttttagaaataccagtt

SEQ ID NO: 6149 - DNA, 2772 bp, Homo sapiens
ggcgccggggattgggagggcttcttgcaggctgctgggctggggctaagggctgctcagtttccttcagcggggcactgggaagcgccatggcactgcagggcatctcggtcrtggagctgtccggcctggccccgggcccgttctgtgctatggtcctggctgacttcggggcgcgtgtggtacgcgtggaccggcccggctcccgctacgacgtgagccgcttgggccggggcaagcgcycgctagtgctggacctgaagcagccgcggggagccgccgtgctgcggcgtctgtgcaagcggtcggatgtgctgctggagcccttccgccgcggtgtcatggagaaactccagctgggcccagagattctgcagcgggaaaatccaaggcttatttatgccaggcygagtggatttggccagtcaggaagcttctgccrgttagctggccacgatatcaactatttggctttgtcaggtggaaggaacagcatatttaagttcttttctgtggaaaactcagaaatygagtctgtgggaagcacctcgaggacagaacatgttggatggtggagcacctttctatacgacttacaggacagcagatggggaattcatggctgttggagcaatagaaycccakttctacgagctgctgatcaaaggacttggactaaagtctgatgaacttcccaatcagatgagcayggatgattggccagaaatgaagaagaagtttgcagatgtatttgcaragaagacgaaggcagagtggtgtcaaatctttgacggcacagatgcctgtgtgactccggttctgacttttgaggaggttgttcatcatgatcacaacaaggaacggggctcgtttatcaccagtgaggagcaggacgtgagcccccgccytgcacctctgctgttaaacaccccagccatcccttctttcaaaagggatcctttcataggagaacacactgaggagatacttgaagaatttggattcagccgcgaagagatttatcagcttaactcagataaaatcattgaaagtaataagcatttacagtgtagagtaacacataacattgtatgcatggaaacatggaggaacagtattacagtgtcctaccactctaatcaagaaaagaattacagactctgattctacagtgatgattgaattctaaaaatggttatcattagggcttttgatttataaaactttgggtacttatactaaattatggtagttattctgccttccagtttgcttgatatatttgttgatattaagattcttgacttatattttgaatgggttctagtgaaaaaggaatgatatattcttgaagacatcgatatacatttatttacactcttgattctacaatgtagaaaatgaggaaatgccacaaattgtatggtgataaaagtcacgtgaaacagagtgattggttgcatccaggccttttgtcttggtgttcatgatctccctctaagcacattccaaactttagcaacagttatcacactttgtaatttgcaaagaaaagtttcacctgtattgaatcagaatgccttcaactgaaaaaaacatatccaaaataatgaggaaatgtgttggctcactacgtagagtccagagggacagtcagttttagggttgcctgtatccagtaactcrgggcctgtttccccgtgggtctctgggctgtcagctttcctttctccatgtgtttgatttctcctcaggctggtagcaagttctggatcttatacccaacacacagcaacatccagaaataaagatctcaggaccccccagcaagtcgttttgtgtctccttggactgagttaagttacaagcctttcttatacctgtctttgacaaagaagacgggattgtctttacataaaaccagcctgctcctggagcttccctggactcaacttcctaaaggcatgtgaggaaggggtagattccacaatctaatccgggtgccatcagagtagagggagtagagaatggatgttgggtaggccatcaataaggtccattctgcgcagtatctcaactgccgttcaacaatcgcaagaggaaggtggagcaggtttcttcatcttacagttgagaaaacagagactcagaagggcttcttagttcrtgtttcccttagcgcctcagtgattttttcatggtggcttaggccaaaagaaatatctaaccattcaatttataaataattaggtccccaacgaattaaatattatgtcctaccaacttattagctgcttgaaaaatataatacacataaataaaaaaatatatttttcatttctatttcattgttaatcacaactacttactaaggagatgtatgcacctattggacactgtgcaacttctcacctggaatgagattggacactgctgccctcattttctgctccatgttggtgtccatatagtacttgattttttatcagatggcctggaaaacccagtctcacaaaaatatgaaattatcagaaggattatagtgcaatcttatgttgaaagaatgaactacctcactagtagttcacgtgatgtctgacagatgttgagtttcattgtgtttgtgtgttcaaatttttaaatattctgagatactcttgtgaggtcactctaatgccctgggtgccttggcacagttttagaaataccagttctttcatattctagccttcagtcttgttcttcaaccatttttaggaactttcccataag

SEQ ID NO: 6150 - DNA, 2767 bp, Homo sapiens
ggcgccggggattgggagggcttcttgcaggctgctgggctggggctaagggctgctcagtttccttcagcggggcactgggaagcgccatggcactgcagggcatctcggtcrtggagctgtccggcctggccccgggcccgttctgtgctatggtcctggctgacttcggggcgcgtgtggtacgcgtggaccggcccggctcccgctacgacgtgagccgcttgggccggggcaagcgcycgctagtgctggacctgaagcagccgcggggagccgccgtgctgcggcgtctgtgcaagcggtcggatgtgctgctggagcccttccgccgcggtgtcatggagaaactccagctgggcccagagattctgcagcgggaaaatccaaggcttatttatgccaggcygagtggatttggccagtcaggaagcttctgccrgttagctggccacgatatcaactatttggctttgtcaggtggaaggaacagcatatttaagttcttttctgtggaaaactcagaaatygagtctgtgggaagcacctcgaggacagaacatgttggatggtggagcacctttctatacgacttacaggacagcagatggggaattcatggctgttggagcaatagaaycccakttctacgagctgctgatcaaaggacttggactaaagtctgatgaacttcccaatcagatgagcayggatgattggccagaaatgaagaagaagtttgcagatgtatttgcaragaagacgaaggcagagtggtgtcaaatctttgacggcacagatgcctgtgtgactccggttctgacttttgaggaggttgttcatcatgatcacaacaaggaacggggctcgtttatcaccagtgaggagcaggacgtgagcccccgccytgcacctctgctgttaaacaccccagccatcccttctttcaaaagggatcctttcataggagaacacactgaggagatacttgaagaatttggattcagccgcgaagagatttatcagcttaactcagataaaatcattgaaagtaataaggtaaaagctagtctctaacttccaggcccacggctcaagtgaatttgaatactgcatttacagtgtagagtaacacataacattgtatgcatggaaacatggaggaacagtattacagtgtcctaccactctaatcaagaaaagaattacagactctgattctacagtgatgattgaattctaaaaatggttatcattagggcttttgatttataaaactttgggtacttatactaaattatggtagttattctgccttccagtttgcttgatatatttgttgatattaagattcttgacttatattttgaatgggttctagtgaaaaaggaatgatatattcttgaagacatcgatatacatttatttacactcttgattctacaatgtagaaaatgaggaaatgccacaaattgtatggtgataaaagtcacgtgaaacagagtgattggttgcatccaggccttttgtcttggtgttcatgatctccctctaagcacattccaaactttagcaacagttatcacactttgtaatttgcaaagaaaagtttcacctgtattgaatcagaatgccttcaactgaaaaaaacatatccaaaataatgaggaaatgtgttggctcactacgtagagtccagagggacagtcagttttagggttgcctgtatccagtaactcrgggcctgtttccccgtgggtctctgggctgtcagctttcctttctccatgtgtttgatttctcctcaggctggtagcaagttctggatcttatacccaacacacagcaacatccagaaataaagatctcaggaccccccagcaagtcgttttgtgtctccttggactgagttaagttacaagcctttcttatacctgtctttgacaaagaagacgggattgtctttacataaaaccagcctgctcctggagcttccctggactcaacttcctaaaggcatgtgaggaaggggtagattccacaatctaatccgggtgccatcagagtagagggagtagagaatggatgttgggtaggccatcaataaggtccattctgcgcagtatctcaactgccgttcaacaatcgcaagaggaaggtggagcaggtttcttcatcttacagttgagaaaacagagactcagaagggcttcttagttcrtgtttcccttagcgcctcagtgattttttcatggtggcttaggccaaaagaaatatctaaccattcaatttataaataattaggtccccaacgaattaaatattatgtcctaccaacttattagctgcttgaaaaatataatacacataaataaaaaaatatatttttcatttctatttcattgttaatcacaactacttactaaggagatgtatgcacctattggacactgtgcaacttctcacctggaatgagattggacactgctgccctcattttctgctccatgttggtgtccatatagtacttgattttttatcagatggcctggaaaacccagtctcacaaaaatatgaaattatcagaaggattatagtgcaatcttatgttgaaagaatgaactacctcactagtagttcacgtgatgtctgacagatgttgagtttcattgtgtttgtgtgttcaaatttttaaatattctgagatactcttgtgaggtcactctaatgccctgggtgccttggcacagttttagaaataccagtt

SEQ ID NO: 6151 - DNA, 2987 bp, Homo sapiens
ggcgccggggattgggagggcttcttgcaggctgctgggctggggctaagggctgctcagtttccttcagcggggcactgggaagcgccatggcactgcagggcatctcggtcrtggagctgtccggcctggccccgggcccgttctgtgctatggtcctggctgacttcggggcgcgtgtggtacgcgtggaccggcccggctcccgctacgacgtgagccgcttgggccggggcaagcgcycgctagtgctggacctgaagcagccgcggggagccgccgtgctgcggcgtctgtgcaagcggtcggatgtgctgctggagcccttccgccgcggtgtcatggagaaactccagctgggcccagagattctgcagcgggaaaatccaaggcttatttatgccaggcygagtggatttggccagtcaggaagcttctgccrgttagctggccacgatatcaactatttggctttgtcaggtgttctctcaaaaattggcagaagtggtgagaatccgtatgccccgctgaatctcctggctgactttgctggtggtggccttatgtgtgcactgggcattataatggctctttttgaccgcacacgcactggcaagggtcaggtcattgatgcaaatatggtggaaggaacagcatatttaagttcttttctgtggaaaactcagaaatygagtctgtgggaagcacctcgaggacagaacatgttggatggtggagcacctttctatacgacttacaggacagcagatggggaattcatggctgttggagcaatagaaycccakttctacgagctgctgatcaaaggacttggactaaagtctgatgaacttcccaatcagatgagcayggatgattggccagaaatgaagaagaagtttgcagatgtatttgcaragaagacgaaggcagagtggtgtcaaatctttgacggcacagatgcctgtgtgactccggttctgacttttgaggaggttgttcatcatgatcacaacaaggaacggggctcgtttatcaccagtgaggagcaggacgtgagcccccgccytgcacctctgctgttaaacaccccagccatcccttctttcaaaagggatcctttcataggagaacacactgaggagatacttgaagaatttggattcagccgcgaagagatttatcagcttaactcagataaaatcattgaaagtaataaggtaaaagctagtctctaacttccaggcccacggctcaagtgaatttgaatactgcatttacagtgtagagtaacacataacattgtatgcatggaaacatggaggaacagtattacagtgtcctaccactctaatcaagaaaagaattacagactctgattctacagtgatgattgaattctaaaaatggttatcattagggcttttgatttataaaactttgggtacttatactaaattatggtagttattctgccttccagtttgcttgatatatttgttgatattaagattcttgacttatattttgaatgggttctagtgaaaaaggaatgatatattcttgaagacatcgatatacatttatttacactcttgattctacaatgtagaaaatgaggaaatgccacaaattgtatggtgataaaagtcacgtgaaacagagtgattggttgcatccaggccttttgtcttggtgttcatgatctccctctaagcacattccaaactttagcaacagttatcacactttgtaatttgcaaagaaaagtttcacctgtattgaatcagaatgccttcaactgaaaaaaacatatccaaaataatgaggaaatgtgttggctcactacgtagagtccagagggacagtcagttttagggttgcctgtatccagtaactcrgggcctgtttccccgtgggtctctgggctgtcagctttcctttctccatgtgtttgatttctcctcaggctggtagcaagttctggatcttatacccaacacacagcaacatccagaaataaagatctcaggaccccccagcaagtcgttttgtgtctccttggactgagttaagttacaagcctttcttatacctgtctttgacaaagaagacgggattgtctttacataaaaccagcctgctcctggagcttccctggactcaacttcctaaaggcatgtgaggaaggggtagattccacaatctaatccgggtgccatcagagtagagggagtagagaatggatgttgggtaggccatcaataaggtccattctgcgcagtatctcaactgccgttcaacaatcgcaagaggaaggtggagcaggtttcttcatcttacagttgagaaaacagagactcagaagggcttcttagttcrtgtttcccttagcgcctcagtgattttttcatggtggcttaggccaaaagaaatatctaaccattcaatttataaataattaggtccccaacgaattaaatattatgtcctaccaacttattagctgcttgaaaaatataatacacataaataaaaaaatatatttttcatttctatttcattgttaatcacaactacttactaaggagatgtatgcacctattggacactgtgcaacttctcacctggaatgagattggacactgctgccctcattttctgctccatgttggtgtccatatagtacttgattttttatcagatggcctggaaaacccagtctcacaaaaatatgaaattatcagaaggattatagtgcaatcttatgttgaaagaatgaactacctcactagtagttcacgtgatgtctgacagatgttgagtttcattgtgtttgtgtgttcaaatttttaaatattctgagatactcttgtgaggtcactctaatgccctgggtgccttggcacagttttagaaataccagttctttcatattctagccttcagtcttgttcttcaaccatttttaggaactttcccataag

SEQ ID NO: 6152 - DNA, 1477 bp, Homo sapiens
cttctttagcctgaactgtgggtagtgatgtggtgtgtttcctaacacctccggcagtgagccaggctttgagtggctgcgtctaaacacttctttccctgaggactggaagacattagaataaggtccagaaatgtccttggtgtgtytgacagactttcaggcccatgcgcgaragcagctgtctaagtcaactcgggattttattgaaggtggagcagatgacagcatcacgcgggatgacaacattgcagcatttaaaagaattcgcctccgtccgcggtacctgagagatgtgtctgaggtggacaccagaaccacaatccaaggggaggagatcagtgcccctatttgtatcgcacccacagggttccactgccttgtctggcctgatggggaaatgagcacagcaagagctgcccaagcggctggtatctgctacatcaccagcacatttgccagctgtagccttgaagacattgtcattgcagctcccgaaggcctccgatggttccaactctatgtgcatccagacctgcagctgaacaaacagttgatccagagggtagaatccctaggtttcaaagctttggtaataactttggatacacctgtatgtggcaacaggcgacatgacattcgaaaccagttgaggaggaacttaacactaacagatcttcaatcacctaaaaagggaaatgcaataccttatttccaratgactcctatcagcacttctctctgctggaatgatctctcctggtttcagagcataactcgattgcccatcatcctgaaagggattttgacaaaagaggatgcagagttagctgtgaagcacaatgtccagggtatcattgtttccaaccatggtgggaggcagcttgatgaggttcttgcttcaattgatgctttgacagaagtggtggctgctgtaaaggggaaaattgaagtctacctggatggcggggtccgaactggcaatgatgtgctgaaggctctggcccttggagctaagtgcatttttcttgggagaccaatcctatggggccttgcctgcaagggtgaacatggtgttaaggaagttttgaacattttaacaaatgagttccacacttccatggcccttacaggctgccggtcggtcgctgagatcaatcgaaacttggtccagttttccaggctgtaagaaaaaagggccaataaccagactgctgaggttgcccacaggaggatcacaaactcacagcacagtgygtgatgctgtccttcctggaccccattctgtccggaggctcatggcccatatttcccacatttctaataccaccacccctgtgcttcaggccctccaaacccctgtgttccccaaatgttccatgcccttctttgtatcactgactattatatgttgctctcttgcctaaatcttcctctgaagtaaaagatctcaaaaggacagatcattaatgactgg

SEQ ID NO: 6153 - DNA, 1676 bp, Homo sapiens
gtagtgatgtggtgtgtttcctaacacctccggcagtgagccaggctttgagtggctgcgtctaaacacttctttccctgaggactggaagacattagaataagctccagacaattcaaacattgagattcctgggaactaccagatagtagcatcagttcaccaagaaatgaagctggtgaggcagtgaaaatccagggcctagaaagctgggaatgycatgaygtgggcacattgaaaracaagaggcaggcatgatcagccttgaactttaggaagatcccaggaagctgatggaagacaagatgtggagtgaatgtgaaggtccagaaatgtccttggtgtgtytgacagactttcaggcccatgcgcgaragcagctgtctaagtcaactcgggattttattgaaggtggagcagatgacagcatcacgcgggatgacaacattgcagcatttaaaagaattcgcctccgtccgcggtacctgagagatgtgtctgaggtggacaccagaaccacaatccaaggggaggagatcagtgcccctatttgtatcgcacccacagggttccactgccttgtctggcctgatggggaaatgagcacagcaagagctgcccaagcggctggtatctgctacatcaccagcacatttgccagctgtagccttgaagacattgtcattgcagctcccgaaggcctccgatggttccaactctatgtgcatccagacctgcagctgaacaaacagttgatccagagggtagaatccctaggtttcaaagctttggtaataactttggatacacctgtatgtggcaacaggcgacatgacattcgaaaccagttgaggaggaacttaacactaacagatcttcaatcacctaaaaagggaaatgcaataccttatttccaratgactcctatcagcacttctctctgctggaatgatctctcctggtttcagagcataactcgattgcccatcatcctgaaagggattttgacaaaagaggatgcagagttagctgtgaagcacaatgtccagggtatcattgtttccaaccatggtgggaggcagcttgatgaggttcttgcttcaattgatgctttgacagaagtggtggctgctgtaaaggggaaaattgaagtctacctggatggcggggtccgaactggcaatgatgtgctgaaggctctggcccttggagctaagtgcatttttcttgggagaccaatcctatggggccttgcctgcaagggtgaacatggtgttaaggaagttttgaacattttaacaaatgagttccacacttccatggcccttacaggctgccggtcggtcgctgagatcaatcgaaacttggtccagttttccaggctgtaagaaaaaagggccaataaccagactgctgaggttgcccacaggaggatcacaaactcacagcacagtgygtgatgctgtccttcctggaccccattctgtccggaggctcatggcccatatttcccacatttctaataccaccacccctgtgcttcaggccctccaaacccctgtgttccccaaatgttccatgcccttctttgtatcactgactattatatgttgctctcttgcctaaatcttcctctgaagtaaaagatctcaaaaggacagatcattaatgactgg

SEQ ID NO: 6154 - DNA, 3613 bp, Homo sapiens
agacccgtgcggtagcaacagcggcggcggccgcggcggctggccggactcaggtgtttcggacgctattgcccttcgcgccagccgtcgagtgggcagcagcgggactcagccgggcgccaggttcctgccaggcagcgccgggaagcgcgggcggccgagaactccttcctgctacttcgcccagcgccgctgcttcggcttcccagcgaagtgggagaccttcctccctgtttgcagacgtccgtgggagacccttattttttccaccgctaaggttaagagattctggaatagaagcgtcgaaggagatcaagtgaaccttctacaactcctcggatgtcgccagtctccctttcggggcggaagactacgtttgagcatctcactgaggtgcaggaatggaagaacccaccttgcagcttttctgcagtgtggcttgcctgatctacccctaggaatgaagaggaggcttgtaataatccgatgaagtacagatgttgaagaggatatcgcaggacctaaacttgtgatcgtttgggggaggtcacacacgtttctgagtgggaatggatgggcgtgaatgacgtgccctcttaaaaagcacaacartcctttaagaggagcaaaattgagttttcccattttggccaagattttgaagacagttcaatgtattctacatttgacataagatgagaactttctaaagtattctctccaagagcgtaaacgatgactaccccagccctgctgcccctctctggacgtaggataccacctctgaacctggggccgccttccttcccacatcacagggctaccttgagactttctgagaagtttattcttctccttattcttagtgccttcatcactctgtgttttggggcattctttttccttccagactcttcaaaacacaaacgctttgatttgggtttagaagatgtgttaattccacatgtagatgccggtaaaggggctaaaaaccccggagtcttcctgatccatggaccsgatgaacatagacacagggaagaggaagaacrtctgagaaataaaattcgagctgatcatgagaaggccttggaagaagcaaaagaaaaattaagaaagtcaagagaggaaattcgagcagaaattcagacagagaaaaataaggtagtccaagaaatgaagataaaagagaacaagccactgccaccagtccctattcccaaccttgtaggaatacgtggtggagacccagaagataatgacataagagagaaaagggaaaaaattaaagagatgatgaaacatgcttgggataactataggacatatgggtggggacataatgaactcagacctattgcaaggaaaggacactcccctaacatatttggaagttcacaaatgggtgctaccatagtagatgctttggataccctttatatcatgggacttcatgatgaattcctagatgggcaaagatggattgaagacaaccttgatttcagtgtgaattcagaggtgtctgtgtttgaagtcaacattcgatttattggaggcctacttgcagcatattacctatcaggagaggagatattcaagattaaagcagtgcaattggctgagaaactccttcctgcctttaacacacctactgggattccttgggcaatggtgaatttgaaaagtggagtagggcgaaactggggctgggcatctgcaggtagcagcattctggctgaatttggtacactacatatggagttcatccacctcagctacttgacaggggacctgacttactacaaaaaggtkatgcacattcggaaactacttcagaaaatggatcgtccaaatggtctttatccaaattatttgaaccccagaacagggcgctggggtcagtatcatacatctgtcggtggcctgggagacagtttttatgaatacttactgaaagcatggttgatgtcagataaaacagaccatgaggcaagaaagatgtatgatgatgctattgaggctatagaaaaacatcttattaagaagtctcgtggaggtcttacctttattggagaatggaagaatgggcacttggaaaaaaagatggggcatttggcctgctttgctgggggaatgtttgcactaggagcagatggttccagagcagataaagctggtcattatttagagctaggggcagaaattgcacgtacttgtcatgagtcatatgacagaactgcattaaagctaggtcctgaatcattcaagtttgatggtgcagtggaggctgtggctgtccggcaggctgaaaagtattatatcctccgtccagaagtaattgaaacctattggtacctatggcgattcactcacgatccaagatacaggcagtggggctgggaagcagcactggccattgaaaagtattgccgagttaatggtgggttttctggagtcaaagatgtatattcctctactcctacacatgatgatgtacagcagagcttttttcttgctgaaacattaaaatatttgtatctgctgttctccggtgatgaccttttacctttagaccactgggtgtttaatacagaggctcaccctctgcctgtgttacatttagccaacaccacactttcagagtcctgaagtctggaggctagacttcctgaaagcaagtcaagaatatagagcaccttgcaggagttcaagatggcctttggaaccaattatgtatttgtttcctcctacagtggagcagcattcaaatcaaatatttacatattgcttatcactttttctccattttaataatggaatgaactaaaataaacaagaacaaaagaatagtataattatatcagtaacaagaagactcaaaaaagaaacaggagtacctatccctatctgaattttcaagttccccattggatgaccagactggcaaccatttcaaatcccagtctatttcattgaaatttcttggttaagtttaattttctctgggggcatgatctcacaaagaatactcaagtctttttcttcttatggaatcatcgaaactgctatttatcataatcaccacttatgagcctgggtttgggattttgtgcatgtagttcagtctastgttggtagcatgacagaaagtggggaaaatgccgcagtttgttgccttgaaacctaagagcaatccttggttttgttgctacattatttttccagaccracacatctaccaagtaaattttattcactttaatttcataataaagttagtagagtcactcaacttacaactttatttatgtggcttggcaaaaatcactataaggcagctctaaatttgccttgataagctaaataaattacttttataacttactaaagcagaacaaacagtgaaactttctaaaatattctatctggaatagggacaggggatcttttatttataatctcatcagatgagtgagttgttcacagatattttatgtttttttaattttctccaagaatatttatagaattccaaagaatcagaatagtttcaaaataattttcagtgataaaagagtgttgtaattaatcatattacactaaaattgggata

SEQ ID NO: 6155 - DNA, 3630 bp, Homo sapiens
agacccgtgcggtagcaacagcggcggcggccgcggcggctggccggactcaggtgtttcggacgctattgcccttcgcgccagccgtcgagtgggcagcagcgggactcagccgggcgccaggttcctgccaggcagcgccgggaagcgcgggcggccgagaactccttcctgctacttcgcccagcgccgctgcttcggcttcccagcgaagtgggagaccttcctccctgtttgcagacgtccgtgggagacccttattttttccaccgctaaggttaagagattctggaatagaagcgtcgaaggagatcaagtgaaccttctacaactcctcggatgtcgccagtctccctttcggggcggaagactacgtttgagcatctcactgaggtgcaggaatggaagaacccaccttgcagcttttctgcagtgtggcttgcctgatctacccctaggaatgaagaggaggcttgtaataatccgatgaagtacagatgttgaagaggatatcgcaggacctaaacttgtgatcgtttgggggaggtcacacacgtttctgagtgggaatggatgggcgtgaatgacgtgccctcttaaaaagcacaacartcctttaagaggagcaaaattgagttttcccattttggccaagattttgaagacagttcaatgtattctacatttgacataagatgagaactttctaaagtattctctccaagagcgtaaacgatgactaccccagccctgctgcccctctctggacgtaggataccacctctgaacctggggccgccttccttcccacatcacagggctaccttgagactttctgagaagtttattcttctccttattcttagtgccttcatcactctgtgttttggggcattctttttccttccagactcttcaaaacacaaacgctttgatttgggtttagaagatgtgttaattccacatgtagatgccggtaaaggggctaaaaaccccggagtcttcctgatccatggaccsgatgaacatagacacagggaagaggaagaacrtctgagaaataaaattcgagctgatcatgagaaggccttggaagaagcaaaagaaaaattaagaaagtcaagagaggaaattcgagcagaaattcagacagagaaaaataaggtagtccaagaaatgaagataaaagagaacaagccactgccaccagtccctattcccaaccttgtaggaatacgtggtggagacccagaagataatgacataagagagaaaagggaaaaaattaaagagatgatgaaacatgcttgggataactataggacatatgggtggggacataatgaactcagacctattgcaaggaaaggacactcccctaacatatttggaagttcacaaatgggtgctaccatagtagatgctttggataccctttatatcatgggacttcatgatgaattcctagatgggcaaagatggattgaagacaaccttgatttcagtgtgaattcagaggtgtctgtgtttgaagtcaacattcgatttattggaggcctacttgcagcatattacctatcaggagaggagatattcaagattaaagcagtgcaattggctgagaaactccttcctgcctttaacacacctactgggattccttgggcaatggtgaatttgaaaagtggagtagggcgaaactggggctgggcatctgcaggtagcagcattctggctgaatttggtacactacatatggagttcatccacctcagctacttgacaggggacctgacttactacaaaaaggtkatgcacattcggaaactacttcagaaaatggatcgtccaaatggtctttatccaaattatttgaaccccagaacagggcgctggggtcagtatcatacatctgtcggtggcctgggagacagtttttatgaatacttactgaaagcatggttgatgtcagataaaacagaccatgaggcaagaaagatgtatgatgatgctattgaggctatagaaaaacatcttattaagaagtctcgtggaggtcttacctttattggagaatggaagaatgggcacttggaaaaaaagatggggcatttggcctgctttgctgggggaatgtttgcactaggagcagatggttccagagcagataaagctggtcattatttagagctaggggcagaaattgcacgtacttgtcatgagtcatatgacagaactgcattaaagctaggtcctgaatcattcaagtttgatggtgcagtggaggctgtggctgtccggcaggctgaaaagtattatatcctccgtccagaagtaattgaaacctattggtacctatggcgattcactcacgatccaagatacaggcagtggggctgggaagcagcactggccattgaaaagtattgccgagttaatggtgggttttctggagtcaaagatgtatattcctctactcctacacatgatgatgtacagcagagcttttttcttgctgaaacattaaaatatttgtatctgctgttctccggtgatgaccttttacctttagaccactgggtgtttaatacagaggctcaccctctgcctgtgttacatttagccaacaccacactttcaggtaatcctgctgttcgatgaaagcagttccagaaggaccattctcacctgtgttttgtttacatggaccactacagaaattagtttgaaggggcggcttttgaaaacctggacctctatgtcaacatgacagggtgaaactattccccctaagactgttcaacttgtagatacatcaactttgaaattattccattttatacctgaccaaaacatgttctgatatgtgtaggacagagacctggatgtgctttgatcgttaatgaggtggtcacatgagaartgatacctgttactactgtattgtttttagagtcctgaagtctggaggctagacttcctgaaagcaagtcaagaatatagagcaccttgcaggagttcaagatggcctttggaaccaattatgtatttgtttcctcctacagtggagcagcattcaaatcaaatatttacatattgcttatcactttttctccattttaataatggaatgaactaaaataaacaagaacaaaagaatagtataattatatcagtaacaagaagactcaaaaaagaaacaggagtacctatccctatctgaattttcaagttccccattggatgaccagactggcaaccatttcaaatcccagtctatttcattgaaatttcttggttaagtttaattttctctgggggcatgatctcacaaagaatactcaagtctttttcttcttatggaatcatcgaaactgctatttatcataatcaccacttatgagcctgggtttgggattttgtgcatgtagttcagtctastgttggtagcatgacagaaagtggggaaaatgccgcagtttgttgccttgaaacctaagagcaatccttggttttgttgctacattatttttccagaccracacatctaccaagtaaattttattcactttaatttcataataaagttagtagagtcactcaacttacaactttatttatgtggcttgg

SEQ ID NO: 6156 - DNA, 2528 bp, Homo sapiens
agacccgtgcggtagcaacagcggcggcggccgcggcggctggccggactcaggtgtttcggacgctattgcccttcgcgccagccgtcgagtgggcagcagcgggactcagccgggcgccaggttcctgccaggcagcgccgggaagcgcgggcggccgagaactccttcctgctacttcgcccagcgccgctgcttcggcttcccagcgaagtgggagaccttcctccctgtttgcagacgtccgtgggagacccttattttttccaccgctaaggttaagagattctggaatagaagcgtcgaaggagatcaagtgaaccttctacaactcctcggatgtcgccagtctccctttcggggcggaagactacgtttgagcatctcactgaggtgcaggaatggaagaacccaccttgcagcttttctgcagtgtggcttgcctgatctacccctaggaatgaagaggaggcttgtaataatccgatgaagtacagatgttgaagaggatatcgcaggacctaaacttgtgatcgtttgggggaggtcacacacgtttctgagtgggaatggatgggcgtgaatgacgtgccctcttaaaaagcacaacartcctttaagaggagcaaaattgagttttcccattttggccaagattttgaagacagttcaatgtattctacatttgacataagatgagaactttctaaagtattctctccaagagcgtaaacgatgactaccccagccctgctgcccctctctggacgtaggataccacctctgaacctggggccgccttccttcccacatcacagggctaccttgagactttctgagaagtttattcttctccttattcttagtgccttcatcactctgtgttttggggcattctttttccttccagactcttcaaaacacaaacgctttgatttgggtttagaagatgtgttaattccacatgtagatgccggtaaaggggctaaaaaccccggagtcttcctgatccatggaccsgatgaacatagacacagggaagaggaagaacrtctgagaaataaaattcgagctgatcatgagaaggccttggaagaagcaaaagaaaaattaagaaagtcaagagaggaaattcgagcagaaattcagacagagaaaaataaggtagtccaagaaatgaagataaaagagaacaagccactgccaccagtccctattcccaaccttgtaggaatacgtggtggagacccagaagataatgacataagagagaaaagggaaaaaattaaagagatgatgaaacatgcttgggataactataggacatatgggtggggacataatgaactcagacctattgcaaggaaaggacactcccctaacatatttggaagttcacaaatgggtgctaccatagtagatgctttggataccctttatatcatgggacttcatgatgaattcctagatgggcaaagatggattgaagacaaccttgatttcagtgtgaattcagaggtgtctgtgtttgaagtcaacattcgatttattggaggcctacttgcagcatattacctatcaggagaggagatattcaagattaaagcagtgcaattggctgagaaactccttcctgcctttaacacacctactgggattccttgggcaatggtgaatttgaaaagtggagtagggcgaaactggggctgggcatctgcaggtagcagcattctggctgaatttggtacactacatatggagttcatccacctcagctacttgacaggggacctgacttactacaaaaaggtkatgcacattcggaaactacttcagaaaatggatcgtccaaatggtctttatccaaattatttgaaccccagaacagggcgctggggtcagtatcatacatctgtcggtggcctgggagacagtttttatgaatacttactgaaagcatggttgatgtcagataaaacagaccatgaggcaagaaagatgtatgatgatgctattgaggctatagaaaaacatcttattaagaagtctcgtggaggtcttacctttattggagaatggaagaatgggcacttggaaaaaaagatggggcatttggcctgctttgctgggggaatgtttgcactaggagcagatggttccagagcagataaagctggtcattatttagagctaggggcagaaattgcacgtacttgtcatgagtcatatgacagaactgcattaaagctaggtcctgaatcattcaagtttgatggtgcagtggaggctgtggctgtccggcaggctgaaaagtattatatcctccgtccagaagtaattgaaacctattggtacctatggcgattcactcacgatccaagatacaggcagtggggctgggaagcagcactggccattgaaaagtattgccgagttaatggtgggttttctggagtcaaagatgtatattcctctactcctacacatgatgatgtacagcagagcttttttcttgctgaaacattaaa

SEQ ID NO: 6157 - DNA, 2020 bp, Homo sapiens
gttggacaggacgtagacacacagaagaaaagaagacaaagaacrggttaccatggggaagaaagtggccatcattggagctggtgtgagtggcttggcctccatcaggagctgtctggaagaggggctggagcccacctgctttgagaagagcaatgacattgggggcctgtggaaattttcagaccatgcagaggagggcagggctagcatttacaaatcagtcttttccarctcttccaaagagatbatgtgtttcccagacttcccatttcccgatgacttccccaactttaygcacaacagcaagatccaggaatatatcattgcatttgccaaagaaaagaacctcctgaagtacatacaatttaagacatttgtatccagtgtaaataaacatcctgattttgcaactactggccagtgggatgttaccactgaaagggatggtaaaaaagaatcggctgtctttgatgctgtaatggtttgttcyggacatcatgtgtatcccaacctaccaaaaragtcctttccaggactaaaccactttaaaggcaaatgcttccacagcagggactataaagaaccaggtgtattcaatggaaagcgtgtcctggtggttggcctggggaattcgggctgtgatattgccacagaactcagccgcacagcagaacaggtcatgatcagttccagaagtggctcctgggtgatgagccgggtctgggacaatggttatccttgggacatgctgctcgtcactcgattyggaaccttcctcaagaacaatttaccgacagccatctctgactggttgtacrtgaagcagatgaatgcaagattcaagcatgaaaactatggcttgatgcctttaaatggagycctgaggaaagagcctgtatttaaygatgagctcccagcaagcattctgtgtggcattgtgtccgtaaagcctaaygtgaagkaattcacagrgacctcggccatttttkaggatgggaccatatttgagggcattgactgtgtaatctttgcaacagggtatagttttgcctaccccttccttgatgagtctatcatcaaaagcagaaacaatgagatcattttatttaaaggagtatttcctcctctacttsagaagtcaaccatagcagtgattggctttgtccagtcccttggggctgccattcccacagttgacctccagtcccgctgggcagcacaagtaataaagggaacttgtactttgccttctatggaagacatgatgaatgatattaatgagaaaatggagaaaaagcgcaaatggtttggcaaaagcgagaccatacagacagattacattgtttatatrgatgaactctcctccttcattggggcaaagcccaacatcccatggctgtttctcacagatcccaaattggccatggaagtttattttggcccttgtagtccctaccagtttaggctggtggrcccagggcagtggccaggagccagaaatgccatrctgacccagtgggacyggtcgttgaaacccatgcagacacgagtggkcgggagacttcagaagccttgcttctttttccattggctgaagctctttgcaattcctattctgttaatcgctgttttccttgtgttgacctaatcatcattttctctaggatttctgaaagttactgacaatacccagacaggggctttgctatttaaaaattaaaattttcacaccacctgcttttctattcagcatcttttgcagtactctgtagacattagtcagtaatacagtgttatttctaggctctgaaatagccactttaagaatcatgtcatgatcttaagagagcactaatcatttctgtttgagttccactaacacttcaaaatcagaactatgttctttatatctaacttaaatcatttcctgaaacattttgacatgattcctttttccttttaaacaatgtatgaaagatgtattttaaatctaaataaagagcaaattaagcagaat

SEQ ID NO: 6158 - DNA, 2079 bp, Homo sapiens
gtaggctcactagaacattttctctttcaaactgcccagacggttggacaggacgtagacacacagaagaaaagaagacaaagaacrggtaggaaaattaaaaaggttaccatggggaagaaagtggccatcattggagctggtgtgagtggcttggcctccatcaggagctgtctggaagaggggctggagcccacctgctttgagaagagcaatgacattgggggcctgtggaaattttcagaccatgcagaggagggcagggctagcatttacaaatcagtcttttccarctcttccaaagagatbatgtgtttcccagacttcccatttcccgatgacttccccaactttaygcacaacagcaagatccaggaatatatcattgcatttgccaaagaaaagaacctcctgaagtacatacaatttaagacatttgtatccagtgtaaataaacatcctgattttgcaactactggccagtgggatgttaccactgaaagggatggtaaaaaagaatcggctgtctttgatgctgtaatggtttgttcyggacatcatgtgtatcccaacctaccaaaaragtcctttccaggactaaaccactttaaaggcaaatgcttccacagcagggactataaagaaccaggtgtattcaatggaaagcgtgtcctggtggttggcctggggaattcgggctgtgatattgccacagaactcagccgcacagcagaacaggtcatgatcagttccagaagtggctcctgggtgatgagccgggtctgggacaatggttatccttgggacatgctgctcgtcactcgattyggaaccttcctcaagaacaatttaccgacagccatctctgactggttgtacrtgaagcagatgaatgcaagattcaagcatgaaaactatggcttgatgcctttaaatggagycctgaggaaagagcctgtatttaaygatgagctcccagcaagcattctgtgtggcattgtgtccgtaaagcctaaygtgaagkaattcacagrgacctcggccatttttkaggatgggaccatatttgagggcattgactgtgtaatctttgcaacagggtatagttttgcctaccccttccttgatgagtctatcatcaaaagcagaaacaatgagatcattttatttaaaggagtatttcctcctctacttsagaagtcaaccatagcagtgattggctttgtccagtcccttggggctgccattcccacagttgacctccagtcccgctgggcagcacaagtaataaagggaacttgtactttgccttctatggaagacatgatgaatgatattaatgagaaaatggagaaaaagcgcaaatggtttggcaaaagcgagaccatacagacagattacattgtttatatrgatgaactctcctccttcattggggcaaagcccaacatcccatggctgtttctcacagatcccaaattggccatggaagtttattttggcccttgtagtccctaccagtttaggctggtggrcccagggcagtggccaggagccagaaatgccatrctgacccagtgggacyggtcgttgaaacccatgcagacacgagtggkcgggagacttcagaagccttgcttctttttccattggctgaagctctttgcaattcctattctgttaatcgctgttttccttgtgttgacctaatcatcattttctctaggatttctgaaagttactgacaatacccagacaggggctttgctatttaaaaattaaaattttcacaccacctgcttttctattcagcatcttttgcagtactctgtagacattagtcagtaatacagtgttatttctaggctctgaaatagccactttaagaatcatgtcatgatcttaagagagcactaatcatttctgtttgagttccactaacacttcaaaatcagaactatgttctttatatctaacttaaatcatttcctgaaacattttgacatgattcctttttccttttaaacaatgtatgaaagatgtattttaaatctaaataaagagcaaattaagcagaat

SEQ ID NO: 6159 - DNA, 4369 bp, Homo sapiens
tgccgccgggctgccatccttgccctgccatgtctcgccggaagcctgcgtcgggcggcctcgctgcctccagctcagcccctgcgaggcaagcggttttgagccgattcttccagtctacgggaagcctgaaatccacctcctcctccacaggtgcagccgaccaggtggaccctggcgctgcagcggcygcagcgsccscagcgsccgccttcccgccccagctgccgccgcacrtagctacagaaattgacagaagaaagaagagaccattggaaaatgatgggcctgttaaaaagaaagtaaagaaagtccaacaaaaggaaggaggaagtgatctgggaatgtctggcaactctgagccaaagaaatgtctgaggacyaggaatgtttcaaagtctctggaaaaattgaaagaattctgctgcgattctgcccttcctcaaagtagagtccagacagaatctctgcaggagagatttgcagttctgccaaaatgtactgattttgatgatatcagtcttctacacgcaaagaatgcagtttcttctgaagattcgaaacgtcaaattaatcaaaaggacacaacactttttgatctcagtcagtttggatcatcaaatacaagtcatgaaaatttacagaaaactgcttccaaatcagctaacaaacggtccaaaagcatctatacgccrctagaattacaatacatagaaatgaarcagcagcacaaagatgcagttttgtgtgtggaatgtggatataagtatagattctttggggaagatgcagagattgcagcccgagagctcaatatttattgccatttagatcacaactttatgacagcaagtatacctactcacagactgtttgttcatgtacgccgcctggtggcaaaaggatataaggtgggagttgtgaagcaaactgaaactgcagcattaaaggccattggagacaacagaagttcactcttttcccggaaattgactgccctttatacaaaatctacacttattggagaagatgtgaatcccctaatcaagctggatgatgctgtaaatgttgatgagataatgactgatacttctaccagctatcttctgtgcatctctgaaaataaggaaaatgttagggacaaaaaaaagggcaacatttttattggcattgtgggagtgcagcctgccacaggcgaggttgtgtttgatagtttccaggactctgcttctcgttcagagctagaaacccggatgtcaagcctgcagccagtagagctgctgcttccttcggccttgtccgagcaaacagaggcgctcatccacagagccacatctgttagtgtgcaggatgacagaattcgagtcgaaaggatggataacatttattttgaatrcagccatgctttccaggcagttacagagttttatgcaaaagatacagttgacatcaaaggttctcaaattatttctggcattgttaacttagagaagcctgtgatttgctctttggctgccatcataaaatacctcaaagaattcaacttggaaaagatgctctccaaacctragaattttaaacagctatcaagtaaaatggaatttatgacaattaatggaacaacattaaggaatctggaaatcctacagaatcagactgatatgaaaaccaaaggaagtttgctgtgggttttagaccacactaaaacttcatttgggagacggaagttaaagaagtgggtgacccagccactccttaaattaagggaaataaatgcccggcttgatgctgtatcggaagttctccattcagaatctagtgtgtttggtcagatagaaaatcatctacgtaaattgcccgacatagagaggggactctgtagcatttatcacaaaaaatgttctacccaagagttcttcttgattgtcaaaactttatatcacctaaagtcagaatttcaagcaataatacctgctgttaattcccacattcagtcagacttgctcyggaccgttattttagaaattcctgaactcctcagtccagtggagcattacttaaagatactcaatgaacaagctgccaaagttggggataaaactgaattatttaaagacctttctgacytccctttaataaaaaagaggaaggatgaaattcaaggtgttattgacgagatccgaatgcatttgcaagaaatacgaaaaatactaaaaaatccttctgcacaatatgtgacagtatcaggacaggagtttatgatagaaataaagaactctgctgtatcttgtataccaactgattgggtaaaggttggaagcacaaaagctgtgagccgctttcactctccttttattgtagaaaattacagacatctgaatcagctccgggagcagctagtccttgactgcagtgctgaatggcttgattttctagagaaattcagtgaacattatcactccttgtgtaaagcagtgcatcacctagcaactgttgactgcattttctccctggccaaggtcgctaagcaaggagattactgcagaccaactgtacaagaagaaagaaaaattgtaataaaaaatggaaggcwccctgtgattgatgtgttgctgggagaacaggatcaatatgtcccaaataatacagatttatcagaggactcagagagagtaatgataattaccggaccaaacatgggtggaaagagctcctacataaaacaagttgcattgattaccatcatggctcagattggctcctatgttcctgcagaagaagcgacaattgggattgtggatggcattttcacaaggatgggtgctgcagacaatatatataaaggacrgagtacatttatggaagaactgactgacacagcagaaataatcagaaaagcaacatcacagtccttggttatcttggatgaactaggaagagggacgagcactcatgatggaattgccattgcctatgctacacttgagtatttcatcagagatgtgaaatccttaaccctgtttgtcacccattatccgccagtttgtgaactagaaaaaaattactcacaccaggtggggaattaccacatgggattcttggtcagtgaggatgaaagcaaactggatccaggcrcagcagaacaagtccctgattttgtcrccttcctttaccaaataactagaggaattgcagcaaggagttatggattaaatgtggctaaactagcagatgttcctggagaaattttgaagaaagcagctcacaagtcaaaagagctggaaggattaataaatacgaaaagaaagagactcaagtattttgcaaagttatggacgatgcataatgcacaagacctgcagaagtggacagaggagttcaacatggaagaaacacagacttctcttcttcattaaaatgaagactacatttgtgaacaaaaaatggagaattaaaaataccaactgtacaaaataactctccagtaacagcctatctttgtgtgacatgtgagcataaaattatgaccatggtatattcctattggaaacagagaggtttttctgaagacagtctttttcaagtttctgtcttcctaacttttctacgtataaacactcttgaatagacttccactttgtaattagaaaattttatggacagtaagtccagtaaagccttaagtggcagaatataattcccaagcttttggagggtgatataaaaatttacttgatatttttatttgtttcagttcagataattggcaactgggtgaatctggcaggaatctatccattgaactaaaataattttattatgcaaccagtttatccaccaagaacataagaattttttataagtagaaagaattggccaggcatggtggctcatgcctgtaatcccagcactttgggaggccaaggtaggcagatcacctgaggtcaggagttcaagaccagcctggccaacatggcaaaaccccatctttactaaaaatataaagtacatctctactaaaaatacgaaaaaattagctgggcatggtggcrcacacctgtagtcccagctactccggaggctgaggcaggagaatctcttgaacctgggaggcggaggttgcaatgagccgagatcacgtcactgcactccagcttgggcaacagagcaagactccatctcaaaaaaaaaaaaagaaaaaagaaaagaaatagaattatcaagcttttaaaaactagagcacagaaggaataaggtcatgaaatttaaaaggttaaatattgtcataggattaagcagtttaaagattgttggatgaaattatttgtcattcattcaagtaataaatatttaatgaatacttgctata

SEQ ID NO: 6160 - DNA, 1458 bp, Homo sapiens
cgctcagcaggacgtgggaggctccggcttcaaggtcgacactcatccaagaggaaggatggccagtatcttttctaagttgctaactggccgcaatgcttctctgctgtttgctaccatgggcaccagtgtcctgaccaccgggtacctgctgaaccggcagaaagtgtgtgccgaggtccgggagcagcctaggctatttcctccaagcgcagactacccagacctgcgcaagcacaacaactgcatggccgagtgcctcacccccgccatttatkccaagcttcgcaacaaggtgacacccaacggctacacgctggaccagtgcatccagactggagtggacaaccctggccaccccttcataaagactgtgggcatggtggctggtgacgaggagtcctatgaggtgtttgctgacctttttgaccccgtcatcaaactaagacacaacggctatgaccccagggtgatgaagcacacaacggatctggatgcatcaaagatcacccaagggcagttcgacgagcattacgtgctgtcttctcgggtgcgcactggccgcagcatccgtgggctgagcctgcctccagcctgcacccgggccgagcgaagggaggtagagaacgtggccatcactgccctggagggcctcaagggggacctggctggccgctactacaagctgtccgagatgacggagcaggaccagcagcggctcatcgatgaccactttctgtttgataagccagtgtcccctttattaacatgtgctgggatggcccgtgactggccagatgccaggggaatctggcataattatgataagacatttctcatctggataaatgaggaggatcacaccagggtaatctcaatggaaaaaggaggcaatatgaaacgagtatttgagcgattctgtcgtggactaaaagaagtagaacggttaatccaagaacgaggctgggagttcatgtggaatgagcgcctaggatacattttgacctgtccttcgaaccttggaacaggactacgagctggtgtccacgttaggatcccaaagctcagcaaggacccacgcttttctaagatcctggaaaacctaagactccagaagcgtggcacaggtggtgtggacactgccgcggtcgcagatgtgtacgacatttccaacatagatagaattggtcgatcagaggttgagcttgttcagatagtcatcgatggagtcaattacmtggtggattgtgaaaagaagttggagagaggccaagatattaaggtgccaccccctctgcctcagtttggcaaaaagtaaactttccctttcccaatttataaataatctgtctgctggtacracagacataaatctctactctgagagtttttatacacttggaaaaatataaaattgtagatcctgcctatctttacaataaaactctccttaatata

SEQ ID NO: 6161 - DNA, 1465 bp, Homo sapiens
ttggctgtgtgcgctcagcaggacgtgggaggctccggcttcaagacactcatccaagaggaaggatggccagtatcttttctaagttgctaactggccgcaatgcttctctgctgtttgctaccatgggcaccagtgtcctgaccaccgggtacctgctgaaccggcagaaagtgtgtgccgaggtccgggagcagcctaggctatttcctccaagcgcagactacccagacctgcgcaagcacaacaactgcatggccgagtgcctcacccccgccatttatkccaagcttcgcaacaaggtgacacccaacggctacacgctggaccagtgcatccagactggagtggacaaccctggccaccccttcataaagactgtgggcatggtggctggtgacgaggagtcctatgaggtgtttgctgacctttttgaccccgtcatcaaactaagacacaacggctatgaccccagggtgatgaagcacacaacggatctggatgcatcaaagatcacccaagggcagttcgacgagcattacgtgctgtcttctcgggtgcgcactggccgcagcatccgtgggctgagcctgcctccagcctgcacccgggccgagcgaagggaggtagagaacgtggccatcactgccctggagggcctcaagggggacctggctggccgctactacaagctgtccgagatgacggagcaggaccagcagcggctcatcgatgaccactttctgtttgataagccagtgtcccctttattaacatgtgctgggatggcccgtgactggccagatgccaggggaatctggcataattatgataagacatttctcatctggataaatgaggaggatcacaccagggtaatctcaatggaaaaaggaggcaatatgaaacgagtatttgagcgattctgtcgtggactaaaagaagtagaacggttaatccaagaacgaggctgggagttcatgtggaatgagcgcctaggatacattttgacctgtccttcgaaccttggaacaggactacgagctggtgtccacgttaggatcccaaagctcagcaaggacccacgcttttctaagatcctggaaaacctaagactccagaagcgtggcacaggtggtgtggacactgccgcggtcgcagatgtgtacgacatttccaacatagatagaattggtcgatcagaggttgagcttgttcagatagtcatcgatggagtcaattacmtggtggattgtgaaaagaagttggagagaggccaagatattaaggtgccaccccctctgcctcagtttggcaaaaagtaaactttccctttcccaatttataaataatctgtctgctggtacracagacataaatctctactctgagagtttttatacacttggaaaaatataaaattgtagatcctgcctatctttacaataaaactctccttaatata

SEQ ID NO: 6162 - DNA, 1925 bp, Homo sapiens
tttttttttgagtcaagtctctatcacccaggctgctggagtgcagtggtgtgatctcgcctcactgcaacctccgcctcctgggttcaagtgattctcgtgcctcagcctcccgagtggctgggattacaggcgcgtgctaccacacctggctaatattttttgtatttttagtagagacagggtttcgccatgttggctaggctggtctctaactcctgacctcaggtgatccgcccaccttggcctcccaaagtgctgggattacaggcataagccaccatgcccagtccctaatatgatcttatttagttgacatttgcctctttccccaaaaatagatcaaaggaaatgtttccctttgtcccgtttcacactaaacgggttggggaggaaccaggggagatgtcaaccgtctgccggtgactgggaagttttctgcaagtcctccacagcataggccagcaggccacttttcactaacagaagtcacaagccaagtgagacactcatccaagaggaaggatggccagtatcttttctaagttgctaactggccgcaatgcttctctgctgtttgctaccatgggcaccagtgtcctgaccaccgggtacctgctgaaccggcagaaagtgtgtgccgaggtccgggagcagcctaggctatttcctccaagcgcagactacccagacctgcgcaagcacaacaactgcatggccgagtgcctcacccccgccatttatkccaagcttcgcaacaaggtgacacccaacggctacacgctggaccagtgcatccagactggagtggacaaccctggccaccccttcataaagactgtgggcatggtggctggtgacgaggagtcctatgaggtgtttgctgacctttttgaccccgtcatcaaactaagacacaacggctatgaccccagggtgatgaagcacacaacggatctggatgcatcaaagatcacccaagggcagttcgacgagcattacgtgctgtcttctcgggtgcgcactggccgcagcatccgtgggctgagcctgcctccagcctgcacccgggccgagcgaagggaggtagagaacgtggccatcactgccctggagggcctcaagggggacctggctggccgctactacaagctgtccgagatgacggagcaggaccagcagcggctcatcgatgaccactttctgtttgataagccagtgtcccctttattaacatgtgctgggatggcccgtgactggccagatgccaggggaatctggcataattatgataagacatttctcatctggataaatgaggaggatcacaccagggtaatctcaatggaaaaaggaggcaatatgaaacgagtatttgagcgattctgtcgtggactaaaagaagtagaacggttaatccaagaacgaggctgggagttcatgtggaatgagcgcctaggatacattttgacctgtccttcgaaccttggaacaggactacgagctggtgtccacgttaggatcccaaagctcagcaaggacccacgcttttctaagatcctggaaaacctaagactccagaagcgtggcacaggtggtgtggacactgccgcggtcgcagatgtgtacgacatttccaacatagatagaattggtcgatcagaggttgagcttgttcagatagtcatcgatggagtcaattacmtggtggattgtgaaaagaagttggagagaggccaagatattaaggtgccaccccctctgcctcagtttggcaaaaagtaaactttccctttcccaatttataaataatctgtctgctggtacracagacataaatctctactctgagagtttttatacacttggaaaaatataaaattgtagatcctgcctatctttacaataaaactctccttaatata

SEQ ID NO: 6163 - DNA, 3274 bp, Homo sapiens
tggagagggacaggaggaaacgcagcgccagcagcatctcatctaccctccttgacacctccccgtggctccagccagaccctagaggtcagccttgcggaccaacaggaggactcccagctttcccttttcaagaggtccccagacaccggccaccctcttccagcccctgcggccagtgcaaggaggcaccaatgctctgaggctgtcgcgtggtgcagcgtcgagcatcctcgccgaggtcctttctgctgcctgtcccgcctcaccccgctccatcacaccagctggccctctttgcttccttttcccagaatcgttaagccccgactcccactagcacctcgtaccaacctcgccccaccccatcctcctgccttcccgcgctccggtgtcccccgctgccatgagctcccccatcagcaagagccgctcgcttgccgccttcctgcagcagctgcgcagtccgaggcagcccccgagactggtgacatctacggcgtacacgtcccctcagccgcgagaggtgccagtctgcccgctgacagctggtggcgagactcagaacgcggccgccctgccgggccccaccagctggccactgctgggcagcctgctgcagattctctggaaagggggtctcaagaaacagcacgacaccctggtggagtaccacaagaagtatggcaagattttccgcatgaagttgggttcctttgagtcggtgcacctgggctcgccatgcctgctggaagcgctgtaccgcaccgagagcgcgtacccgcagcggctggagatcaaaccgtggaaggcctatcgcgactaccgcaaagaaggctacgggctgctgatcctggaaggggaagactggcagmgggtccggagtgcctttcaaaagaaactaatgaaaccaggggaagtgatgaagctggacaacaaaatcaatgaggtcttggcygattttatgggcagaatagatgagctctgtgatgaaagaggccacgttgaagacttgtacagcgaactgaacaaatggtcgtttgaaagtatctgcctcgtgttgtatgagaagagatttgggcttctccagaagaatgcaggggatgaagctgtgaacttcatcatggccatcaaaacaatgatgagcacrtttgggaggatgatggtcactccagtcgagctgcacaagagcctcaacaccaaggtctggcaggaccacactctggcctgggacaccattttcaaatcagtcaaagcttgtatcgacaaccggttagagaagtattctcagcagcctagtgcagatttcctttgtgacatttatcaccagaatcggctttcaaagaaagaattgtatgctgctgtcacagagctccagctggctgcggtggaaacgacagcaaacagtctaatgtggattctctacaatttatcccgtaatccccaagtgcaacaaaagcttcttaaggaaattcaaagtgtattacctgagaatcaggtgccacgggcagaagatttgaggaataygccrtatttaaaagcctgtctgaaagaatctatgaggcttacgccgagtgtaccatttacaactcggactcttgacaaggcaacagttctgggtgaatatgctttacccaaaggaacagtgctcatgctaaatacccaggtgttgggatccagtgaagacaattttgaagattcaagtcagtttagacctgaacgttggcttcaggagaaggaaaaaattaatccttttgcgcatcttccatttggcgttggaaaaagaatgtgcattggtcgccgattagcagagcttcaactgcatttggctctttgttggattgtccgcaaatacgacatccaggccacagacaatgagcctgttgagatgctacactcaggcaccctggtgcccagccgggaactccccatygcgttttgccagcgataatacgcctcagatggtggtatttgctaacatcatatccaactcagggaagyggactgagtgctgggatccaaggcattctacagggttcactgctgrtttacacttcacctgtgtcagcaccatcttcaggtgcttagaayggcctgggagcctgttctgtcttgcatcttccatgacatgaaagggaggctggcacttgtcagtcaggtagaggttacaaaccgtttcaggccctgcctaccacattcactgtttgaatctttaattcccaagaataagtttacatttcacaatgaatgacctacaacagctaaattttctggggctgggagtaatactgacaatccatttactgtagctctgcttaatgtactacttaggaaaatgtccctgcttaataatgtaagccaagctaaatgatggttaaagttatcaggcctcccatgaaattgcgttcttcctgcattgaaataaaaacattattgggaaactagagaacacctctatttttaaaaggactttaacgaagtcaaacaacttataagactagtgattcactggggcattattttgttagaggaccttaaaattgtttattttttaaatgtgattcctttatggcattagggtaaagatgaagcaataatttttaaattgtgtatgtgcatatgaagcacagacatgcatgtgtgtgtgtgtctgtgtgtgtgtgtccgtgtatgtgtgtgtgggttctaatggtaatttgcctcagtcatttttttaatatttgcagtacttgatttaggatctgtggtgcagggcaatgtttcaaagtttagtcacagcttaaaaacattcagtgtgactttaatattataaaatgatttccyatgccataatttttctgtctattaaatgggacaagtgtaaagcatgcaaaagttagagatctgttatataacatttgttttgtgatttgaactcctaggaaaaatatgatttcataaatgtaaaatgcacagaaatgcatgcaatacttataagacttaaaaattgtgtttacagatggtttatttgtgcatatttttactactgcttttcctaaatgcatactgtatataattctgtgtatttgataaatatttcttcctacattatatttttagaatatttcagaaatatacatttatgtctttatattgtaataaatatgtacatatctaggtatatgctttctctctgctgtgaaattatttttagaattataaattcacgtcttgtcakatttcatctgtataccttcaaattctctgaaagtaaaaataaaagtttttaaatatt

SEQ ID NO: 6164 - DNA, 2732 bp, Homo sapiens
aattagaaatattctggatttatacatctttgaagtttaatctgaaggtttcttcaggaagtaaatatctattcatcaccttttcccaagctccataaagttttttagtttatcccagtcgctaggagacagaagmcggaagcggaaatgcctttcacgacaacttccggaagaggtcgccatggcttcccgggaggaggtactmgccttacaagctgaagttgcccaacgtgaggaggaattgaattcgctgaagcagaagctggcgtcggctcttttggctgagcaggaaccgcagccagaacggctggttccggtgtcgccgctgccgccgaaggccgctctgtcccgagatgagattctgcgctatagccggcagctagtgctgcccgagctgggcgtgcacggacagctgcgcctggggaccgcgtgcgtgctaatcgtgggctgcggtggrctcggctgtccactagcgcagtacttggcagcggccggcgtgggccgccttggccttgtggactatgacgtggtagagatgagcaacctggcccgccaagtgctgcatggcgaggcactggctggccaggccaaggccttttcggccgccgcctcgctgcgccgcctcaattcggcagtggaatgcgtgccgtacactcaggcccttacgccagccactgccctagacctggtccgccgatatgatgtggtggctgactgctcggacaacgtgcccactcgctacctggttaatgacgcatgtgtgctggcgggtcggcccctcgtgtctgccagtgccttgcgcttcgagggccaaatcacagtctaccattatgacggtggcccttgctatcgctgcatattcccccaaccacccccagcggagacagtgaccaactgcgcggacggcggggtgctcggtgtcgttaccggggtcctgggctgcctgcaggccttggaagtgctgaaaatcgctgcgggtctgggcccctcttacagtggcagcttgttgctctttgatgccctgagagggcatttccgctctattcggctgcggagccgcaggctcgactgtgcagcttgcggggaacggcccactgtgactgatctgctggactatgaagccttctgtggctcctcagccactgataartgccgctccctgcaactactgagcccagaggagcgtgtttctgtcaccgactataagcgactgctggattctggggcattccacctgttgctggacgtcaggcctcaggtggaggtggacatttgtcgtttgcctcatgccctacacatccctctgaaacatttggaacgcagggatgcggagagcctgaaactcttaaaagaagcaatctgggaagagaagcagggcacacaagaaggggctgctgtccccatttatgtgatttgcaaactgggaaatgactcacagaaagccgtgaagatcctccagtccttatcagcagctcaagagttagaccctttaacagttcgggatgttgtggggggcctcatggcctgggctgccaaaatcgatggaacatttccacagtactgaggtgactggtatagtctgatgagaaagatgtggattgccataatacctcaaagatacacttgtttgcatttttcggtaatatacataggagctggggattctacagtatctgtgaatacgtggactcctttttataaggagttttaaaaattgttatgtattggatgaatgacttattaatggattataccgtttctgagaaccatcattttttttttcagcacacggaggatgtcttggacatgtgagatgtaacgtgacaggattttgcattttaaactgcagatcatttacatgtccttattttccacctcccccagtcaaaatgctttctaaatcattttcacagattatatacttcggatctgtttactgttcagttaagaaattcttggatcttattaatatttcagatgatagaatacatcctacagaaatacatgtttaaaatgtaaattgttttaattattcagaaagagggtcattctatttggccttttgaattagtatcaaaatgagattttttttttttttttgagatggaatctctctctgttgcccaggctggagtgtagtggtgcgatctcagctcactgcaacctccgcctcccaggttcaagcgattctcctgcctcagcctcctgagtagctgggattacaggcgcacgccaccacgcctggctaatttttgtatttttagtacagagggggtttcaccatgtttgtcaggctggtctcgaactcctgacctcgtgatccgcctgcctcgacttcccagagtgctgggattacaggcgtgagccaccacaccctcccgagatctttaaagtttaccaaaataaaggaaaccacctttgtagtctgtcagtgtctcttataaattgctactgtttycttaaagttaacttcagggtccaccttatgttgcacacatatcacatcgtttaaattgcatactatggtttgacttgctttggaattttcaagtcaaagtcccaaccctttgcctctccccctttaatttgccttttctcttttgatttaatgtttttttattccagcattttatactaatgtaaaatgtttttatgtttgtttacttaacattttcataaaatagtaggtagtctcaccaacttccaatatatacaacaacattataagtaaa

SEQ ID NO: 6165 - DNA, 1171 bp, Homo sapiens
gtgatgcgtagttccggctgccggttgacatgaagaagcagcagcggctagggcggcggtagctgcaggggtcggggattgcagcgggcctcggggctaagagcgcgacgcggcctagagcggcagacggcgcagtgggccgagaaggaggcgcagcagccgccctggcccgtcatggagatggaaaaggagttcgagcagatcgacaagtccgggagctgggcggccatttaccaggatatccgacatgaagccagtgacttcccatgtagagtggccaagcttcctaagaacaaaaaccgaaataggtacagagacgtcagtccctttgaccatagtcggattaaactacatcaagaagataatgactatatcaacgctagtttgataaaaatggaagaagcccaaaggagttacattcttacccagggccctttgcctaacacatgcggtcacttttgggagatggtgtgggagcagaaaagcaggggtgtcgtcatgctcaacagagtgatggagaaaggttcgttaaaatgcgcacaatactggccacaaaaagaagaaaaagagatgatctttgaagacacaaatttgaaattaacattgatctctgaagatatcaagtcatattatacagtgcgacagctagaattggaaaaccttacracccaagaaactcgagagatcttacatttccactataccacatggcctgactttggagtccctgaatcaccagcctcattcttgaactttcttttcaaagtccgrgagtcagggtcactcagcccggagcacgggcccgttgtggtgcactgcagtgcaggcatcggcaggtctggaaccttctgtctggctgatacctgcctcttgctgatggacaagaggaaagacccttcttccgttgatatcaagaaagtgctgttagaaatgaggaagtttcggatggggctgatccagacagccgaccagctgcgcttctcctacctggctgtgatcgaaggtgccaaattcatcatgggggactcttccgtggatcagtggaaggagctttcccacgaggacctggagcccccaccygagcatatccccccacctccccggccacccaaacgaatcctggagccacacaatgggaaatgcagggagttcttcccaaatcaccagtggg

SEQ ID NO: 6166 - DNA, 2056 bp, Homo sapiens
gtgatgcgtagttccggctgccggttgacatgaagaagcagcagcggctagggcggcggtagctgcaggggtcggggattgcagcgggcctcggggctaagagcgcgacgcggcctagagcggcagacggcgcagtgggccgagaaggaggcgcagcagccgccctggcccgtcatggagatggaaaaggagttcgagcagatcgacaagtccgggagctgggcggccatttaccaggatatccgacatgaagccagtgacttcccatgtagagtggccaagcttcctaagaacaaaaaccgaaataggtacagagacgtcagtccctttgaccatagtcggattaaactacatcaagaagataatgactatatcaacgctagtttgataaaaatggaagaagcccaaaggagttacattcttacccagggccctttgcctaacacatgcggtcacttttgggagatggtgtgggagcagaaaagcaggggtgtcgtcatgctcaacagagtgatggagaaaggttcgttaaaatgcgcacaatactggccacaaaaagaagaaaaagagatgatctttgaagacacaaatttgaaattaacattgatctctgaagatatcaagtcatattatacagtgcgacagctagaattggaaaaccttacracccaagaaactcgagagatcttacatttccactataccacatggcctgactttggagtccctgaatcaccagcctcattcttgaactttcttttcaaagtccgrgagtcagggtcactcagcccggagcacgggcccgttgtggtgcactgcagtgcaggcatcggcaggtctggaaccttctgtctggctgatacctgcctcttgctgatggacaagaggaaagacccttcttccgttgatatcaagaaagtgctgttagaaatgaggaagtttcggatggggctgatccagacagccgaccagctgcgcttctcctacctggctgtgatcgaaggtgccaaattcatcatgggggactcttccgtgcaggatcagtggaaggagctttcccacgaggacctggagcccccaccygagcatatccccccacctccccggccacccaaacgaatcctggagccacacaatgggaaatgcagggagttcttcccaaatcaccagtgggtgaaggaagagacccaggaggataaagactgccccatcaaggaagaaaaaggaagccccttaaatgccgcaccctacggcatcgaaagcatgagtcaagacactgaagttagaagtcgggtcgtggggggaagtcttcgaggtgcccaggctgcctccccagccaaaggggagccgtcactgcccgagaaggacgaggaccatgcactgagttactggaagcccttcctggtcaacatgtgcgtggctacggtcctcacggccggcgcttacctctgctacagggtatgtttccactgacagacgcgctggcgagatgctcgtgtgcagagagcactggccgctagcccgatggtaggattcagttctgtggtgcatctgagccagtctcagaagaaacagatcaaaggtttttaaagtctggaactgtggaagggctaacaagagaattaaggatcgatgcactggggttttaaggagccctctggtcccaagaatataagagtctaatctcagggccttaacctattcaggagtaagtagagaaaatgccaaatacgtctgtttctctctctctttttttttttattcctttgtttttggaaaaaaatagarttacaacacattgttgtttttaacctttataaaaagcagctttttgttatttctggaacaaaaaaaaacaaagtaggcacttatgaaactttctcatacccttaggtgatgtaatcagccatataatttatatttgatttcccagggaaggaatcccaaacttttacgaatgtaaactcccttggagaagagggttaggacgctgttgcgctcaagcccccctcagctgtgtgcacactgagccaggacagggtctttgagctttccc

SEQ ID NO: 6167 - DNA, 3524 bp, Homo sapiens
gtgatgcgtagttccggctgccggttgacatgaagaagcagcagcggctagggcggcggtagctgcaggggtcggggattgcagcgggcctcggggctaagagcgcgacgcggcctagagcggcagacggcgcagtgggccgagaaggaggcgcagcagccgccctggcccgtcatggagatggaaaaggagttcgagcagatcgacaagtccgggagctgggcggccatttaccaggatatccgacatgaagccagtgacttcccatgtagagtggccaagcttcctaagaacaaaaaccgaaataggtacagagacgtcagtccctttgaccatagtcggattaaactacatcaagaagataatgactatatcaacgctagtttgataaaaatggaagaagcccaaaggagttacattcttacccagggccctttgcctaacacatgcggtcacttttgggagatggtgtgggagcagaaaagcaggggtgtcgtcatgctcaacagagtgatggagaaaggttcgttaaaatgcgcacaatactggccacaaaaagaagaaaaagagatgatctttgaagacacaaatttgaaattaacattgatctctgaagatatcaagtcatattatacagtgcgacagctagaattggaaaaccttacracccaagaaactcgagagatcttacatttccactataccacatggcctgactttggagtccctgaatcaccagcctcattcttgaactttcttttcaaagtccgrgagtcagggtcactcagcccggagcacgggcccgttgtggtgcactgcagtgcaggcatcggcaggtctggaaccttctgtctggctgatacctgcctcttgctgatggacaagaggaaagacccttcttccgttgatatcaagaaagtgctgttagaaatgaggaagtttcggatggggctgatccagacagccgaccagctgcgcttctcctacctggctgtgatcgaaggtgccaaattcatcatgggggactcttccgtgcaggatcagtggaaggagctttcccacgaggacctggagcccccaccygagcatatccccccacctccccggccacccaaacgaatcctggagccacacaatgggaaatgcagggagttcttcccaaatcaccagtgggtgaaggaagagacccaggaggataaagactgccccatcaaggaagaaaaaggaagccccttaaatgccgcaccctacggcatcgaaagcatgagtcaagacactgaagttagaagtcgggtcgtggggggaagtcttcgaggtgcccaggctgcctccccagccaaaggggagccgtcactgcccgagaaggacgaggaccatgcactgagttactggaagcccttcctggtcaacatgtgcgtggctacggtcctcacggccggcgcttacctctgctacaggttcctgttcaacagcaacacatagcctgaccctcctccactccacctccacccactgtccgcctctgcccgcagagcccacgcccgactagcaggcatgccgcggtaggtaagggccgccggaccgcgtagagagccgggccccggacggacgttggttctgcactaaaacccatcttccccggatgtgtgtctcacccctcatccttttactttttgccccttccactttgagtaccaaatccacaagccattttttgaggagagtgaaagagagtaccatgctggcggcgcagagggaaggggcctacacccgtcttggggctcgccccacccagggctccctcctggagcatcccaggcgggcggcacgccaacagccccccccttgaatctgcagggagcaactctccactccatatttatttaaacaattttttccccaaaggcatccatagtgcactagcattttcttgaaccaataatgtattaaaattttttgatgtcagccttgcatcaagggctttatcaaaaagtacaataataaatcctcaggtagtactgggaatggaaggctttgccatgggcctgctgcgtcagaccagtactgggaaggaggacggttgtaagcagttgttatttagtgatattgtgggtaacgtgagaagatagaacaatgctataatatataatgaacacgtgggtatttaataagaaacatgatgtgagattactttgtcccgcttattctsctccctgttatctgctagatctagttctcaatcactgctcccccgtgtgtattagaatgcatgtaaggtcttcttgtgtcctgatgaaaaatatgtgcttgaaatgagaaactttgatctctgcttactaatgtgccccatgtccaagtccaacctgcctgtgcatgacctgatcattacatggctgtggttcctaagcctgttgctgaagtcattgtcgctcagcaatagggtgcagttttccaggaataggcatttgcctaattcctggcatgacactctagtgacttcctggtgaggcccagcctgtcctggtacagcagggtcttgctgtaactcagacattccaagggtatgggaagccatattcacacctcacgctctggacatgatttagggaagcagggacaccccccgccccccacctttgggatcagcctccgccattccaagtcaacactcttcttgagcagaccgtgatttggaagagaggcacctgctggaaaccacacttcttgaaacagcctgggtgacggtcctttaggcagcctgccgccgtctctgtcccggttcaccttgccgagagaggcgcgtctgccccaccctcaaaccctgtggggcctgatggtgctcacgactcttcctgcaaagggaactgaagacctccacattaagtggctttttaacatgaaaaacacggcagctgtagctcccgagctactctcttgccagcattttcacattttgcctttctcgtggtagaagccagtacagagaaattctgtggtgggaacattcgaggtgtcaccctgcagagctatggtgaggtgtggataaggcttaggtgccaggctgtaagcattctgagctgggcttgttgtttttaagtcctgtatatgtatgtagtagtttgggtgtgtatatatagtagcatttcaaaatggacgtactggtttaacctcctatccttggagagcagctggctctccaccttgttacacattatgttagagakgtagcgagctgctctgctatatgccttaagccaatatttactcatcaggtcattattttttacaatggccatggaataaaccatttttacaaaaataaaaacaaaaaaagcaaggtgttttggtataataccttttcaggtgtgtgtggatacgtggctgcatgaccgggtgggtkggggggagtgtctcagggtcttctgtgacctcacagaactgtcagactgtacagttttccaacttgccatattcatgatgggtttgcattttagctgcaacaataaaatttttttctaaagaac

SEQ ID NO: 6168 - DNA, 4304 bp, Homo sapiens
cagctgctcccggctccgcggccgcagcccgcgtggacgctccgagcgccccccgacggacgggaccggctccctggcggtcgggcgagcgggcggcaacgctgcccggccggcagcgctggggttaagtggcccaagtaaacctagctcggcgatcggcgccggagattcgcgagcccagcgccctgcacggccgccagccggcctcccgccagccagccccgacccgcggctccgccgcccagccgcgccccagccagccctgcggcagctcccacaggaaagcatgaagggagacaccaggcatctcaatggagaggaggacgcyggcgggagggaagactcgatcctcgtcaacggggcctgcagcgacyagtcctccgactcgcccccaatcctggaggctatccgcaccccggagatcagaggccgaagatcaagctcgygactctccaagagggaggtgtccagtctgctaagctacacacaggacttgacaggcgatggcgacggggaagatggggatggctctgacaccccagtcatgccaaagctcttccgggaaaccaggactcgttcagaaagcccagctgtccgaactcgaaataacaacagtgtctccagccgggagaggcacaggccttccccacgttccacccgaggccggcagggccgcaaccatgtggacgagtcccccgtggagttcccggctaccaggtccctgagacggcgggcaacagcatcggcaggaacgccatggccgtcccctcccagctcttaccttaccatcgacctcacagacgacacagaggacacacatgggacgccccagagcagcagtaccccctacgcccgcctagcccaggacagccagcaggggggcatggagtccccgyaggtggaggcagacagtggagatggagacagttcagagtatcaggatgggaaggagtttggaataggggacctcgtgtggggaaagatcaagggcttctcctggtggcccgccatggtggtgtcttggaaggccacctccaagcgacaggctatgtctggcatgcggtgggtccagtggtttggcgatggcaagttcyccgaggtctctgcagacaaactggtggcactggggctgttcagccagcactttaatttggccaccttcaataagctcgtctcctatcgaaaagccatgtaccatgctctggagaaagctagggtgcgagctggcaagaccttccccagcagccctggagactcattggaggaccagctgaagcccatgttggagtgggcccacgggggcttcaagcccactgggatcgagggcctcaaacccaacaacacgcaaccagtggttaataagtcgaaggtgcgtcgtgcaggcagtaggaaattagaatcaaggaaatacgagaacaagactcgaagaygcacagctgacgactcagccacctctgactactgccccgcacccaagcgcctcaagacaaattgctataacaayggcaaagaccgaggggatgaagatcagagccgagaacaaatggcttcagatgttgccaacaacaagagcagcctggaagatggctgtttgtcttgtggcaggaaaaaccccgtgtccttccaccctctctttgaggggggrctctgtcagacatgccgggatcgcttccttgagctgttttacatgtatgatgaygatggctatcagtcttactgcactgtgtgctgcgagggccgagagctgctgctttgcagcaacacgagctgctgccggtgtttctgtgtggagtgcctggaggtgctggtgggcacaggcacagcggccgaggccaagcttcaggagccctggagctgytacatgtgtctcccgcagcgctgtcatggcgtcctgcggcgccggaaggactggaacgtgcgcctgcaggccttcttcaccagtgacacggggcttgaataygaagcccccaagctgtaccctgccattcccgcagcccgaaggcggcccattcgagtcctgtcattgtttgatggcatcgygacaggctacctagtcctcaaagagttgggcataaaggtaggaaagtacgtcrcttctgaagygtgtgaggagtccattgctgttggaaccgtgaagcacgaggggaatatcaaatacgtgaacgacgtgaggaacatcacaaagaaaaatattgaagaatggggcccatttgacttggtgattggcggaagcccatgcaacgatctctcaaatgtgaatccagccaggaaargccygtatgagggtacaggccggctcttcttcgaattttaccacctgctgaattactcacgccccaaggagggtgatgaccggccgttcttctggatgtttgagaatgktgtagccatgaaggttggcgacaagagggacatctcacggttcctggagtgtaatccagtgatgattgatgccatcaaagtttctgctgctcacagggcccgatacttctggggcaacctacccgggatgaacaggcccgtgatagcatcaaagaatgataaactcgagctgcaggactgcttggaatacaataggatasccaagttaaagaaagtacagacaataaccaccaagtcgaactcgatcaaacaggggaaaaaccaacttttccctgttgtcatgaatggcaaagaagatgttttgtggtgcactgagctcgaaaggatctttggctttcctgtgcrctacacagacgtgtccaacatgggccgtggtgcccgccagaagctgctgggaaggtcctggagcgtgcctgtcatccracacctcttcgcccctctgaaggactactttgcatgtgaatagttccagccaggccccaagcccactggggtgtgtggcagagccaggacccaggaggtgtgattcctgaaggcatcsccaggccctgctcttcctcagctgtgtgggtcataccgtgtacctcagttccctcttgctcagtgggggcagagccacctgactcttgcaggggtagcctgaggtgccgcctccttgtgcacaaatcagacctggctgcttggagcagcctaacacggtgctcattttttcttctcctaaaactttaaaacttgaagtaggtagcaacgtggctttttttttttcccttcctgggtctaccactcagagaaacaatggctaagataccaaaaccacagtgccgacagctctccaatactcaggttaatgctgaaaaatcatccaagacagttattgcaagagtttaatttttgaaaactggctactgctctgtgtttacagacgtgtgcagttgtaggcatgtagctacaggacatttttaagggcccaggatcgttttttcccagggcaagcagaagagaaaatgttgtatatgtcttttacccggcacattccccttgcctaaatacaagggctggagtctgcacgggacctattagagtattttccacaatgatgatgatttcagcagggatgacgtcatcatcacattcagggctattttttcccccacaaacccaagggcaggggccactcttagctaaatccctccccgtgactgcaatagaaccctctggggagctcaggaaggggtgtgctgagttctataatataagctgccatatattttgtagacaagtatggctcctccrtatctccctcttccctaggagaggagtgtgaagcaaggagcttagataagacaccccctcaaacccattccctctccaggagacctaccctccacaggcacaggtccccagatgagaagtctgctaccctcatttctcatctttttactaaactcagaggcagtgacagcagtcagggacagacatacatttctcataccttccccacatctgagagatgacagggaaaactgcaaagctcggtgctccctttggagattttttaatccttttttwttccataagaagtcgtttttagggagaacgggaattcagacaagctgcatttcagaaatgctgtcataatggtttttaacaccttttactcttcttactggtgctattttgtagaataaggaacaacgttgacaagttttgtggggctttttatacactttttaaaatctcaaacttctatttttatgtttaacgttttcattaaaattttttttgtaactggagccacgacgtaacaaatatggggaaaaaactgtgccttgtttcaacagtttttgctaatttttaggctgaaagatgacggatgcctagagtttaccttatgtttaattaaaatcagtatttgtctataa

SEQ ID NO: 6169 - DNA, 3994 bp, Homo sapiens
atggaaccaagtcctgagcctccaagcttggaaagcatgaagggagacaccaggcatctcaatggagaggaggacgcyggcgggagggaagactcgatcctcgtcaacggggcctgcagcgacyagtcctccgactcgcccccaatcctggaggctatccgcaccccggagatcagaggccgaagatcaagctcgygactctccaagagggaggtgtccagtctgctaagctacacacaggacttgacaggcgatggcgacggggaagatggggatggctctgacaccccagtcatgccaaagctcttccgggaaaccaggactcgttcagaaagcccagctgtccgaactcgaaataacaacagtgtctccagccgggagaggcacaggccttccccacgttccacccgaggccggcagggccgcaaccatgtggacgagtcccccgtggagttcccggctaccaggtccctgagacggcgggcaacagcatcggcaggaacgccatggccgtcccctcccagctcttaccttaccatcgacctcacagacgacacagaggacacacatgggacgccccagagcagcagtaccccctacgcccgcctagcccaggacagccagcaggggggcatggagtccccgyaggtggaggcagacagtggagatggagacagttcagagtatcaggatgggaaggagtttggaataggggacctcgtgtggggaaagatcaagggcttctcctggtggcccgccatggtggtgtcttggaaggccacctccaagcgacaggctatgtctggcatgcggtgggtccagtggtttggcgatggcaagttcyccgaggtctctgcagacaaactggtggcactggggctgttcagccagcactttaatttggccaccttcaataagctcgtctcctatcgaaaagccatgtaccatgctctggagaaagctagggtgcgagctggcaagaccttccccagcagccctggagactcattggaggaccagctgaagcccatgttggagtgggcccacgggggcttcaagcccactgggatcgagggcctcaaacccaacaacacgcaaccagagaacaagactcgaagaygcacagctgacgactcagccacctctgactactgccccgcacccaagcgcctcaagacaaattgctataacaayggcaaagaccgaggggatgaagatcagagccgagaacaaatggcttcagatgttgccaacaacaagagcagcctggaagatggctgtttgtcttgtggcaggaaaaaccccgtgtccttccaccctctctttgaggggggrctctgtcagacatgccgggatcgcttccttgagctgttttacatgtatgatgaygatggctatcagtcttactgcactgtgtgctgcgagggccgagagctgctgctttgcagcaacacgagctgctgccggtgtttctgtgtggagtgcctggaggtgctggtgggcacaggcacagcggccgaggccaagcttcaggagccctggagctgytacatgtgtctcccgcagcgctgtcatggcgtcctgcggcgccggaaggactggaacgtgcgcctgcaggccttcttcaccagtgacacggggcttgaataygaagcccccaagctgtaccctgccattcccgcagcccgaaggcggcccattcgagtcctgtcattgtttgatggcatcgygacaggctacctagtcctcaaagagttgggcataaaggtaggaaagtacgtcrcttctgaagygtgtgaggagtccattgctgttggaaccgtgaagcacgaggggaatatcaaatacgtgaacgacgtgaggaacatcacaaagaaaaatattgaagaatggggcccatttgacttggtgattggcggaagcccatgcaacgatctctcaaatgtgaatccagccaggaaargccygtatgagggtacaggccggctcttcttcgaattttaccacctgctgaattactcacgccccaaggagggtgatgaccggccgttcttctggatgtttgagaatgktgtagccatgaaggttggcgacaagagggacatctcacggttcctggagtgtaatccagtgatgattgatgccatcaaagtttctgctgctcacagggcccgatacttctggggcaacctacccgggatgaacaggcccgtgatagcatcaaagaatgataaactcgagctgcaggactgcttggaatacaataggatasccaagttaaagaaagtacagacaataaccaccaagtcgaactcgatcaaacaggggaaaaaccaacttttccctgttgtcatgaatggcaaagaagatgttttgtggtgcactgagctcgaaaggatctttggctttcctgtgcrctacacagacgtgtccaacatgggccgtggtgcccgccagaagctgctgggaaggtcctggagcgtgcctgtcatccracacctcttcgcccctctgaaggactactttgcatgtgaatagttccagccaggccccaagcccactggggtgtgtggcagagccaggacccaggaggtgtgattcctgaaggcatcsccaggccctgctcttcctcagctgtgtgggtcataccgtgtacctcagttccctcttgctcagtgggggcagagccacctgactcttgcaggggtagcctgaggtgccgcctccttgtgcacaaatcagacctggctgcttggagcagcctaacacggtgctcattttttcttctcctaaaactttaaaacttgaagtaggtagcaacgtggctttttttttttcccttcctgggtctaccactcagagaaacaatggctaagataccaaaaccacagtgccgacagctctccaatactcaggttaatgctgaaaaatcatccaagacagttattgcaagagtttaatttttgaaaactggctactgctctgtgtttacagacgtgtgcagttgtaggcatgtagctacaggacatttttaagggcccaggatcgttttttcccagggcaagcagaagagaaaatgttgtatatgtcttttacccggcacattccccttgcctaaatacaagggctggagtctgcacgggacctattagagtattttccacaatgatgatgatttcagcagggatgacgtcatcatcacattcagggctattttttcccccacaaacccaagggcaggggccactcttagctaaatccctccccgtgactgcaatagaaccctctggggagctcaggaaggggtgtgctgagttctataatataagctgccatatattttgtagacaagtatggctcctccrtatctccctcttccctaggagaggagtgtgaagcaaggagcttagataagacaccccctcaaacccattccctctccaggagacctaccctccacaggcacaggtccccagatgagaagtctgctaccctcatttctcatctttttactaaactcagaggcagtgacagcagtcagggacagacatacatttctcataccttccccacatctgagagatgacagggaaaactgcaaagctcggtgctccctttggagattttttaatccttttttwttccataagaagtcgtttttagggagaacgggaattcagacaagctgcatttcagaaatgctgtcataatggtttttaacaccttttactcttcttactggtgctattttgtagaataaggaacaacgttgacaagttttgtggggctttttatacactttttaaaatctcaaacttctatttttatgtttaacgttttcattaaaattttttttgtaactggagccacgacgtaacaaatatggggaaaaaactgtgccttgtttcaacagtttttgctaatttttaggctgaaagatgacggatgcctagagtttaccttatgtttaattaaaatcagtatttgtctataa

SEQ ID NO: 6170 - DNA, 4185 bp, Homo sapiens
cagctgctcccggctccgcggccgcagcccgcgtggacgctccgagcgccccccgacggacgggaccggctccctggcggtcgggcgagcgggcggcaacgctgcccggccggcagcgctggggttaagtggcccaagtaaacctagctcggcgatcggcgccggagattcgcgagcccagcgccctgcacggccgccagccggcctcccgccagccagccccgacccgcggctccgccgcccagccgcgccccagccagccctgcggcagctcccacaggaaagcatgaagggagacaccaggcatctcaatggagaggaggacgcyggcgggagggaagactcgatcctcgtcaacggggcctgcagcgacyagtcctccgactcgcccccaatcctggaggctatccgcaccccggagatcagaggccgaagatcaagctcgygactctccaagagggaggtgtccagtctgctaagctacacacaggacttgacaggcgatggcgacggggaagatggggatggctctgacaccccagtcatgccaaagctcttccgggaaaccaggactcgttcagaaagcccagctgtccgaactcgaaataacaacagtgtctccagccgggagaggcacaggccttccccacgttccacccgaggccggcagggccgcaaccatgtggacgagtcccccgtggagttcccggctaccaggtccctgagacggcgggcaacagcatcggcaggaacgccatggccgtcccctcccagctcttaccttaccatcgacctcacagacgacacagaggacacacatgggacgccccagagcagcagtaccccctacgcccgcctagcccaggacagccagcaggggggcatggagtccccgyaggtggaggcagacagtggagatggagacagttcagagtatcaggatgggaaggagtttggaataggggacctcgtgtggggaaagatcaagggcttctcctggtggcccgccatggtggtgtcttggaaggccacctccaagcgacaggctatgtctggcatgcggtgggtccagtggtttggcgatggcaagttcyccgaggtctctgcagacaaactggtggcactggggctgttcagccagcactttaatttggccaccttcaataagctcgtctcctatcgaaaagccatgtaccatgctctggagaaagctagggtgcgagctggcaagaccttccccagcagccctggagactcattggaggaccagctgaagcccatgttggagtgggcccacgggggcttcaagcccactgggatcgagggcctcaaacccaacaacacgcaaccagtggttaataagtcgaaggtgcgtcgtgcaggcagtaggaaattagaatcaaggaaatacgagaacaagactcgaagaygcacagctgacgactcagccacctctgactactgccccgcacccaagcgcctcaagacaaattgctataacaayggcaaagaccgaggggatgaagatcagagccgagaacaaatggcttcagatgttgccaacaacaagagcagcctggaagatggctgtttgtcttgtggcaggaaaaaccccgtgtccttccaccctctctttgaggggggrctctgtcagacatgccgggatcgcttccttgagctgttttacatgtatgatgaygatggctatcagtcttactgcactgtgtgctgcgagggccgagagctgctgctttgcagcaacacgagctgctgccggtgtttctgtgtggagtgcctggaggtgctggtgggcacaggcacagcggccgaggccaagcttcaggagccctggagctgytacatgtgtctcccgcagcgctgtcatggcgtcctgcggcgccggaaggactggaacgtgcgcctgcaggccttcttcaccagtgacacggggcttgaataygaagcccccaagctgtaccctgccattcccgcagcccgaaggcggcccattcgagtcctgtcattgtttgatggcatcgygacaggctacctagtcctcaaagagttgggcataaaggtaggaaagtacgtcrcttctgaagygtgtgaggagtccattgctgttggaaccgtgaagcacgaggggaatatcaaatacgtgaacgacgtgaggaacatcacaaagaaaaatattgaagaatggggcccatttgacttggtgattggcggaagcccatgcaacgatctctcaaatgtgaatccagccaggaaargccygtatgagggtacaggccggctcttcttcgaattttaccacctgctgaattactcacgccccaaggagggtgatgaccggccgttcttctggatgtttgagaatgktgtagccatgaaggttggcgacaagagggacatctcacggttcctggagtgtaatccagtgatgattgatgccatcaaagtttctgctgctcacagggcccgatacttctggggcaacctacccgggatgaacaggcccgtgatagcatcaaagaatgataaactcgagctgcaggactgcttggaatacaataggatasccaaggatctttggctttcctgtgcrctacacagacgtgtccaacatgggccgtggtgcccgccagaagctgctgggaaggtcctggagcgtgcctgtcatccracacctcttcgcccctctgaaggactactttgcatgtgaatagttccagccaggccccaagcccactggggtgtgtggcagagccaggacccaggaggtgtgattcctgaaggcatcsccaggccctgctcttcctcagctgtgtgggtcataccgtgtacctcagttccctcttgctcagtgggggcagagccacctgactcttgcaggggtagcctgaggtgccgcctccttgtgcacaaatcagacctggctgcttggagcagcctaacacggtgctcattttttcttctcctaaaactttaaaacttgaagtaggtagcaacgtggctttttttttttcccttcctgggtctaccactcagagaaacaatggctaagataccaaaaccacagtgccgacagctctccaatactcaggttaatgctgaaaaatcatccaagacagttattgcaagagtttaatttttgaaaactggctactgctctgtgtttacagacgtgtgcagttgtaggcatgtagctacaggacatttttaagggcccaggatcgttttttcccagggcaagcagaagagaaaatgttgtatatgtcttttacccggcacattccccttgcctaaatacaagggctggagtctgcacgggacctattagagtattttccacaatgatgatgatttcagcagggatgacgtcatcatcacattcagggctattttttcccccacaaacccaagggcaggggccactcttagctaaatccctccccgtgactgcaatagaaccctctggggagctcaggaaggggtgtgctgagttctataatataagctgccatatattttgtagacaagtatggctcctccrtatctccctcttccctaggagaggagtgtgaagcaaggagcttagataagacaccccctcaaacccattccctctccaggagacctaccctccacaggcacaggtccccagatgagaagtctgctaccctcatttctcatctttttactaaactcagaggcagtgacagcagtcagggacagacatacatttctcataccttccccacatctgagagatgacagggaaaactgcaaagctcggtgctccctttggagattttttaatccttttttwttccataagaagtcgtttttagggagaacgggaattcagacaagctgcatttcagaaatgctgtcataatggtttttaacaccttttactcttcttactggtgctattttgtagaataaggaacaacgttgacaagttttgtggggctttttatacactttttaaaatctcaaacttctatttttatgtttaacgttttcattaaaattttttttgtaactggagccacgacgtaacaaatatggggaaaaaactgtgccttgtttcaacagtttttgctaatttttaggctgaaagatgacggatgcctagagtttaccttatgtttaattaaaatcagtatttgtctataa

SEQ ID NO: 6171 - DNA, 4055 bp, Homo sapiens
cagctgctcccggctccgcggccgcagcccgcgtggacgctccgagcgccccccgacggacgggaccggctccctggcggtcgggcgagcgggcggcaacgctgcccggccggcagcgctggggttaagtggcccaagtaaacctagctcggcgatcggcgccggagattcgcgagcccagcgccctgcacggccgccagccggcctcccgccagccagccccgacccgcggctccgccgcccagccgcgccccagccagccctgcggcagctcccacaggaaagcatgaagggagacaccaggcatctcaatggagaggaggacgcyggcgggagggaagactcgatcctcgtcaacggggcctgcagcgacyagtcctccgactcgcccccaatcctggaggctatccgcaccccggagatcagaggccgaagatcaagctcgygactctccaagagggaggtgtccagtctgctaagctacacacaggacttgacaggcgatggcgacggggaagatggggatggctctgacaccccagtcatgccaaagctcttccgggaaaccaggactcgttcagaaagcccagctgtccgaactcgaaataacaacagtgtctccagccgggagaggcacaggccttccccacgttccacccgaggccggcagggccgcaaccatgtggacgagtcccccgtggagttcccggctaccaggtccctgagacggcgggcaacagcatcggcaggaacgccatggccgtcccctcccagctcttaccttaccatcgacctcacagacgacacagaggacacacatgggacgccccagagcagcagtaccccctacgcccgcctagcccaggacagccagcaggggggcatggagtccccgyaggtggaggcagacagtggagatggagacagttcagagtatcaggatgggaaggagtttggaataggggacctcgtgtggggaaagatcaagggcttctcctggtggcccgccatggtggtgtcttggaaggccacctccaagcgacaggctatgtctggcatgcggtgggtccagtggtttggcgatggcaagttcyccgaggtctctgcagacaaactggtggcactggggctgttcagccagcactttaatttggccaccttcaataagctcgtctcctatcgaaaagccatgtaccatgctctggagaaagctagggtgcgagctggcaagaccttccccagcagccctggagactcattggaggaccagctgaagcccatgttggagtgggcccacgggggcttcaagcccactgggatcgagggcctcaaacccaacaacacgcaaccagagaacaagactcgaagaygcacagctgacgactcagccacctctgactactgccccgcacccaagcgcctcaagacaaattgctataacaayggcaaagaccgaggggatgaagatcagagccgagaacaaatggcttcagatgttgccaacaacaagagcagcctggaagatggctgtttgtcttgtggcaggaaaaaccccgtgtccttccaccctctctttgaggggggrctctgtcagacatgccgggatcgcttccttgagctgttttacatgtatgatgaygatggctatcagtcttactgcactgtgtgctgcgagggccgagagctgctgctttgcagcaacacgagctgctgccggtgtttctgtgtggagtgcctggaggtgctggtgggcacaggcacagcggccgaggccaagcttcaggagccctggagctgytacatgtgtctcccgcagcgctgtcatggcgtcctgcggcgccggaaggactggaacgtgcgcctgcaggccttcttcaccagtgacacggggcttgaataygaagcccccaagctgtaccctgccattcccgcagcccgaaggcggcccattcgagtcctgtcattgtttgatggcatcgygacaggctacctagtcctcaaagagttgggcataaaggtaggaaagtacgtcrcttctgaagygtgtgaggagtccattgctgttggaaccgtgaagcacgaggggaatatcaaatacgtgaacgacgtgaggaacatcacaaagaaaaatattgaagaatggggcccatttgacttggtgattggcggaagcccatgcaacgatctctcaaatgtgaatccagccaggaaargccygtatgagggtacaggccggctcttcttcgaattttaccacctgctgaattactcacgccccaaggagggtgatgaccggccgttcttctggatgtttgagaatgktgtagccatgaaggttggcgacaagagggacatctcacggttcctggagtgtaatccagtgatgattgatgccatcaaagtttctgctgctcacagggcccgatacttctggggcaacctacccgggatgaacaggatctttggctttcctgtgcrctacacagacgtgtccaacatgggccgtggtgcccgccagaagctgctgggaaggtcctggagcgtgcctgtcatccracacctcttcgcccctctgaaggactactttgcatgtgaatagttccagccaggccccaagcccactggggtgtgtggcagagccaggacccaggaggtgtgattcctgaaggcatcsccaggccctgctcttcctcagctgtgtgggtcataccgtgtacctcagttccctcttgctcagtgggggcagagccacctgactcttgcaggggtagcctgaggtgccgcctccttgtgcacaaatcagacctggctgcttggagcagcctaacacggtgctcattttttcttctcctaaaactttaaaacttgaagtaggtagcaacgtggctttttttttttcccttcctgggtctaccactcagagaaacaatggctaagataccaaaaccacagtgccgacagctctccaatactcaggttaatgctgaaaaatcatccaagacagttattgcaagagtttaatttttgaaaactggctactgctctgtgtttacagacgtgtgcagttgtaggcatgtagctacaggacatttttaagggcccaggatcgttttttcccagggcaagcagaagagaaaatgttgtatatgtcttttacccggcacattccccttgcctaaatacaagggctggagtctgcacgggacctattagagtattttccacaatgatgatgatttcagcagggatgacgtcatcatcacattcagggctattttttcccccacaaacccaagggcaggggccactcttagctaaatccctccccgtgactgcaatagaaccctctggggagctcaggaaggggtgtgctgagttctataatataagctgccatatattttgtagacaagtatggctcctccrtatctccctcttccctaggagaggagtgtgaagcaaggagcttagataagacaccccctcaaacccattccctctccaggagacctaccctccacaggcacaggtccccagatgagaagtctgctaccctcatttctcatctttttactaaactcagaggcagtgacagcagtcagggacagacatacatttctcataccttccccacatctgagagatgacagggaaaactgcaaagctcggtgctccctttggagattttttaatccttttttwttccataagaagtcgtttttagggagaacgggaattcagacaagctgcatttcagaaatgctgtcataatggtttttaacaccttttactcttcttactggtgctattttgtagaataaggaacaacgttgacaagttttgtggggctttttatacactttttaaaatctcaaacttctatttttatgtttaacgttttcattaaaattttttttgtaactggagccacgacgtaacaaatatggggaaaaaactgtgccttgtttcaacagtttttgctaatttttaggctgaaagatgacggatgcctagagtttaccttatgtttaattaaaatcagtatttgtctataa

SEQ ID NO: 6172 - DNA, 4277 bp, Homo sapiens
cggccgcagcccgcgtggacgctccgagcgccccccgacggacgggaccggctccctggcggtcgggcgagcgggcggcaacgctgcccggccggcagcgctggggttaagtggcccaagtaaacctagctcggcgatcggcgccggagattcgcgagcccagcgccctgcacggccgccagccggcctcccgccagccagccccgacccgcggctccgccgcccagccgcgccccagccagccctgcggcaggaaagcatgaagggagacaccaggcatctcaatggagaggaggacgcyggcgggagggaagactcgatcctcgtcaacggggcctgcagcgacyagtcctccgactcgcccccaatcctggaggctatccgcaccccggagatcagaggccgaagatcaagctcgygactctccaagagggaggtgtccagtctgctaagctacacacaggacttgacaggcgatggcgacggggaagatggggatggctctgacaccccagtcatgccaaagctcttccgggaaaccaggactcgttcagaaagcccagctgtccgaactcgaaataacaacagtgtctccagccgggagaggcacaggccttccccacgttccacccgaggccggcagggccgcaaccatgtggacgagtcccccgtggagttcccggctaccaggtccctgagacggcgggcaacagcatcggcaggaacgccatggccgtcccctcccagctcttaccttaccatcgacctcacagacgacacagaggacacacatgggacgccccagagcagcagtaccccctacgcccgcctagcccaggacagccagcaggggggcatggagtccccgyaggtggaggcagacagtggagatggagacagttcagagtatcaggatgggaaggagtttggaataggggacctcgtgtggggaaagatcaagggcttctcctggtggcccgccatggtggtgtcttggaaggccacctccaagcgacaggctatgtctggcatgcggtgggtccagtggtttggcgatggcaagttcyccgaggtctctgcagacaaactggtggcactggggctgttcagccagcactttaatttggccaccttcaataagctcgtctcctatcgaaaagccatgtaccatgctctggagaaagctagggtgcgagctggcaagaccttccccagcagccctggagactcattggaggaccagctgaagcccatgttggagtgggcccacgggggcttcaagcccactgggatcgagggcctcaaacccaacaacacgcaaccagtggttaataagtcgaaggtgcgtcgtgcaggcagtaggaaattagaatcaaggaaatacgagaacaagactcgaagaygcacagctgacgactcagccacctctgactactgccccgcacccaagcgcctcaagacaaattgctataacaayggcaaagaccgaggggatgaagatcagagccgagaacaaatggcttcagatgttgccaacaacaagagcagcctggaagatggctgtttgtcttgtggcaggaaaaaccccgtgtccttccaccctctctttgaggggggrctctgtcagacatgccgggatcgcttccttgagctgttttacatgtatgatgaygatggctatcagtcttactgcactgtgtgctgcgagggccgagagctgctgctttgcagcaacacgagctgctgccggtgtttctgtgtggagtgcctggaggtgctggtgggcacaggcacagcggccgaggccaagcttcaggagccctggagctgytacatgtgtctcccgcagcgctgtcatggcgtcctgcggcgccggaaggactggaacgtgcgcctgcaggccttcttcaccagtgacacggggcttgaataygaagcccccaagctgtaccctgccattcccgcagcccgaaggcggcccattcgagtcctgtcattgtttgatggcatcgygacaggctacctagtcctcaaagagttgggcataaaggtaggaaagtacgtcrcttctgaagygtgtgaggagtccattgctgttggaaccgtgaagcacgaggggaatatcaaatacgtgaacgacgtgaggaacatcacaaagaaaaatattgaagaatggggcccatttgacttggtgattggcggaagcccatgcaacgatctctcaaatgtgaatccagccaggaaargccygtatgagggtacaggccggctcttcttcgaattttaccacctgctgaattactcacgccccaaggagggtgatgaccggccgttcttctggatgtttgagaatgktgtagccatgaaggttggcgacaagagggacatctcacggttcctggagtgtaatccagtgatgattgatgccatcaaagtttctgctgctcacagggcccgatacttctggggcaacctacccgggatgaacaggcccgtgatagcatcaaagaatgataaactcgagctgcaggactgcttggaatacaataggatasccaagttaaagaaagtacagacaataaccaccaagtcgaactcgatcaaacaggggaaaaaccaacttttccctgttgtcatgaatggcaaagaagatgttttgtggtgcactgagctcgaaaggatctttggctttcctgtgcrctacacagacgtgtccaacatgggccgtggtgcccgccagaagctgctgggaaggtcctggagcgtgcctgtcatccracacctcttcgcccctctgaaggactactttgcatgtgaatagttccagccaggccccaagcccactggggtgtgtggcagagccaggacccaggaggtgtgattcctgaaggcatcsccaggccctgctcttcctcagctgtgtgggtcataccgtgtacctcagttccctcttgctcagtgggggcagagccacctgactcttgcaggggtagcctgaggtgccgcctccttgtgcacaaatcagacctggctgcttggagcagcctaacacggtgctcattttttcttctcctaaaactttaaaacttgaagtaggtagcaacgtggctttttttttttcccttcctgggtctaccactcagagaaacaatggctaagataccaaaaccacagtgccgacagctctccaatactcaggttaatgctgaaaaatcatccaagacagttattgcaagagtttaatttttgaaaactggctactgctctgtgtttacagacgtgtgcagttgtaggcatgtagctacaggacatttttaagggcccaggatcgttttttcccagggcaagcagaagagaaaatgttgtatatgtcttttacccggcacattccccttgcctaaatacaagggctggagtctgcacgggacctattagagtattttccacaatgatgatgatttcagcagggatgacgtcatcatcacattcagggctattttttcccccacaaacccaagggcaggggccactcttagctaaatccctccccgtgactgcaatagaaccctctggggagctcaggaaggggtgtgctgagttctataatataagctgccatatattttgtagacaagtatggctcctccrtatctccctcttccctaggagaggagtgtgaagcaaggagcttagataagacaccccctcaaacccattccctctccaggagacctaccctccacaggcacaggtccccagatgagaagtctgctaccctcatttctcatctttttactaaactcagaggcagtgacagcagtcagggacagacatacatttctcataccttccccacatctgagagatgacagggaaaactgcaaagctcggtgctccctttggagattttttaatccttttttwttccataagaagtcgtttttagggagaacgggaattcagacaagctgcatttcagaaatgctgtcataatggtttttaacaccttttactcttcttactggtgctattttgtagaataaggaacaacgttgacaagttttgtggggctttttatacactttttaaaatctcaaacttctatttttatgtttaacgttttcattaaaattttttttgtaactggagccacgacgtaacaaatatggggaaaaaactgtgccttgtttcaacagtttttgctaatttttaggctgaaagatgacggatgcctagagtttaccttatgtttaattaaaatcagtatttgtctataa

SEQ ID NO: 6173 - DNA, 2833 bp, Homo sapiens
caaccgcgtcccggtagctcccggaataggagcgttgcgagacggtcggttccaagtgggcctgggcgcgggggagaggcgggtctgtcctcgggaactgcaaggccctgtgagcgggaggactgggatcccggccgcggctgctggaagcgtcgaagctcagcggggccgcgsacactgacctgtgcttagaactcatcctggcccgcagagcctgccgcgagtccctggcgtcccctgtggcgggctcttggagccactttcccgagcggaastcagcccgcggctcggactccggcgggacctgctcggaggaatggcgccgccgggttcaagcactgtcttcctgttggccctgacaatcatagccagcacctgggctctgacgcccactcactacctcaccaagcatgacrtggagagactaaaagcctcgctggatcgccctttcacaaatttggaatctgccttctactccatcgtgggactcagcagccttggtgctcaggtgccagatgcaaagaaagcatgtacctacatcagatctaaccttgatcccagcaatgtggattccctcttctacgctgcccaggccagccaggccctctcaggatgtgagatctctatttcaaatgagaccaaagatctgcttctggcagctgtcagtgaggactcatctgttacccagatctaccatgcagttgcagctctaagtggctttggccttcccttggcatcccaagaagcactcagtgcccttactgctcgtctcagcaaggaggagactgtgctggcgagggtgtggagcaccgttctggaatcccgttcgttgtttagcaagagaacagtccaggctctgcagacagcatcccacctgtcccagcaggctgacctgaggagcatcgtggaggagattgaggaccttgttgctcgcctggatgaactcgggggcgtgtatctccagtttgaagaaggactggaaacaacagcgttatttgtggctgccacctacaagctcatggatcatgtggggactgagccatccattaaggaggatcaggtcatccagctgatgaacgcgatcttcagcaagaagaactttgagtccctctccgaagccttcagcgtggcctctgcagctgctgtgctctcgcataatcgctaccacgtgccagttgtggttgtgcctgagggctctgcttccracactcatgaacaggctatcttgcggttgcaagtcaccaatgttctgtctcagcctctgactcaggccactgttaaactagaacatgctaaatctgttgcttccagagccactgtcctccagaagacatccttcacccctgtagggtaaaactaaatttcatgaacgtcaaattttccagtggttattatgacttccttgtcgaagttgaaggtgacaaccggtatattgcaaataccgtagagctcagagtcaagatctccactgaagttggcatcacaaatgttgatctttccaccgtggataaggatcagagcattgcacccaaaactacccgggtgacatacccagccaaagccaagggcacattcatcgcagacagccaccagaacttcgccttgttcttccagctggtagatgtgaacactggtgctgaactcactcctcaccagacatttgtccgactccataaccagaagactggccaggaagtggtgtttgttgccgagccagacaacaagaacgtgtacaagtttgaactggatacctctgaaagaaagattgaatttgactctgcctctggcacctacactctctacttaatcattggagatgccactttgaagaacccaatcctctggaatgtggctgatktggtcatcaagttccctgaggaagaagctccctcgactgtcttgtcccagaaccttttcactccaaaacaggaaattcagcacctgttccgcgagcctgagaagaggccccccaccgtggtgtccaatacattcactgccctgatcctctcgccgttgcttctgctcttcgctctgtggatccggattggtgccaatgtctccaacttcacttttgctcctagcacgattatatttcacctgggacatgctgctatgctgggactcatgtatgtctactggactcagytcaacatgttccagaccttgaagtacctggccatcytgggcagtgtgacgtttctggctggcaatcggatgctggcccagcaggcagtcaagaggatcgctgcagagcagagcagtagattggcaaaatataggacactacgaacagcacattagttccagaagaaagatggaaattctgaaaactgaatgtcaagaaaaggagtcaagaacaattcacagtatgagaagaaaaatggaaaaaaaaaactttatttaaaaaagaaaaaagtccagattgtagttatacttttgcttgtttttcagtttccccaacacacagcagatmcctggtgagctcagatagtctctttctctgacactgtgtaagaagctgtgaatattcctaacttacccagatgttgcttttgaaaagttgaaatgtgtaattgttttggaataaagagggtaacaataggaacaaaggcctgattgagagcttattctcatacttttgggtggtggggtccttgggtatatgacatgaggacttagttggaaatgctgttgatgccagcatatttctccaggcctttcttggtccttcttgccccttgctcctaacagaactgagaactgcctggaaaggccagcttccttttttcttctccagcagtgagcaccagctgtctgcataggagccctgttg

SEQ ID NO: 6174 - DNA, 2476 bp, Homo sapiens
gtttccccccaaggttcaagcactgtcttcctgttggccctgacaatcatagccagcacctgggctctgacgcccactcactacctcaccaagcatgacrtggagagactaaaagcctcgctggatcgccctttcacaaatttggaatctgccttctactccatcgtgggactcagcagccttggtgctcaggtgccagatgcaaagaaagcatgtacctacatcagatctaaccttgatcccagcaatgtggattccctcttctacgctgcccaggccagccaggccctctcaggatgtgagatctctatttcaaatgagaccaaagatctgcttctggcagctgtcagtgaggactcatctgttacccagatctaccatgcagttgcagctctaagtggctttggccttcccttggcatcccaagaagcactcagtgcccttactgctcgtctcagcaaggaggagactgtgctggcaacagtccaggctctgcagacagcatcccacctgtcccagcaggctgacctgaggagcatcgtggaggagattgaggaccttgttgctcgcctggatgaactcgggggcgtgtatctccagtttgaagaaggactggaaacaacagcgttatttgtggctgccacctacaagctcatggatcatgtggggactgagccatccattaaggaggatcaggtcatccagctgatgaacgcgatcttcagcaagaagaactttgagtccctctccgaagccttcagcgtggcctctgcagctgctgtgctctcgcataatcgctaccacgtgccagttgtggttgtgcctgagggctctgcttccracactcatgaacaggctatcttgcggttgcaagtcaccaatgttctgtctcagcctctgactcaggccactgttaaactagaacatgctaaatctgttgcttccagagccactgtcctccagaagacatccttcacccctgtaggggatgtttttgaactaaatttcatgaacgtcaaattttccagtggttattatgacttccttgtcgaagttgaaggtgacaaccggtatattgcaaataccgtagagctcagagtcaagatctccactgaagttggcatcacaaatgttgatctttccaccgtggataaggatcagagcattgcacccaaaactacccgggtgacatacccagccaaagccaagggcacattcatcgcagacagccaccagaacttcgccttgttcttccagctggtagatgtgaacactggtgctgaactcactcctcaccagacatttgtccgactccataaccagaagactggccaggaagtggtgtttgttgccgagccagacaacaagaacgtgtacaagtttgaactggatacctctgaaagaaagattgaatttgactctgcctctggcacctacactctctacttaatcattggagatgccactttgaagaacccaatcctctggaatgtggctgatktggtcatcaagttccctgaggaagaagctccctcgactgtcttgtcccagaaccttttcactccaaaacaggaaattcagcacctgttccgcgagcctgagaagaggccccccaccgtggtgtccaatacattcactgccctgatcctctcgccgttgcttctgctcttcgctctgtggatccggattggtgccaatgtctccaacttcacttttgctcctagcacgattatatttcacctgggacatgctgctatgctgggactcatgtatgtctactggactcagytcaacatgttccagaccttgaagtacctggccatcytgggcagtgtgacgtttctggctggcaatcggatgctggcccagcaggcagtcaagaggatcgctgcagagcagagcagtagattggcaaaatataggacactacgaacagcacattagttccagaagaaagatggaaattctgaaaactgaatgtcaagaaaaggagtcaagaacaattcacagtatgagaagaaaaatggaaaaaaaaaactttatttaaaaaagaaaaaagtccagattgtagttatacttttgcttgtttttcagtttccccaacacacagcagatmcctggtgagctcagatagtctctttctctgacactgtgtaagaagctgtgaatattcctaacttacccagatgttgcttttgaaaagttgaaatgtgtaattgttttggaataaagagggtaacaataggaacaaaggcctgattgagagcttattctcatacttttgggtggtggggtccttgggtatatgacatgaggacttagttggaaatgctgttgatgccagcatatttctccaggcctttcttggtccttcttgccccttgctcctaacagaactgagaactgcctggaaaggccagcttccttttttcttctccagcagtgagcaccagctgtctgcataggagccctgttg

SEQ ID NO: 6175 - DNA, 2744 bp, Homo sapiens
caaccgcgtcccggtagctcccggaataggagcgttgcgagacggtcggttccaagtgggcctgggcgcgggggagaggcgggtctgtcctcgggaactgcaaggccctgtgagcgggaggactgggatcccggccgcggctgctggaagcgtcgaagctcagcggggccgcgsacactgacctgtgcttagaactcatcctggcccgcagagcctgccgcgagtccctggcgtcccctgtggcgggctcttggagccactttcccgagcggaastcagcccgcggctcggactccggcgggacctgctcggaggaatggcgccgccgggttcaagcactgtcttcctgttggccctgacaatcatagccagcacctgggctctgacgcccactcactacctcaccaagcatgacrtggagagactaaaagcctcgctggatcgccctttcacaaatttggaatctgccttctactccatcgtgggactcagcagccttggtgctcaggtgccagatgcaaagaaagcatgtacctacatcagatctaaccttgatcccagcaatgtggattccctcttctacgctgcccaggccagccaggccctctcaggatgtgagatctctatttcaaatgagaccaaagatctgcttctggcagctgtcagtgaggactcatctgttacccagatctaccatgcagttgcagctctaagtggctttggccttcccttggcatcccaagaagcactcagtgcccttactgctcgtctcagcaaggaggagactgtgctggcaacagtccaggctctgcagacagcatcccacctgtcccagcaggctgacctgaggagcatcgtggaggagattgaggaccttgttgctcgcctggatgaactcgggggcgtgtatctccagtttgaagaaggactggaaacaacagcgttatttgtggctgccacctacaagctcatggatcatgtggggactgagccatccattaaggaggatcaggtcatccagctgatgaacgcgatcttcagcaagaagaactttgagtccctctccgaagccttcagcgtggcctctgcagctgctgtgctctcgcataatcgctaccacgtgccagttgtggttgtgcctgagggctctgcttccracactcatgaacaggctatcttgcggttgcaagtcaccaatgttctgtctcagcctctgactcaggccactgttaaactagaacatgctaaatctgttgcttccagagccactgtcctccagaagacatccttcacccctgtaggggatgtttttgaactaaatttcatgaacgtcaaattttccagtggttattatgacttccttgtcgaagttgaaggtgacaaccggtatattgcaaataccgtagagctcagagtcaagatctccactgaagttggcatcacaaatgttgatctttccaccgtggataaggatcagagcattgcacccaaaactacccgggtgacatacccagccaaagccaagggcacattcatcgcagacagccaccagaacttcgccttgttcttccagctggtagatgtgaacactggtgctgaactcactcctcaccagacatttgtccgactccataaccagaagactggccaggaagtggtgtttgttgccgagccagacaacaagaacgtgtacaagtttgaactggatacctctgaaagaaagattgaatttgactctgcctctggcacctacactctctacttaatcattggagatgccactttgaagaacccaatcctctggaatgtggctgatktggtcatcaagttccctgaggaagaagctccctcgactgtcttgtcccagaaccttttcactccaaaacaggaaattcagcacctgttccgcgagcctgagaagaggccccccaccgtggtgtccaatacattcactgccctgatcctctcgccgttgcttctgctcttcgctctgtggatccggattggtgccaatgtctccaacttcacttttgctcctagcacgattatatttcacctgggacatgctgctatgctgggactcatgtatgtctactggactcagytcaacatgttccagaccttgaagtacctggccatcytgggcagtgtgacgtttctggctggcaatcggatgctggcccagcaggcagtcaagagaacagcacattagttccagaagaaagatggaaattctgaaaactgaatgtcaagaaaaggagtcaagaacaattcacagtatgagaagaaaaatggaaaaaaaaaactttatttaaaaaagaaaaaagtccagattgtagttatacttttgcttgtttttcagtttccccaacacacagcagatmcctggtgagctcagatagtctctttctctgacactgtgtaagaagctgtgaatattcctaacttacccagatgttgcttttgaaaagttgaaatgtgtaattgttttggaataaagagggtaacaataggaacaaaggcctgattgagagcttattctcatacttttgggtggtggggtccttgggtatatgacatgaggacttagttggaaatgctgttgatgccagcatatttctccaggcctttcttggtccttcttgccccttgctcctaacagaactgagaactgcctggaaaggccagcttccttttttcttctccagcagtgagcaccagctgtctgcataggagccctgttg

SEQ ID NO: 6176 - DNA, 2289 bp, Homo sapiens
tgttcctggatgagccacctccatgttgagcctgtaaaactggcctaatatgttctctatgagtcactgcattgctctgcaaatcagataaaacgtcactcgtaggttcaagcactgtcttcctgttggccctgacaatcatagccagcacctgggctctgacgcccactcactacctcaccaagcatgacrtggagagactaaaagcctcgctggatcgccctttcacaaatttggaatctgccttctactccatcgtgggactcagcagccttggtgctcaggtgccagatgcaaagaacagtccaggctctgcagacagcatcccacctgtcccagcaggctgacctgaggagcatcgtggaggagattgaggaccttgttgctcgcctggatgaactcgggggcgtgtatctccagtttgaagaaggactggaaacaacagcgttatttgtggctgccacctacaagctcatggatcatgtggggactgagccatccattaaggaggatcaggtcatccagctgatgaacgcgatcttcagcaagaagaactttgagtccctctccgaagccttcagcgtggcctctgcagctgctgtgctctcgcataatcgctaccacgtgccagttgtggttgtgcctgagggctctgcttccracactcatgaacaggctatcttgcggttgcaagtcaccaatgttctgtctcagcctctgactcaggccactgttaaactagaacatgctaaatctgttgcttccagagccactgtcctccagaagacatccttcacccctgtagggtaaaactaaatttcatgaacgtcaaattttccagtggttattatgacttccttgtcgaagttgaaggtgacaaccggtatattgcaaataccgtagagctcagagtcaagatctccactgaagttggcatcacaaatgttgatctttccaccgtggataaggatcagagcattgcacccaaaactacccgggtgacatacccagccaaagccaagggcacattcatcgcagacagccaccagaacttcgccttgttcttccagctggtagatgtgaacactggtgctgaactcactcctcaccagacatttgtccgactccataaccagaagactggccaggaagtggtgtttgttgccgagccagacaacaagaacgtgtacaagtttgaactggatacctctgaaagaaagattgaatttgactctgcctctggcacctacactctctacttaatcattggagatgccactttgaagaacccaatcctctggaatgtggctgatktggtcatcaagttccctgaggaagaagctccctcgactgtcttgtcccagaaccttttcactccaaaacaggaaattcagcacctgttccgcgagcctgagaagaggccccccaccgtggtgtccaatacattcactgccctgatcctctcgccgttgcttctgctcttcgctctgtggatccggattggtgccaatgtctccaacttcacttttgctcctagcacgattatatttcacctgggacatgctgctatgctgggactcatgtatgtctactggactcagytcaacatgttccagaccttgaagtacctggccatcytgggcagtgtgacgtttctggctggcaatcggatgctggcccagcaggcagtcaagaggatcgctgcagagcagagcagtagattggcaaaatataggacactacgaacagcacattagttccagaagaaagatggaaattctgaaaactgaatgtcaagaaaaggagtcaagaacaattcacagtatgagaagaaaaatggaaaaaaaaaactttatttaaaaaagaaaaaagtccagattgtagttatacttttgcttgtttttcagtttccccaacacacagcagatmcctggtgagctcagatagtctctttctctgacactgtgtaagaagctgtgaatattcctaacttacccagatgttgcttttgaaaagttgaaatgtgtaattgttttggaataaagagggtaacaataggaacaaaggcctgattgagagcttattctcatacttttgggtggtggggtccttgggtatatgacatgaggacttagttggaaatgctgttgatgccagcatatttctccaggcctttcttggtccttcttgccccttgctcctaacagaactgagaactgcctggaaaggccagcttccttttttcttctccagcagtgagcaccagctgtctgcataggagccctgttg

SEQ ID NO: 6177 - DNA, 3882 bp, Homo sapiens
tggtcgcacttggagggtctcgccgccagtggaaggagccaccgcccccgcccgaccatggccgaggagctggtcttagagaggtgtgatctggagctggagaccaatggccgagaccaccacacggccgacctgtgccgggagaagctggtggtgcgacggggccagcccttctggctgaccctgcactttgagggccgcaactacgaggccagtgtagacagtctcaccttcagtgtcgtgaccggcccagcccctagccaggaggccgggaccaaggcccgttttcyactaagagatgctgtggaggagggtgactggacagccaccgtggtggaccagcaagactgcaccctctcgctgcagctcaccaccccggccaacgcccccatcggcctgtatcgcctcagcctggaggcctccactggctaccagggatccagctttgtgctgggccacttcattttgctcttcaacgcctggtgcccagcggatgctgtgtacctggactcggaagaggagcggcaggagtatgtcctcacccagcagggctttatctaccagggctcggccaagttcatcaagaacataccttggaattttgggcagtttgaagatgggatcctagacatctgcctgatccttctagatgtcaaccccaagttcctgaagaacgccggccgtgactgctcccgccgcagcagccccgtctacgtgggccgggtggtgagtggcatggtcaactgcaacgatgaccagggtgtgctgctgggacgctgggacaacaactacggggacggcgtcagccccatgtcctggatcggcagcgtggacatcctgcggcgctggaagaaccacggctgccagcgcgtcaagtatggccagtgctgggtcttcgcygccgtggcctgcacagtgctgaggtgcctrggcatccctacccgcgtcgtgaccaactacaactcggcccatgaccagaacagcaaccttctcatcgagtacttccgcaatgagtttggggagatccagggtgayaagagcgagatgatctggaacttccactgctgggtggagtcgtggatgaccaggccggacctgcagccggggtacgagggctggcaggccctggacccaacgccccaggagaagagcgaagggacgtactgctgtggcccagttccagttcgtgccatcaaggagggcgacctgagcaccaagtacgatgcgccctttgtctttgcggaggtcaatgccgacgtggtagactggatccagcaggacgatgggtctgtgcacaaatccatmaaccgttccctgatcgttgggctgaagatcagcactaagagcgtgggccgagacgagcgggaggatatcacccacacctacaaatacccagaggggtcctcagaggagagggaggccttcacaagggcgaaccacctgaacaaactggccgagaaggaggagacagggatggccatgcggatccgtgtgggccagagcatgaacatgggcagtgactttgacgtctttgcccacatcaccaacaacaccgctgaggagtacgtctgccgcctcctgctctgtgcccgcaccgtcagctacaatgggatcttggggcccgagtgtggcaccaagtacctgctcaacctcaacctggagcctttctctgagaagagcgttcctctttgcatcctctatgagaaataccgtgactgccttacggagtccaacctcatcaaggtgcgggccctcctcgtggagccagttatcaacagctacctgctggctgagagggacctctacctggagaatccagaaatcaagatccggatccttggggagcccaagcagaaacgcaagctggtggctgaggtgtccctgcagaacccgctccctgtggccctggaaggctgcaccttcactgtggagggggccggcctractgaggagcagaagacggtggagatcccagacccygtggaggcaggggaggaagttaaggtgagaatggacctgctgccgctccacatgggcctccacaagctggtggtgaacttcgagagcgacaagctgaaggctgtgaagggcttccggaatgtcatcattggccccgcctaagggacccctgctcccagcctgctgagagcccccaccttgatcccaatccttatcccaagctagtgagcaaaatatgccccttmttgggccccagaccccagggcagggtgggcagcctatgggggctctcggaaatggaatgtgcccctggcccatctcagcctcctgagcctgtgggtccccactcaccccctttgctgtgaggaatgctctgtgccagaaacagtgggagccctgaccttggctgactggggctggggtgagagaggaaagacctacattccctctcctgcccagatgccctttggaaagccattgaccacccaccatattgtttgatctacttcatagctccttggagcaggcaaaaaagggacagcatgccccttggctggatcagggaatccagctccctagactgcatcccgtacctcttcccatgactgcacccagctccaggggcccttgggacagccagagctgggtggggacagtgataggcccaaggtcccctccacatcccagcagcccaagcttaatagccctccccctcaacctcaccattgtgaagcacctactatgtgctgggtgcctcccacacttgctggggctcacggggcctccaacccatttaatcaccatgggaaactgttgtgggcgctgcttccaggataaggagactgaggcttagagagaggaggcagccccctccacaccagtggcctcgtggttatwagcaaggctgggtaatgtgaaggcccaagagcagagtctgggcctctgactctgagtccactgctccatttataaccccagcctgacctgagactgtcggagaggctgtctggggcctttatcaaaaaaagactcagccaagacaaggagktagagagkggactgggggactgggagtcagagccctggctgggttcaggtcccacgtctggccaggcactgccttctcctctctgggcctttgtttccttgttggtcagaggagtgattgaaccagctcatctccaaggatcctctccactccatgtttgcaatgcttttatatggcccagccttgtaaataaccacaaggtccactccctgctccacgaagccttaagccataggcccaggatatttctgagagtgaaaccatgactgtgaccaccttctgtccccagccctgtcctggttccttcctatgcccaggtaccacccttcagaccccagttctaggggagaagagccctggacacccctgctctacccatgagcctgcccgctgcaatgcctagacttcccaacagccttagctgccagtgctggtcactaaccaacaaggttggcaccccagctaccccttctttgcagggctaaggcccccaaacatagcccctgccccggaggaagcttggggaacccatgagttgtcagctttgactttatctcctgctctttctacatgactgggcctcccttgggctggaagaattggggattctctattggaggtgagatcacagcctcyagggccccccaaatcccagggaaggacttggagagaatcatgctgttgcatttagaactttctgctttgcacaggaaagagtcacacaattaatcaacatgtatattttctctatacatagagctctatttctctacggttttataaaagccttgggttccaaccaggcagtagatgtgcttytgaaccgcaaggagcaaacactgaaataaaatagtttatttttcacactcaaacta

SEQ ID NO: 6178 - DNA, 3505 bp, Homo sapiens
ggatccggaagcacaggagaccaagagaccagagataccaggatgagagataggacccctggttgccaggttcgagaagtcctaggctgagtccctggaaatggtcgcacttggagggtctcgccgccagtggaaggagccaccgcccccgcccgaccatggccgaggagctggtcttagagaggtgtgatctggagctggagaccaatggccgagaccaccacacggccgacctgtgccgggagaagctggtggtgcgacggggccagcccttctggctgaccctgcactttgagggccgcaactacgaggccagtgtagacagtctcaccttcagtgtcgtgaccggcccagcccctagccaggaggccgggaccaaggcccgttttcyactaagagatgctgtggaggagggtgactggacagccaccgtggtggaccagcaagactgcaccctctcgctgcagctcaccaccccggccaacgcccccatcggcctgtatcgcctcagcctggaggcctccactggctaccagggatccagctttgtgctgggccacttcattttgctcttcaacgcctggtgcccagcggatgctgtgtacctggactcggaagaggagcggcaggagtatgtcctcacccagcagggctttatctaccagggctcggccaagttcatcaagaacataccttggaattttgggcagtttgaagatgggatcctagacatctgcctgatccttctagatgtcaaccccaagttcctgaagaacgccggccgtgactgctcccgccgcagcagccccgtctacgtgggccgggtggtgagtggcatggtcaactgcaacgatgaccagggtgtgctgctgggacgctgggacaacaactacggggacggcgtcagccccatgtcctggatcggcagcgtggacatcctgcggcgctggaagaaccacggctgccagcgcgtcaagtatggccagtgctgggtcttcgcygccgtggcctgcacagtgctgaggtgcctrggcatccctacccgcgtcgtgaccaactacaactcggcccatgaccagaacagcaaccttctcatcgagtacttccgcaatgagtttggggagatccagggtgayaagagcgagatgatctggaacttccactgctgggtggagtcgtggatgaccaggccggacctgcagccggggtacgagggctggcaggccctggacccaacgccccaggagaagagcgaagggacgtactgctgtggcccagttccagttcgtgccatcaaggagggcgacctgagcaccaagtacgatgcgccctttgtctttgcggaggtcaatgccgacgtggtagactggatccagcaggacgatgggtctgtgcacaaatccatmaaccgttccctgatcgttgggctgaagatcagcactaagagcgtgggccgagacgagcgggaggatatcacccacacctacaaatacccagaggggtcctcagaggagagggaggccttcacaagggcgaaccacctgaacaaactggccgagaaggaggagacagggatggccatgcggatccgtgtgggccagagcatgaacatgggcagtgactttgacgtctttgcccacatcaccaacaacaccgctgaggagtacgtctgccgcctcctgctctgtgcccgcaccgtcagctacaatgggatcttggggcccgagtgtggcaccaagtacctgctcaacctcaacctggagcctttctctgagaagagcgttcctctttgcatcctctatgagaaataccgtgactgccttacggagtccaacctcatcaaggtgcgggccctcctcgtggagccagttatcaacagctacctgctggctgagagggacctctacctggagaatccagaaatcaagatccggatccttggggagcccaagcagaaacgcaagctggtggctgaggtgtccctgcagaacccgctccctgtggccctggaaggctgcaccttcactgtggagggggccggcctractgaggagcagaagacggtggagatcccagacccygtggaggcaggggaggaagttaaggtgagaatggacctgctgccgctccacatgggcctccacaagctggtggtgaacttcgagagcgacaagctgaaggctgtgaagggcttccggaatgtcatcattggccccgcctaagggacccctgctcccagcctgctgagagcccccaccttgatcccaatccttatcccaagctagtgagcaaaatatgccccttmttgggccccagaccccagggcagggtgggcagcctatgggggctctcggaaatggaatgtgcccctggcccatctcagcctcctgagcctgtgggtccccactcaccccctttgctgtgaggaatgctctgtgccagaaacagtgggagccctgaccttggctgactggggctggggtgagagaggaaagacctacattccctctcctgcccagatgccctttggaaagccattgaccacccaccatattgtttgatctacttcatagctccttggagcaggcaaaaaagggacagcatgccccttggctggatcagggaatccagctccctagactgcatcccgtacctcttcccatgactgcacccagctccaggggcccttgggacagccagagctgggtggggacagtgataggcccaaggggggcctccaacccatttaatcaccatgggaaactgttgtgggcgctgcttccaggataaggagactgaggcttagagagaggaggcagccccctccacaccagtccactccctgctccacgaagccttaagccataggcccaggatatttctgagagtgaaaccatgactgtgaccaccttctgtccccagccctgtcctggttccttcctatgcccaggtaccacccttcagaccccagttctaggggagaagagccctggacacccctgctctacccatgagcctgcccgctgcaatgcctagacttcccaacagccttagctgccagtgctggtcactaaccaacaaggttggcaccccagctaccccttctttgcagggctaaggcccccaaacatagcccctgccccggaggaagcttggggaacccatgagttgtcagctttgactttatctcctgctctttctacatgactgggcctcccttgggctggaagaattggggattctctattggaggtgagatcacagcctcyagggccccccaaatcccagggaaggacttggagagaatcatgctgttgcatttagaactttctgctttgcacaggaaagagtcacacaattaatcaacatgtatattttctctatacatagagctctatttctctacggttttataaaagccttgggttccaaccaggcagtagatgtgcttytgaaccgcaaggagcaaacactgaaataaaatagtttatttttcacactcaaa

SEQ ID NO: 6179 - DNA, 1216 bp, Homo sapiens
ggatccggaagcacaggagaccaagagaccagagataccaggatgagagataggacccctggttgccaggttcgagaagtcctaggctgagtccctggaaatggtcgcacttggagggtctcgccgccagtggaaggagccaccgcccccgcccgaccatggccgaggagctggtcttagagaggtgtgatctggagctggagaccaatggccgagaccaccacacggccgacctgtgccgggagaagctggtggtgcgacggggccagcccttctggctgaccctgcactttgagggccgcaactacgaggccagtgtagacagtctcaccttcagtgtcgtgaccggcccagcccctagccaggaggccgggaccaaggcccgttttcyactaagagatgctgtggaggagggtgactggacagccaccgtggtggaccagcaagactgcaccctctcgctgcagctcaccaccccggccaacgcccccatcggcctgtatcgcctcagcctggaggcctccactggctaccagggatccagctttgtgctgggccacttcattttgctcttcaacgcctggtgcccagcggatgctgtgtacctggactcggaagaggagcggcaggagtatgtcctcacccagcagggctttatctaccagggctcggccaagttcatcaagaacataccttggaattttgggcagtttgaagatgggatcctagacatctgcctgatccttctagatgtcaaccccaagttcctgaagaacgccggccgtgactgctcccgccgcagcagccccgtctacgtgggccgggtggtgagtggcatggtcaactgcaacgatgaccagggtgtgctgctgggacgctgggacaacaactacggggacggcgtcagccccatgtcctggatcggcagcgtggacatcctgcggcgctggaagaaccacggctgccagcgcgtcaagtatggccagtgctgggtcttcgcygccgtggcctgcacaggtgagctgcacgctgggatgtgggtcatgagccctgggagggggcacgaagagcactggagtaggaatcaggacatccctgccctggtcctgccycctgccaccaacactctcaatgcgctatgtggcctagagcctgtgaccaccctctccggtcctttatccaatagccatccctccagtggttgttaggatcaagg

SEQ ID NO: 6180 - DNA, 2217 bp, Homo sapiens
ggatccggaagcacaggagaccaagagaccagagataccaggatgagagataggacccctggttgccaggttcgagaagtcctaggctgagtccctggaaatggtcgcacttggagggtctcgccgccagtggaaggagccaccgcccccgcccgaccatggccgaggagctggtcttagagaggtgtgatctggagctggagaccaatggccgagaccaccacacggccgacctgtgccgggagaagctggtggtgcgacggggccagcccttctggctgaccctgcactttgagggccgcaactacgaggccagtgtagacagtctcaccttcagtgtcgtgaccggcccagcccctagccaggaggccgggaccaaggcccgttttcyactaagagatgctgtggaggagggtgactggacagccaccgtggtggaccagcaagactgcaccctctcgctgcagctcaccaccccggccaacgcccccatcggcctgtatcgcctcagcctggaggcctccactggctaccagggatccagctttgtgctgggccacttcattttgctcttcaacgcctggtgcccagcggatgctgtgtacctggactcggaagaggagcggcaggagtatgtcctcacccagcagggctttatctaccagggctcggccaagttcatcaagaacataccttggaattttgggcagtttgaagatgggatcctagacatctgcctgatccttctagatgtcaaccccaagttcctgaagaacgccggccgtgactgctcccgccgcagcagccccgtctacgtgggccgggtggtgagtggcatggtcaactgcaacgatgaccagggtgtgctgctgggacgctgggacaacaactacggggacggcgtcagccccatgtcctggatcggcagcgtggacatcctgcggcgctggaagaaccacggctgccagcgcgtcaagtatggccagtgctgggtcttcgcygccgtggcctgcacagtgctgaggtgcctrggcatccctacccgcgtcgtgaccaactacaactcggcccatgaccagaacagcaaccttctcatcgagtacttccgcaatgagtttggggagatccagggtgayaagagcgagatgatctggaacttccactgctgggtggagtcgtggatgaccaggccggacctgcagccggggtacgagggctggcaggccctggacccaacgccccaggagaagagcgaagggacgtactgctgtggcccagttccagttcgtgccatcaaggagggcgacctgagcaccaagtacgatgcgccctttgtctttgcggaggtcaatgccgacgtggtagactggatccagcaggacgatgggtctgtgcacaaatccatmaaccgttccctgatcgttgggctgaagatcagcactaagagcgtgggccgagacgagcgggaggatatcacccacacctacaaatacccagaggggtcctcagaggagagggaggccttcacaagggcgaaccacctgaacaaactggccgagaaggaggagacagggatggccatgcggatccgtgtgggccagagcatgaacatgggcagtgactttgacgtctttgcccacatcaccaacaacaccgctgaggagtacgtctgccgcctcctgctctgtgcccgcaccgtcagctacaatgggatcttggggcccgagtgtggcaccaagtacctgctcaacctcaacctggagcctttctctggtaaagccctgtgttcctggagcatttgttgaccgccaactgacaacatgctaggtagtgacctaaccacttagcatgtgtgatttcaccccacagacacttacatggcgctgaytctggggcaggccctgtcctaagcactttataaatatcaacccacttaattcttattgcaagatgaggctggtccaagtcccctgttggaacctccaatgccaagctcaagctgagatgcgttccctctaagcccccatactgtggttgagttacttgttattctttgatgataagatctggggaatttccgtgtgctggtggacaggaagccaggccctggatggctgaaaggaatccagttgcccccacccctgcctcctttctctgctgcttctttctcttctccttcctgcctccaccctttcatgctctctcctccctcatccc

SEQ ID NO: 6181 - DNA, 3983 bp, Homo sapiens
ggatccggaagcacaggagaccaagagaccagagataccaggatgagagataggacccctggttgccaggttcgagaagtcctaggctgagtccctggaaatggtcgcacttggagggtctcgccgccagtggaaggagccaccgcccccgcccgaccatggccgaggagctggtcttagagaggtgtgatctggagctggagaccaatggccgagaccaccacacggccgacctgtgccgggagaagctggtggtgcgacggggccagcccttctggctgaccctgcactttgagggccgcaactacgaggccagtgtagacagtctcaccttcagtgtcgtgaccggcccagcccctagccaggaggccgggaccaaggcccgttttcyactaagagatgctgtggaggagggtgactggacagccaccgtggtggaccagcaagactgcaccctctcgctgcagctcaccaccccggccaacgcccccatcggcctgtatcgcctcagcctggaggcctccactggctaccagggatccagctttgtgctgggccacttcattttgctcttcaacgcctggtgcccagcggatgctgtgtacctggactcggaagaggagcggcaggagtatgtcctcacccagcagggctttatctaccagggctcggccaagttcatcaagaacataccttggaattttgggcagtttgaagatgggatcctagacatctgcctgatccttctagatgtcaaccccaagttcctgaagaacgccggccgtgactgctcccgccgcagcagccccgtctacgtgggccgggtggtgagtggcatggtcaactgcaacgatgaccagggtgtgctgctgggacgctgggacaacaactacggggacggcgtcagccccatgtcctggatcggcagcgtggacatcctgcggcgctggaagaaccacggctgccagcgcgtcaagtatggccagtgctgggtcttcgcygccgtggcctgcacagtgctgaggtgcctrggcatccctacccgcgtcgtgaccaactacaactcggcccatgaccagaacagcaaccttctcatcgagtacttccgcaatgagtttggggagatccagggtgayaagagcgagatgatctggaacttccactgctgggtggagtcgtggatgaccaggccggacctgcagccggggtacgagggctggcaggccctggacccaacgccccaggagaagagcgaagggacgtactgctgtggcccagttccagttcgtgccatcaaggagggcgacctgagcaccaagtacgatgcgccctttgtctttgcggaggtcaatgccgacgtggtagactggatccagcaggacgatgggtctgtgcacaaatccatmaaccgttccctgatcgttgggctgaagatcagcactaagagcgtgggccgagacgagcgggaggatatcacccacacctacaaatacccagaggggtcctcagaggagagggaggccttcacaagggcgaaccacctgaacaaactggccgagaaggaggagacagggatggccatgcggatccgtgtgggccagagcatgaacatgggcagtgactttgacgtctttgcccacatcaccaacaacaccgctgaggagtacgtctgccgcctcctgctctgtgcccgcaccgtcagctacaatgggatcttggggcccgagtgtggcaccaagtacctgctcaacctcaacctggagcctttctctgagaagagcgttcctctttgcatcctctatgagaaataccgtgactgccttacggagtccaacctcatcaaggtgcgggccctcctcgtggagccagttatcaacagctacctgctggctgagagggacctctacctggagaatccagaaatcaagatccggatccttggggagcccaagcagaaacgcaagctggtggctgaggtgtccctgcagaacccgctccctgtggccctggaaggctgcaccttcactgtggagggggccggcctractgaggagcagaagacggtggagatcccagacccygtggaggcaggggaggaagttaaggtgagaatggacctgctgccgctccacatgggcctccacaagctggtggtgaacttcgagagcgacaagctgaaggctgtgaagggcttccggaatgtcatcattggccccgcctaagggacccctgctcccagcctgctgagagcccccaccttgatcccaatccttatcccaagctagtgagcaaaatatgccccttmttgggccccagaccccagggcagggtgggcagcctatgggggctctcggaaatggaatgtgcccctggcccatctcagcctcctgagcctgtgggtccccactcaccccctttgctgtgaggaatgctctgtgccagaaacagtgggagccctgaccttggctgactggggctggggtgagagaggaaagacctacattccctctcctgcccagatgccctttggaaagccattgaccacccaccatattgtttgatctacttcatagctccttggagcaggcaaaaaagggacagcatgccccttggctggatcagggaatccagctccctagactgcatcccgtacctcttcccatgactgcacccagctccaggggcccttgggacagccagagctgggtggggacagtgataggcccaaggtcccctccacatcccagcagcccaagcttaatagccctccccctcaacctcaccattgtgaagcacctactatgtgctgggtgcctcccacacttgctggggctcacggggcctccaacccatttaatcaccatgggaaactgttgtgggcgctgcttccaggataaggagactgaggcttagagagaggaggcagccccctccacaccagtggcctcgtggttatwagcaaggctgggtaatgtgaaggcccaagagcagagtctgggcctctgactctgagtccactgctccatttataaccccagcctgacctgagactgtcggagaggctgtctggggcctttatcaaaaaaagactcagccaagacaaggagktagagagkggactgggggactgggagtcagagccctggctgggttcaggtcccacgtctggccaggcactgccttctcctctctgggcctttgtttccttgttggtcagaggagtgattgaaccagctcatctccaaggatcctctccactccatgtttgcaatgcttttatatggcccagccttgtaaataaccacaaggtccactccctgctccacgaagccttaagccataggcccaggatatttctgagagtgaaaccatgactgtgaccaccttctgtccccagccctgtcctggttccttcctatgcccaggtaccacccttcagaccccagttctaggggagaagagccctggacacccctgctctacccatgagcctgcccgctgcaatgcctagacttcccaacagccttagctgccagtgctggtcactaaccaacaaggttggcaccccagctaccccttctttgcagggctaaggcccccaaacatagcccctgccccggaggaagcttggggaacccatgagttgtcagctttgactttatctcctgctctttctacatgactgggcctcccttgggctggaagaattggggattctctattggaggtgagatcacagcctcyagggccccccaaatcccagggaaggacttggagagaatcatgctgttgcatttagaactttctgctttgcacaggaaagagtcacacaattaatcaacatgtatattttctctatacatagagctctatttctctacggttttataaaagccttgggttccaaccaggcagtagatgtgcttytgaaccgcaaggagcaaacactgaaataaaatagtttatttttcacactcaaacta

SEQ ID NO: 6182 - DNA, 3613 bp, Homo sapiens
ggatccggaagcacaggagaccaagagaccagagataccaggatgagagataggacccctggttgccaggttcgagaagtcctaggctgagtccctggaaatggtcgcacttggagggtctcgccgccagtggaaggagccaccgcccccgcccgaccatggccgaggagctggtcttagagaggtgtgatctggagctggagaccaatggccgagaccaccacacggccgacctgtgccgggagaagctggtggtgcgacggggccagcccttctggctgaccctgcactttgagggccgcaactacgaggccagtgtagacagtctcaccttcagtgtcgtgaccggcccagcccctagccaggaggccgggaccaaggcccgttttcyactaagagatgctgtggaggagggtgactggacagccaccgtggtggaccagcaagactgcaccctctcgctgcagctcaccaccccggccaacgcccccatcggcctgtatcgcctcagcctggaggcctccactggctaccagggatccagctttgtgctgggccacttcattttgctcttcaacgcctggtgcccagcggatgctgtgtacctggactcggaagaggagcggcaggagtatgtcctcacccagcagggctttatctaccagggctcggccaagttcatcaagaacataccttggaattttgggcagtttgaagatgggatcctagacatctgcctgatccttctagatgtcaaccccaagttcctgaagaacgccggccgtgactgctcccgccgcagcagccccgtctacgtgggccgggtggtgagtggcatggtcaactgcaacgatgaccagggtgtgctgctgggacgctgggacaacaactacggggacggcgtcagccccatgtcctggatcggcagcgtggacatcctgcggcgctggaagaaccacggctgccagcgcgtcaagtatggccagtgctgggtcttcgcygccgtggcctgcacagtgctgaggtgcctrggcatccctacccgcgtcgtgaccaactacaactcggcccatgaccagaacagcaaccttctcatcgagtacttccgcaatgagtttggggagatccagggtgayaagagcgagatgatctggaacttccactgctgggtggagtcgtggatgaccaggccggacctgcagccggggtacgagggctggcaggccctggacccaacgccccaggagaagagcgaagggacgtactgctgtggcccagttccagttcgtgccatcaaggagggcgacctgagcaccaagtacgatgcgccctttgtctttgcggaggtcaatgccgacgtggtagactggatccagcaggacgatgggtctgtgcacaaatccatmaaccgttccctgatcgttgggctgaagatcagcactaagagcgtgggccgagacgagcgggaggatatcacccacacctacaaatacccagaggggtcctcagaggagagggaggccttcacaagggcgaaccacctgaacaaactggccgagaaggaggagacagggatggccatgcggatccgtgtgggccagagcatgaacatgggcagtgactttgacgtctttgcccacatcaccaacaacaccgctgaggagtacgtctgccgcctcctgctctgtgcccgcaccgtcagctacaatgggatcttggggcccgagtgtggcaccaagtacctgctcaacctcaacctggagcctttctctgagaagagcgttcctctttgcatcctctatgagaaataccgtgactgccttacggagtccaacctcatcaaggtgcgggccctcctcgtggagccagttatcaacagctacctgctggctgagagggacctctacctggagaatccagaaatcaagatccggatccttggggagcccaagcagaaacgcaagctggtggctgaggtgtccctgcagaacccgctccctgtggccctggaaggctgcaccttcactgtggagggggccggcctractgaggagcagaagacggtggagatcccagacccygtggaggcaggggaggaagttaaggtgagaatggacctgctgccgctccacatgggcctccacaagctggtggtgaacttcgagagcgacaagctgaaggctgtgaagggcttccggaatgtcatcattggccccgcctaagggacccctgctcccagcctgctgagagcccccaccttgatcccaatccttatcccaagctagtgagcaaaatatgccccttmttgggccccagaccccagggcagggtgggcagcctatgggggctctcggaaatggaatgtgcccctggcccatctcagcctcctgagcctgtgggtccccactcaccccctttgctgtgaggaatgctctgtgccagaaacagtgggagccctgaccttggctgactggggctggggtgagagaggaaagacctacattccctctcctgcccagatgccctttggaaagccattgaccacccaccatattgtttgatctacttcatagctccttggagcaggcaaaaaagggacagcatgccccttggctggatcagggaatccagctccctagactgcatcccgtacctcttcccatgactgcacccagctccaggggcccttgggacagccagagctgggtggggacagtgataggcccaaggtcccctccacatcccagcagcccaagcttaatagccctccccctcaacctcaccattgtgaagcacctactatgtgctgggtgcctcccacacttgctggggctcacggggcctccaacccatttaatcaccatgggaaactgttgtgggcgctgcttccaggataaggagactgaggcttagagagaggaggcagccccctccacaccagtggcctcgtggttatwagcaaggctgggtaatgtgaaggcccaagagcagagtctgggcctctgactctgagtccactgctccatttataaccccagcctgacctgagactgtcggagaggctgtctggggcctttatcaaaaaaagactcagccaagacaaggagktagagagkggactgggggactgggagtcagagccctggctgggttcaggtcccacgtctggccaggcactgccttctcctctctgggcctttgtttccttgttggtcagaggagtgattgaaccagctcatctccaaggatcctctccactccatgtttgcaatgcttttatatggcccagccttgtaaataaccacaaggtccactccctgctccacgaagccttaagccataggcccaggatatttctgagaatcacagcctcyagggccccccaaatcccagggaaggacttggagagaatcatgctgttgcatttagaactttctgctttgcacaggaaagagtcacacaattaatcaacatgtatattttctctatacatagagctctatttctctacggttttataaaagccttgggttccaaccaggcagtagatgtgcttytgaaccgcaaggagcaaacactgaaataaaatagtttatttttcacactcaaacta

SEQ ID NO: 6183 - DNA, 4442 bp, Homo sapiens
  misc_feature (1)...(4442): n = A,T,C or G
atggagtcagggcagccggctcgacggattgccatggcgccgctgctggagtacgagcgacagctggtgctggaactgctcgacactgacgggctastastgtgcgcccgcgggctcggcgcggaccggctcctctaccactttctccagctgcactgccacccagcctgcctggtgctggtgctcaacacgcagccggccgaggaggagtattttatcaatcagctgaagatagaaggagttgaacacctycctcgccgtgtaacaaatgaaatcacaagcaacagtcgctatgaagtttacacacaaggtggtgttatatttgcgacaagtaggatacttgtggttgacttcttgactgatagaataccttcagatttaattactggcatcttggtgtatagagcccacagaataatcgagtcttgtcaagaagcattcatcttgcgcctctttcgccagaaaaacaaacgtggttttattaaagctttcacagacaatgytgttgcctttgatactggtttttgtcatgtggaaagagtgatgagaaatctttttgtgaggaaactgtatctgtggccaaggttccatgtagcagtaaactcatttttagaacagcacaaacctgaagttgtagaaatccatgtttctatgacacctaccatgcttgctatrcagactgctatactggacattttaaatgcatgtctaaaggaactaaaatgccataacccatcgcttgaagtggaagatttatctttagaaaatgctattggaaaaccttttgacaagacaatccgccattatctggatcctttgtggcaccagcttggagccaagactaaatccttagttcaggatttgaagatattacgaactttgctgcagtatctctctcagtatgattgtgtcacatttcttaatcttctggaatctctgagagcaacggaaaaagcttttggtcagaattcaggttggctgtttcttgactccagcacctcgatgtttataaatgctcgagcaagggtttatcatcttccagatgccaaaatgagtaaaaaagaaaaaatatctgaaaaaatggaaattaaagaaggggaagaaacaaaaaaggaactggtcctagaaagcaacycaaagtgggaggcactgactgaagtattaaaagaaattgaggcagaaaataaggagagtgaagctcttggtggtccaggtcaagtactgatttgtgcaagtgatgaccnaacatgttcccagctgagagactatatcactcttggagcggaggccttcttattgaggctctacaggaaaacctttgagaaggatagcaaagctgaagaagtctggatgaaatttwggaaggaagacagttcaaagagaattaggaaatctcacaaaagacctaaagacccccaaaacaaagaacgggcttctaccaaagaaagaaccctcaaaaagaaaaaacrgaagttgaccttaactcaaatggtaggaaaacctraagaactggaagaggaaggagatgtcgaggaargatatcgtcgagaaataagcagtagcccagaaagctgcccggaagaaaytaagcatgaagaatttgatgtaaatttgtcatcggatgctgctttcggaatcctgaaagaacccctcactatcatccatccgcttctgggttgcagcgacccctatgctctgrcaaggggattaaaaatgctgtttttccaacctaaaagttctgtcttaacyygcagggtttactttcytatatacggaggttcaactgaggaacaacgctatctcactgctttgcggaaagaaaaggargcttttgaaaaactcataagggaaaaagcaagcatggttgtccctgaagaaagagaaggcagagatgaaacaaacttagacctagtaagaggcacagcayctgcagatgtttccactgacactcggaaagccggtggccaggaacagaatggtacacagcaaagcatagttgtggatatgcgtgaatttcgaagtgagcttccatctctgatccatcgtcggggcattgacaytgaacccgtgactttagaggttggagattacatcctcactccagaaatgtgmgtggagcgcaagagtatcagtgatttaatcggctctttaaataacggccgcctctacagccagtgcatctccatgtcccgctactacaagcgtcccgtgcttctgattgagtttgaccctagcaagcctttctctctcacttcccgaggtgccttgtttcaggagatctccagcaatgacattagttccaaactcactcttcttacacttcacttccccagactayggattctctggtgcccctctcctcatgcaacrgcggagttgtttgaggagctgaaacaaagcaagccrcagcctgatgcggcgacagcactggccattacagcagattcygaaacccttcccgagtcagagaagtataatcctggtccccaagacttcttgttaaaaatgccaggggtgaatgccaaaaactgccgctccttgatgcaccacgttaagaacrtcgcagrattagcagccctgtcacaagacgagctcacragtattctggggaatgctgcaaatgccaaacagctttatgatttcattcacacctcttttgcagaagtygtatcaaaagraaaagggaaaaagtgaacagtgatggytgttttcttatcccatgcctgtacttttcagcrgctccttgccagacatcataggtcattattaattattggtttgctatttcattcttttccaatgctcttaatgattgtacggtggaccagaagccaggattcctctctgaactctgcagttaggcatcacttgaacttgcctgtgcctgctctttttcctccctgcaccgtctatgccgggcttagcatgtttctttttaaatgaggtttgtcaggatcaggtaaagttcctacaagtgattacagaaggtagaaactttacctgatcctaacagatctcatttagaaaggaatatgctaagcctggcatggacggtgcagggagggaaaagagcaggcacaagaaagctaccatttttaacagtccttgttatctagtgcaacataaataacagtcttaattgcacttatacccatgtcctgtggctctccaaatctgktctttgctgttgtgtctgctggacgcttgaactgatgtttgtgtaggaaatcatgttctgaccctttgtctacaaaggagccttctggaacactgagaagaaacatctctttgccattcctgaccagttctctctaccacattttcttcagctccatacttctgcctgtctgctctaaggaaatttcatskagccttcctactactaattcaagacagtctcctcaaaaactggttgactastcttctaatgaccctaacatatgtagcatatactataatttcattgttccaaattagtatttttaaagcaaaatgaattacctrtttgcaaaagttaatgatgaaggagctcttagaattctcaatttttgcacatattcagtctcctaatatcagagatccctaagtccagctggctagttacagagttttttcagacttccycgtttctcagctcttatatcctaagacaccagcatcatatsctctagaaatacaacctaattggcagtgagccgagatcgcaccactgcacccctgcctgggcgacagagtgagactttgtctctattacaaaaagaaaagaaaagaaatacaacctaagctcacctgcctgtgattcctcatttctcaccatcctgtgccagggtggctacttctctctgtgaggactcaaatacaagccaatgagtggcccactaagcttttaagatttgattttcctgccttgagataaaaaggagtgtaggtaaatgaaagatcaatgtatggaatatataaaaatacgaaagaaatatatacgtttaaaaatccataaagaaaaaaatctcattctaaacctgattaagttggctttttacgtaagtgtacaaataggatattcacagcatctttgtgcagtttttaaacttttatatttaaacattattaagttggcttttgttcacatgttgagtaatgggtagtaaattttctacctcaggagctgatatagacatcagttctgctagccatatcacatattttaatgtttcatcaacatcagctgtttttttgtttgctacactatttgaactaatagacagtggatcatgtaacacaaaattgtcttcaactttaacaaaattgtcattgttatttttttttgagacagagtctccctctgttgcccaggctggagtgcagtggcgcaatctcggctcactgcaacctcgcctgctgggttcaagcagttctcccacctcagcctcccaagtagctgg

SEQ ID NO: 6184 - DNA, 4779 bp, Homo sapiens
  misc_feature (1)...(4779): n = A,T,C or G
atgaatcttcggctccactcggctcttcttcggctgagttcggccaacgcttgccttctcaggctcggctctcttcggctttctgagagcgcgcctgtcgtggcctcggctcctcttcggctgcgttcggcccacgatcatctcagtctcagctctcctcggctacgttcggctggctgccgtcctctcggactcggctctcttcggttgagttcggcctactctccactaggagtcggcttccttcggcwgcgttcggctgcgacccggaagagcttccatggagtcagggcagccggctcgacggattgccatggcgccgctgctggagtacgagcgacagctggtgctggaactgctcgacactgacgggctastastgtgcgcccgcgggctcggcgcggaccggctcctctaccactttctccagctgcactgccacccagcctgcctggtgctggtgctcaacacgcagccggccgaggaggagtattttatcaatcagctgaagatagaaggagttgaacacctycctcgccgtgtaacaaatgaaatcacaagcaacagtcgctatgaagtttacacacaaggtggtgttatatttgcgacaagtaggatacttgtggttgacttcttgactgatagaataccttcagatttaattactggcatcttggtgtatagagcccacagaataatcgagtcttgtcaagaagcattcatcttgcgcctctttcgccagaaaaacaaacgtggttttattaaagctttcacagacaatgytgttgcctttgatactggtttttgtcatgtggaaagagtgatgagaaatctttttgtgaggaaactgtatctgtggccaaggttccatgtagcagtaaactcatttttagaacagcacaaacctgaagttgtagaaatccatgtttctatgacacctaccatgcttgctatrcagactgctatactggacattttaaatgcatgtctaaaggaactaaaatgccataacccatcgcttgaagtggaagatttatctttagaaaatgctattggaaaaccttttgacaagacaatccgccattatctggatcctttgtggcaccagcttggagccaagactaaatccttagttcaggatttgaagatattacgaactttgctgcagtatctctctcagtatgattgtgtcacatttcttaatcttctggaatctctgagagcaacggaaaaagcttttggtcagaattcaggttggctgtttcttgactccagcacctcgatgtttataaatgctcgagcaagggtttatcatcttccagatgccaaaatgagtaaaaaagaaaaaatatctgaaaaaatggaaattaaagaaggggaagaaacaaaaaaggaactggtcctagaaagcaacycaaagtgggaggcactgactgaagtattaaaagaaattgaggcagaaaataaggagagtgaagctcttggtggtccaggtcaagtactgatttgtgcaagtgatgaccnaacatgttcccagctgagagactatatcactcttggagcggaggccttcttattgaggctctacaggaaaacctttgagaaggatagcaaagctgaagaagtctggatgaaatttwggaaggaagacagttcaaagagaattaggaaatctcacaaaagacctaaagacccccaaaacaaagaacgggcttctaccaaagaaagaaccctcaaaaagaaaaaacrgaagttgaccttaactcaaatggtaggaaaacctraagaactggaagaggaaggagatgtcgaggaargatatcgtcgagaaataagcagtagcccagaaagctgcccggaagaaaytaagcatgaagaatttgatgtaaatttgtcatcggatgctgctttcggaatcctgaaagaacccctcactatcatccatccgcttctgggttgcagcgacccctatgctctgrcaagggtactacatgaagtggagccaasatacgtggttctttatgacgcagagctaacctttgttcggcagcttgaaatttacagggcgagtaggcctgggaaacctctgagggtttactttcytatatacggaggttcaactgaggaacaacgctatctcactgctttgcggaaagaaaaggargcttttgaaaaactcataagggaaaaagcaagcatggttgtccctgaagaaagagaaggcagagatgaaacaaacttagacctagtaagaggcacagcayctgcagatgtttccactgacactcggaaagccggtggccaggaacagaatggtacacagcaaagcatagttgtggatatgcgtgaatttcgaagtgagcttccatctctgatccatcgtcggggcattgacaytgaacccgtgactttagaggttggagattacatcctcactccagaaatgtgmgtggagcgcaagagtatcagtgatttaatcggctctttaaataacggccgcctctacagccagtgcatctccatgtcccgctactacaagcgtcccgtgcttctgattgagtttgaccctagcaagcctttctctctcacttcccgaggtgccttgtttcaggagatctccagcaatgacattagttccaaactcactcttcttacacttcacttccccagactayggattctctggtgcccctctcctcatgcaacrgcggagttgtttgaggagctgaaacaaagcaagccrcagcctgatgcggcgacagcactggccattacagcagattcygaaacccttcccgagtcagagaagtataatcctggtccccaagacttcttgttaaaaatgccaggggtgaatgccaaaaactgccgctccttgatgcaccacgttaagaacrtcgcagrattagcagccctgtcacaagacgagctcacragtattctggggaatgctgcaaatgccaaacagctttatgatttcattcacacctcttttgcagaagtygtatcaaaagraaaagggaaaaagtgaacagtgatggytgttttcttatcccatgcctgtacttttcagcrgctccttgccagacatcataggtcattattaattattggtttgctatttcattcttttccaatgctcttaatgattgtacggtggaccagaagccaggattcctctctgaactctgcagttaggcatcacttgaacttgcctgtgcctgctctttttcctccctgcaccgtctatgccgggcttagcatgtttctttttaaatgaggtttgtcaggatcaggtaaagttcctacaagtgattacagaaggtagaaactttacctgatcctaacagatctcatttagaaaggaatatgctaagcctggcatggacggtgcagggagggaaaagagcaggcacaagaaagctaccatttttaacagtccttgttatctagtgcaacataaataacagtcttaattgcacttatacccatgtcctgtggctctccaaatctgktctttgctgttgtgtctgctggacgcttgaactgatgtttgtgtaggaaatcatgttctgaccctttgtctacaaaggagccttctggaacactgagaagaaacatctctttgccattcctgaccagttctctctaccacattttcttcagctccatacttctgcctgtctgctctaaggaaatttcatskagccttcctactactaattcaagacagtctcctcaaaaactggttgactastcttctaatgaccctaacatatgtagcatatactataatttcattgttccaaattagtatttttaaagcaaaatgaattacctrtttgcaaaagttaatgatgaaggagctcttagaattctcaatttttgcacatattcagtctcctaatatcagagatccctaagtccagctggctagttacagagttttttcagacttccycgtttctcagctcttatatcctaagacaccagcatcatatsctctagaaatacaacctaattggcagtgagccgagatcgcaccactgcacccctgcctgggcgacagagtgagactttgtctctattacaaaaagaaaagaaaagaaatacaacctaagctcacctgcctgtgattcctcatttctcaccatcctgtgccagggtggctacttctctctgtgaggactcaaatacaagccaatgagtggcccactaagcttttaagatttgattttcctgccttgagataaaaaggagtgtaggtaaatgaaagatcaatgtatggaatatataaaaatacgaaagaaatatatacgtttaaaaatccataaagaaaaaaatctcattctaaacctgattaagttggctttttacgtaagtgtacaaataggatattcacagcatctttgtgcagtttttaaacttttatatttaaacattattaagttggcttttgttcacatgttgagtaatgggtagtaaattttctacctcaggagctgatatagacatcagttctgctagccatatcacatattttaatgtttcatcaacatcagctgtttttttgtttgctacactatttgaactaatagacagtggatcatgtaacacaaaattgtcttcaactttaacaaaattgtcattgttatttttttttgagacagagtctccctctgttgcccaggctggagtgcagtggcgcaatctcggctcactgcaacctcgcctgctgggttcaagcagttctcccacctcagcctcccaagtagctgg

SEQ ID NO: 6185 - DNA, 5154 bp, Homo sapiens
ctcggcgcytgcggctgggggacggggtagcggacggagcgacgaccttcgcctctgcccctgcgcccatggtcggggcgtcgtgggtgctcctcacacaaaagaaaagccgagcgcttcatactcggcggatctgacccggggctgcggggcggggtcgcggctggaagtgcgcgcccgcgggggactccgcaggccgatcggacgccaggacgtcggggccgcgctcaaatccgtgcggcaggagggaggtgcagcgcttccagggttttccaaggccggggagagcctcgaattcccatcactcctttttctggtctcttgcccccagtgccaggagacttttgtcgtccccaggactgcggraggggccccgcgcccccgccttcggaggagctcgagccgcaggatgcgcggggacgcgccaccgccctccgcgcccagttccgccggcgcttccccggcggctcccgggcgctgactctcccgggcttttccgcctttctcgctcccgccccgccgggcggttcggcggccggtccccggaccccgccgggagctgctcstctcaccctcgccacggcgcggacaataaattaatgcatcgcgcttgagtggagggggcggctgggcgcctcggtggtagctttctctcctggctggagacgaccacaaccgayatgggctgtttctgcgctgttccggaagaattttactgcgaagttttgctcctggatgaatccaagttaacccttaccacccagcagcagggcatcaagaagtcaacgaaaggttccgttgtccttgaccacgtattccatcacgtaaaccttgtggagatagattattttgggctacgttactgtgacagamgccatcagacgtattggctggatcctgcaaaaacccttgctgaacacaaagaaytgatcaacactggacctccatatactttgtatttyggtattaaattctatgctgaagatccatgtaaacttaaagaagaaataaccagatatcagtttttcttgcaggtgaagcaagatgtccttcagggccgtctgccctgtcccrtcaacactgctgctcagctgggagcgtatgccatccagtcggagcttggagattatgaccyatataaacatactgcaggatatgtatctgagtaccggtttgttcctgatcagaaggaagaacttgaagaagccrtagaaaggattcataaaactctaatgggtcagattccttctgaggctgagctgaattacttgaggactgccaaatccctggagatgtatggcgttgacctccatcccgtctatggagaaaacaagtctgagtatttcttaggattaactccggttggtgttgttgtgtacaagaataaaaagcaagtggggaagtatttctggcctcggattacaaaggttcacttcaaggagactcartttgaactcagagtactgggaaaagattgtaacgaaacctcattcttttttgaagctcggagtaaaactgcttgcaagcacctctggaagtgcagtgtggaacatcatacattttttagaatgccagaaaatgaatccaattcactgtcaagaaaactcagcaagtttggatccatacgttataagcaccgctacagtggcaggacagctttgcaaatgagccgagatctttctattcagcttccccggcctgatcagaatgtgacaagaagtcgaagcaagacttaccctaagcgaatagcacaaacacagccagctgaatcaaacascatcagtaggataactgcaaacatggaaaatggagaaaatgaaggaacaattaaaattattgcaccttcaccagtaaaaagctttaagaaagcaaagaatgaaaatagccctgatacccaaagaagcaaatctcatgcaccgtgggaagaaaatggcccccagagtggactctacaattctcccagtgatcgcactaagtcgccaragttcccttacacgcgtcgccgaaacccctcctgtggaagtgacaatgattctgtacagcctgtgaggaggaggaaagcccataacagtggtgaagattcagatcttaagcaaaggaggaggtcacgttcacgctgtaacaccagcagtggtagtgaatcagaaaattctaatagagaacaccggaaaaagagaaacagaatacggcaggagaatgatatggttgattcagcgcctcagtgggaagctgtattaaggagacaaaaggaaaaaaaccaagccgaccccaacarcaggcgatccagacacagatctcgttcgagaagccccgatatccaagcaaaagaagagttatggaagcacattcaaaaagaacttgtggatccatccggattgtccgaagaacaattaaaagagattccatacactaaaatagagtgagtgcctttcagaatcttctcaccaaagctttattagtgcttgacacaaggtgacccaatccgcatcaggcattctcattcgccacgaagttaccgccagtatcgcaggtcccagtgttcagatggggagcgatcagttctctcggaagtgaattcaaaaacagatcttgtaccaccacttccggtgacccrttcttcggatgctcagggttctggggatgctacagttcatcagagaagaaatgggtctaaagatagcctgatggaagaaaaacctcagacatctacaaacaacctggytggaaaacacacagcaaaaacaataaaaactatacaagcttcccgcctcaagacagagacttgatcctgatgaagggtcaagggtaggggtgggaaggttgtgtgcgccactggtacttttgaaactgtgaaataggtatcttaattcaaatctcagacctgcaagtatttcttcagcatgagaaaatacattatcttttgcttctttttttttttttttttgagatgttatcactctgtcgcccaggctggagtgcagcggcaccgtgtcagctcaccgcagcctccacttactgggttaagcgattctcctgtctcaggctmccgagcagctgggattacaggcrtgcaccacaacacccggctaattctttttgtatttttagtagagacagggctttgccatgttggaggctggtctcgaactcctgacctcaagtgatccgcctgcctcagcctcccaaagtgctgggattataggccatggtttaactacagcacagttgtgctgaaggacctttttgttttaactggaagaataagtattttgtaaaaattcacttgataccacattttcatttctggaacaggatagcaatcattcatttctatcttgtgtctgtgtccaccacaaccaagaccagatgcatctgatgaacattctggaattctgaactgcagctagcctgctgtgcaatagtacaagtgggaggacgtcttcccagggctgggctggttctcaactagtgcccagatgcaaaaggactgaggcatcactttcagactgcatatatttttattcatataaagttctttataatactttattttgtggtgttaagttccaccagttatttacaaatgatgtaaaaagctttaagtgttgttaatttctaaagtgttcttgcgttttcagaagtgtaagtggatctcagttgatctgtcaccccaaacctcaaatgatccatccaccctgcttggccatctaattcacctgctctccccagtgactattttgkacctttcctctccatagatgactttgcaatctacagggaaaatacttatgcaggacatcttatatctcccccttaccacgtacagttctctccacagctgccagcagccctaacctttttgtctctccacctgtgctttggatgctcttctcccagccttttcaggatctttgtctgtcctcctatattaatgtattcaattattctctcagctagatccttgctacttggttttaaatttaagactaagattaaacaaaactatctttcacaaccacaaaccccctcccgccaagcaactaagattttcctctcattctcagccagttttcttgcaagcagtatctttagtcattgccctcaattcatctaatccctatcttaagctatctctaacatggatctttccctctactccactaatatcaatcactgtgttacttaatcccagggagaatttttaggacattcttttgcttctttaatataatcctattttgctcctaccactgaccatcctttctggcttatcatgctttaccttgccattaattagtggagtttctcaaacttcagaccctaggccctcttcctctaccaccagcagatctcatttatacccatggccttaaggtttatttctgtagtttagactactgagtaatgtgctactgcaaaaagaccatttggrtttctcaaaggtaatttaaaaattcagctgtttaaatgctgctccccagctgaatctagggtcattatgctcatcagtgtgcaagctggacacctagcagttatggacacctccactattaccacgtctagttggctctgtcatccaactataaacgatcttatttcactaattttactagtccaagctggtctcttgtctagacaacaataagcaacctagttcaactaccttttcttgcaaatctgattttccaccatggatttatcttgctttaataaagccagagggagcctgaagtggtctggcttctttacctacctcttcagcctcattttgtaacactctcacctcccataatagccatcttacaagcctcagtaaggactcagttctaaaacagggcactgaagagggaaagcagccaaaactgtctcaaaagtaagtggactaacggtatcttttttctagcccaagcctctgtatatgtcattcccccagttttgccttgtgaaaaatatgacacatacctttagtctcaactctttctcaggtttccctaagaaaatcctatcacggaactcatctcatagtgaagttttacatttgtgatgacattccctccacttatctatgtttccaaagggaagaactgtgttgtgctcatcatcgtgttctcagctcctagtacagtgctttcaataaattttttgaatacctct

SEQ ID NO: 6186 - DNA, 5109 bp, Homo sapiens
ctcggcgcytgcggctgggggacggggtagcggacggagcgacgaccttcgcctctgcccctgcgcccatggtcggggcgtcgtgggtgctcctcacacaaaagaaaagccgagcgcttcatactcggcggatctgacccggggctgcggggcggggtcgcggctggaagtgcgcgcccgcgggggactccgcaggccgatcggacgccaggacgtcggggccgcgctcaaatccgtgcggcaggagggaggtgcagcgcttccagggttttccaaggccggggagagcctcgaattcccatcactcctttttctggtctcttgcccccagtgccaggagacttttgtcgtccccaggactgcggraggggccccgcgcccccgccttcggaggagctcgagccgcaggatgcgcggggacgcgccaccgccctccgcgcccagttccgccggcgcttccccggcggctcccgggcgctgactctcccgggcttttccgcctttctcgctcccgccccgccgggcggttcggcggccggtccccggaccccgccgggagctgctcstctcaccctcgccacggcgcggacaataaattaatgcatcgcgcttgagtggagggggcggctgggcgcctcggtggtagctttctctcctggctggagacgaccacaaccgayatgggctgtttctgcgctgttccggaagaattttactgcgaagttttgctcctggatgaatccaagttaacccttaccacccagcagcagggcatcaagaagtcaacgaaaggttccgttgtccttgaccacgtattccatcacgtaaaccttgtggagatagattattttgggctacgttactgtgacagamgccatcagacgtattggctggatcctgcaaaaacccttgctgaacacaaagaaytgatcaacactggacctccatatactttgtatttyggtattaaattctatgctgaagatccatgtaaacttaaagaagaaataaccagatatcagtttttcttgcaggtgaagcaagatgtccttcagggccgtctgccctgtcccrtcaacactgctgctcagctgggagcgtatgccatccagtcggagcttggagattatgaccyatataaacatactgcaggatatgtatctgagtaccggtttgttcctgatcagaaggaagaacttgaagaagccrtagaaaggattcataaaactctaatgggtcagattccttctgaggctgagctgaattacttgaggactgccaaatccctggagatgtatggcgttgacctccatcccgtctatggagaaaacaagtctgagtatttcttaggattaactccggttggtgttgttgtgtacaagaataaaaagcaagtggggaagtatttctggcctcggattacaaaggttcacttcaaggagactcartttgaactcagagtactgggaaaagattgtaacgaaacctcattcttttttgaagctcggagtaaaactgcttgcaagcacctctggaagtgcagtgtggaacatcatacattttttagaatgccagaaaatgaatccaattcactgtcaagaaaactcagcaagtttggatccatacgttataagcaccgctacagtggcaggacagctttgcaaatgagccgagatctttctattcagcttccccggcctgatcagaatgtgacaagaagtcgaagcaagacttaccctaagcgaatagcacaaacacagccagctgaatcaaacascatcagtaggataactgcaaacatggaaaatggagaaaatgaaggaacaattaaaattattgcaccttcaccagtaaaaagctttaagaaagcaaagaatgaaaatagccctgatacccaaagaagcaaatctcatgcaccgtgggaagaaaatggcccccagagtggactctacaattctcccagtgatcgcactaagtcgccaragttcccttacacgcgtcgccgaaacccctcctgtggaagtgacaatgattctgtacagcctgtgaggaggaggaaagcccataacagtggtgaagattcagatcttaagcaaaggaggaggtcacgttcacgctgtaacaccagcagtggtagtgaatcagaaaattctaatagagaacaccggaaaaagagaaacagaatacggcaggagaatgatatggttgattcagcgcctcagtgggaagctgtattaaggagacaaaaggaaaaaaaccaagccgaccccaacarcaggcgatccagacacagatctcgttcgagaagccccgatatccaagcaaaagaagagttatggaagcacattcaaaaagaacttgtggatccatccggattgtccgaagaacaattaaaagagattccatacactaaaatagagacacaaggtgacccaatccgcatcaggcattctcattcgccacgaagttaccgccagtatcgcaggtcccagtgttcagatggggagcgatcagttctctcggaagtgaattcaaaaacagatcttgtaccaccacttccggtgacccrttcttcggatgctcagggttctggggatgctacagttcatcagagaagaaatgggtctaaagatagcctgatggaagaaaaacctcagacatctacaaacaacctggytggaaaacacacagcaaaaacaataaaaactatacaagcttcccgcctcaagacagagacttgatcctgatgaagggtcaagggtaggggtgggaaggttgtgtgcgccactggtacttttgaaactgtgaaataggtatcttaattcaaatctcagacctgcaagtatttcttcagcatgagaaaatacattatcttttgcttctttttttttttttttttgagatgttatcactctgtcgcccaggctggagtgcagcggcaccgtgtcagctcaccgcagcctccacttactgggttaagcgattctcctgtctcaggctmccgagcagctgggattacaggcrtgcaccacaacacccggctaattctttttgtatttttagtagagacagggctttgccatgttggaggctggtctcgaactcctgacctcaagtgatccgcctgcctcagcctcccaaagtgctgggattataggccatggtttaactacagcacagttgtgctgaaggacctttttgttttaactggaagaataagtattttgtaaaaattcacttgataccacattttcatttctggaacaggatagcaatcattcatttctatcttgtgtctgtgtccaccacaaccaagaccagatgcatctgatgaacattctggaattctgaactgcagctagcctgctgtgcaatagtacaagtgggaggacgtcttcccagggctgggctggttctcaactagtgcccagatgcaaaaggactgaggcatcactttcagactgcatatatttttattcatataaagttctttataatactttattttgtggtgttaagttccaccagttatttacaaatgatgtaaaaagctttaagtgttgttaatttctaaagtgttcttgcgttttcagaagtgtaagtggatctcagttgatctgtcaccccaaacctcaaatgatccatccaccctgcttggccatctaattcacctgctctccccagtgactattttgkacctttcctctccatagatgactttgcaatctacagggaaaatacttatgcaggacatcttatatctcccccttaccacgtacagttctctccacagctgccagcagccctaacctttttgtctctccacctgtgctttggatgctcttctcccagccttttcaggatctttgtctgtcctcctatattaatgtattcaattattctctcagctagatccttgctacttggttttaaatttaagactaagattaaacaaaactatctttcacaaccacaaaccccctcccgccaagcaactaagattttcctctcattctcagccagttttcttgcaagcagtatctttagtcattgccctcaattcatctaatccctatcttaagctatctctaacatggatctttccctctactccactaatatcaatcactgtgttacttaatcccagggagaatttttaggacattcttttgcttctttaatataatcctattttgctcctaccactgaccatcctttctggcttatcatgctttaccttgccattaattagtggagtttctcaaacttcagaccctaggccctcttcctctaccaccagcagatctcatttatacccatggccttaaggtttatttctgtagtttagactactgagtaatgtgctactgcaaaaagaccatttggrtttctcaaaggtaatttaaaaattcagctgtttaaatgctgctccccagctgaatctagggtcattatgctcatcagtgtgcaagctggacacctagcagttatggacacctccactattaccacgtctagttggctctgtcatccaactataaacgatcttatttcactaattttactagtccaagctggtctcttgtctagacaacaataagcaacctagttcaactaccttttcttgcaaatctgattttccaccatggatttatcttgctttaataaagccagagggagcctgaagtggtctggcttctttacctacctcttcagcctcattttgtaacactctcacctcccataatagccatcttacaagcctcagtaaggactcagttctaaaacagggcactgaagagggaaagcagccaaaactgtctcaaaagtaagtggactaacggtatcttttttctagcccaagcctctgtatatgtcattcccccagttttgccttgtgaaaaatatgacacatacctttagtctcaactctttctcaggtttccctaagaaaatcctatcacggaactcatctcatagtgaagttttacatttgtgatgacattccctccacttatctatgtttccaaagggaagaactgtgttgtgctcatcatcgtgttctcagctcctagtacagtgctttcaataaattttttgaatacctct

SEQ ID NO: 6187 - DNA, 2713 bp, Homo sapiens
ctcggcgcytgcggctgggggacggggtagcggacggagcgacgaccttcgcctctgcccctgcgcccatggtcggggcgtcgtgggtgctcctcacacaaaagaaaagccgagcgcttcatactcggcggatctgacccggggctgcggggcggggtcgcggctggaagtgcgcgcccgcgggggactccgcaggccgatcggacgccaggacgtcggggccgcgctcaaatccgtgcggcaggagggaggtgcagcgcttccagggttttccaaggccggggagagcctcgaattcccatcactcctttttctggtctcttgcccccagtgccaggagacttttgtcgtccccaggactgcggraggggccccgcgcccccgccttcggaggagctcgagccgcaggatgcgcggggacgcgccaccgccctccgcgcccagttccgccggcgcttccccggcggctcccgggcgctgactctcccgggcttttccgcctttctcgctcccgccccgccgggcggttcggcggccggtccccggaccccgccgggagctgctcstctcaccctcgccacggcgcggacaataaattaatgcatcgcgcttgagtggagggggcggctgggcgcctcggtggtagctttctctcctggctggagacgaccacaaccgayatgggctgtttctgcgctgttccggaagaattttactgcgaagttttgctcctggatgaatccaagttaacccttaccacccagcagcagggcatcaagaagtcaacgaaaggttccgttgtccttgaccacgtattccatcacgtaaaccttgtggagatagattattttgggctacgttactgtgacagamgccatcagacgtattggctggatcctgcaaaaacccttgctgaacacaaagaaytgatcaacactggacctccatatactttgtatttyggtattaaattctatgctgaagatccatgtaaacttaaagaagaaataaccagatatcagtttttcttgcaggtgaagcaagatgtccttcagggccgtctgccctgtcccrtcaacactgctgctcagctgggagcgtatgccatccagtcggagcttggagattatgaccyatataaacatactgcaggatatgtatctgagtaccggtttgttcctgatcagaaggaagaacttgaagaagccrtagaaaggattcataaaactctaatgggtcagattccttctgaggctgagctgaattacttgaggactgccaaatccctggagatgtatggcgttgacctccatcccgtctatggagaaaacaagtctgagtatttcttaggattaactccggttggtgttgttgtgtacaagaataaaaagcaagtggggaagtatttctggcctcggattacaaaggttcacttcaaggagactcartttgaactcagagtactgggaaaagattgtaacgaaacctcattcttttttgaagctcggagtaaaactgcttgcaagcacctctggaagtgcagtgtggaacatcatacattttttagaatgccagaaaatgaatccaattcactgtcaagaaaactcagcaagtttggatccatacgttataagcaccgctacagtggcaggacagctttgcaaatgagccgagatctttctattcagcttccccggcctgatcagaatgtgacaagaagtcgaagcaagacttaccctaagcgaatagcacaaacacagccagctgaatcaaacascatcagtaggataactgcaaacatggaaaatggagaaaatgaaggaacaattaaaattattgcaccttcaccagtaaaaagctttaagaaagcaaagaatgaaaatagccctgatacccaaagaagcaaatctcatgcaccgtgggaagaaaatggcccccagagtggactctacaattctcccagtgatcgcactaagtcgccaragttcccttacacgcgtcgccgaaacccctcctgtggaagtgacaatgattctgtacagcctgtgaggaggaggaaagcccataacagtggtgaagattcagatcttaagcaaaggaggaggtcacgttcacgctgtaacaccagcagtggtagtgaatcagaaaattctaatagagaacaccggaaaaagagaaacagaatacggcaggagaatgatatggttgattcagcgcctcagtgggaagctgtattaaggagacaaaaggaaaaaaaccaagccgaccccaacarcaggcgatccagacacagatctcgttcgagaagccccgatatccaagcaaaagaagagttatggaagcacattcaaaaagaacttgtggatccatccggattgtccgaagaacaattaaaagagattccatacactaaaatagagtgagtgcctttcagaatcttctcaccaaagctttattagtgcttgtgagtaatccattctaattcttcaattgtgttccagacagtgctttaatttgtctttacattttaamcaaaactaggtgacagtagcgaaagaggaagaaaagtgtgcattaaagctacttattctacactataatcactatcatctcttattagccacctctttgtacttggtaggtacaagggggcttttcctgattaatgtcagttttaaaataaattcttttctgagattctcactgataaagt

SEQ ID NO: 6188 - DNA, 5110 bp, Homo sapiens
ctcggcgcytgcggctgggggacggggtagcggacggagcgacgaccttcgcctctgcccctgcgcccatggtcggggcgtcgtgggtgctcctcacacaaaagaaaagccgagcgcttcatactcggcggatctgacccggggctgcggggcggggtcgcggctggaagtgcgcgcccgcgggggactccgcaggccgatcggacgccaggacgtcggggccgcgctcaaatccgtgcggcaggagggaggtgcagcgcttccagggttttccaaggccggggagagcctcgaattcccatcactcctttttctggtctcttgcccccagtgccaggagacttttgtcgtccccaggactgcggraggggccccgcgcccccgccttcggaggagctcgagccgcaggatgcgcggggacgcgccaccgccctccgcgcccagttccgccggcgcttccccggcggctcccgggcgctgactctcccgggcttttccgcctttctcgctcccgccccgccgggcggttcggcggccggtccccggaccccgccgggagctgctcstctcaccctcgccacggcgcggacaataaattaatgcatcgcgcttgagtggagggggcggctgggcgcctcggtggtagctttctctcctggctggagacgaccacaaccgayatgggctgtttctgcgctgttccggaagaattttactgcgaagttttgctcctggatgaatccaagttaacccttaccacccagcagcagggcatcaagaagtcaacgaaaggttccgttgtccttgaccacgtattccatcacgtaaaccttgtggagatagattattttgggctacgttactgtgacagamgccatcagacgtattggctggatcctgcaaaaacccttgctgaacacaaagaaytgatcaacactggacctccatatactttgtatttyggtattaaattctatgctgaagatccatgtaaacttaaagaagaaataaccagatatcagtttttcttgcaggtgaagcaagatgtccttcagggccgtctgccctgtcccrtcaacactgctgctcagctgggagcgtatgccatccagtcggagcttggagattatgaccyatataaacatactgcaggatatgtatctgagtaccggtttgttcctgatcagaaggaagaacttgaagaagccrtagaaaggattcataaaactctaatgggtcagattccttctgaggctgagctgaattacttgaggactgccaaatccctggagatgtatggcgttgacctccatcccgtctatggagaaaacaagtctgagtatttcttaggattaactccggttggtgttgttgtgtacaagaataaaaagcaagtggggaagtatttctggcctcggattacaaaggttcacttcaaggagactcartttgaactcagagtactgggaaaagattgtaacgaaacctcattcttttttgaagctcggagtaaaactgcttgcaagcacctctggaagtgcagtgtggaacatcatacattttttagaatgccagaaaatgaatccaattcactgtcaagaaaactcagcaagtttggatccatacgttataagcaccgctacagtggcaggacagctttgcaaatgagccgagatctttctattcagcttccccggcctgatcagaatgtgacaagaagtcgaagcaagacttaccctaagcgaatagcacaaacacagccagctgaatcaaacascatcagtaggataactgcaaacatggaaaatggagaaaatgaaggaacaattaaaattattgcaccttcaccagtaaaaagctttaagaaagcaaagaatgaaaatagccctgatacccaaagaagcaaatctcatgcaccgtgggaagaaaatggcccccagagtggactctacaattctcccagtgatcgcactaagtcgccaragttcccttacacgcgtcgccgaaacccctcctgtggaagtgacaatgattctgtacagcctgtgaggaggaggaaagcccataacagtggtgaagattcagatcttaagcaaaggaggaggtcacgttcacgctgtaacaccagcagtggtagtgaatcagaaaattctaatagagaacaccggaaaaagagaaacagaatacggcaggagaatgatatggttgattcagcgcctcagtgggaagctgtattaaggagacaaaaggaaaaaaaccaagccgaccccaacarcaggcgatccagacacagatctcgttcgagaagccccgatatccaagcaaaagaagagttatggaagcacattcaaaaagaacttgtggatccatccggattgtccgaagaacaattaaaagagattccatacactaaaatagaggacacaaggtgacccaatccgcatcaggcattctcattcgccacgaagttaccgccagtatcgcaggtcccagtgttcagatggggagcgatcagttctctcggaagtgaattcaaaaacagatcttgtaccaccacttccggtgacccrttcttcggatgctcagggttctggggatgctacagttcatcagagaagaaatgggtctaaagatagcctgatggaagaaaaacctcagacatctacaaacaacctggytggaaaacacacagcaaaaacaataaaaactatacaagcttcccgcctcaagacagagacttgatcctgatgaagggtcaagggtaggggtgggaaggttgtgtgcgccactggtacttttgaaactgtgaaataggtatcttaattcaaatctcagacctgcaagtatttcttcagcatgagaaaatacattatcttttgcttctttttttttttttttttgagatgttatcactctgtcgcccaggctggagtgcagcggcaccgtgtcagctcaccgcagcctccacttactgggttaagcgattctcctgtctcaggctmccgagcagctgggattacaggcrtgcaccacaacacccggctaattctttttgtatttttagtagagacagggctttgccatgttggaggctggtctcgaactcctgacctcaagtgatccgcctgcctcagcctcccaaagtgctgggattataggccatggtttaactacagcacagttgtgctgaaggacctttttgttttaactggaagaataagtattttgtaaaaattcacttgataccacattttcatttctggaacaggatagcaatcattcatttctatcttgtgtctgtgtccaccacaaccaagaccagatgcatctgatgaacattctggaattctgaactgcagctagcctgctgtgcaatagtacaagtgggaggacgtcttcccagggctgggctggttctcaactagtgcccagatgcaaaaggactgaggcatcactttcagactgcatatatttttattcatataaagttctttataatactttattttgtggtgttaagttccaccagttatttacaaatgatgtaaaaagctttaagtgttgttaatttctaaagtgttcttgcgttttcagaagtgtaagtggatctcagttgatctgtcaccccaaacctcaaatgatccatccaccctgcttggccatctaattcacctgctctccccagtgactattttgkacctttcctctccatagatgactttgcaatctacagggaaaatacttatgcaggacatcttatatctcccccttaccacgtacagttctctccacagctgccagcagccctaacctttttgtctctccacctgtgctttggatgctcttctcccagccttttcaggatctttgtctgtcctcctatattaatgtattcaattattctctcagctagatccttgctacttggttttaaatttaagactaagattaaacaaaactatctttcacaaccacaaaccccctcccgccaagcaactaagattttcctctcattctcagccagttttcttgcaagcagtatctttagtcattgccctcaattcatctaatccctatcttaagctatctctaacatggatctttccctctactccactaatatcaatcactgtgttacttaatcccagggagaatttttaggacattcttttgcttctttaatataatcctattttgctcctaccactgaccatcctttctggcttatcatgctttaccttgccattaattagtggagtttctcaaacttcagaccctaggccctcttcctctaccaccagcagatctcatttatacccatggccttaaggtttatttctgtagtttagactactgagtaatgtgctactgcaaaaagaccatttggrtttctcaaaggtaatttaaaaattcagctgtttaaatgctgctccccagctgaatctagggtcattatgctcatcagtgtgcaagctggacacctagcagttatggacacctccactattaccacgtctagttggctctgtcatccaactataaacgatcttatttcactaattttactagtccaagctggtctcttgtctagacaacaataagcaacctagttcaactaccttttcttgcaaatctgattttccaccatggatttatcttgctttaataaagccagagggagcctgaagtggtctggcttctttacctacctcttcagcctcattttgtaacactctcacctcccataatagccatcttacaagcctcagtaaggactcagttctaaaacagggcactgaagagggaaagcagccaaaactgtctcaaaagtaagtggactaacggtatcttttttctagcccaagcctctgtatatgtcattcccccagttttgccttgtgaaaaatatgacacatacctttagtctcaactctttctcaggtttccctaagaaaatcctatcacggaactcatctcatagtgaagttttacatttgtgatgacattccctccacttatctatgtttccaaagggaagaactgtgttgtgctcatcatcgtgttctcagctcctagtacagtgctttcaataaattttttgaatacctct

SEQ ID NO: 6189 - DNA, 2313 bp, Homo sapiens
cggattgtcagactgctcctccctcttctttagactgccacgaggaaaaagcagatgtgagaactcaaggttcagggctgctcttctaasaaacaagtctgccataatctccatctgtgttggaatctgttaactaatgaactggtctctgtgcaaatccygagtgctaaagcttccaacaagactgatgctagctcgtgtcaccaggaagatgctacgtcatgccaagtgttttcagcgcctagcartttttggttctgtgagggcactgcataaagataatagaacagcaacccctcagaatttctccaactatgaatccatgaaacaggacttcaaactggggattccagagtatttcaactttgctaaagatgtcctggaccaatggactgataaggaaaaggctggaaagaaaccttcaaatccagccttctggtggatcaacagaaatggagaagagatgcgatggagttttgaggaacygggatctctgtccagaaaatttgccaatatactttcagaagcctgttccctacaaagaggagatcgggtaattctgattctgcccagggtcccagagtggtggcttgcaaatgtggcctgtctgcgaacagggacagttttaattccaggaaccactcagctgacccagaaagacattctctacagactacaatcttcaaaagcaaactgcattatcaccaatgatgttttagccccagcagtagacgctgttgcatccaaatgtgaaaatctgcactccaagctgatygtatcagagaactccagagaggggtgggggaacctcaaggagttgatgaaacatgccagtgacagccacacctgtgtgaagacaaaacacaatgagatcatggccatattctttaccagtggaacaagtggatatccgaaaatgactgcacacacccacagcagttttggtttaggattatctgtaaatggaaggttctggctagatttgacaccctcagatgtgatgtggaatacctcagatacgggctgggcaaagtctgcatggagtagtgttttttctccgtrgatccagggagcatgtgtattcacacaccatttaccccgttttgagccgacttctatcttgcaaacactctccaagtaccccatcacagtcttctgttcagcaccaactgtataccgaatgcttgtacagaatgatataaccagctataagtttaaaagcttaaagcactgtgtgagtgctggggaaccaattacccctgacgtgactgaaaaatggagaaacaasacgggcctggatatctacgaaggatatggacagactgaaacggtgctaatctgtggaaattttaagggaatgaaaattaaacctggctcaatgggaaaaccttctcctgctttygatgttaagattgtagatgtaaatggcaatgttctacctcctggacaagaaggagatattggcattcaagttctacccaaccgaccatttggcctttttactcattasgtagataatccttcaaaaacagcttcaactctacgaggcaatttctatatcactggggacagagsatatatggataaagatgggtatttctggtttgttgcaagagcagatgatgtyatattatcctctggctatcgaattggaccatttgaggtagaaaatgccctgaatgaacacccttcagttgcagagtcagctgttgtcagcagcccagaccccatcagaggagaggtagtaaaggcttttgtcgttctaaatcctgattacaagtcacatgatcaagaacaactaataaaggagattcaggagcatgttaaaaaaactacagcaccttacaaatatcccagaaaggtagaatttattcaagagctgccaaagactatcagwgggaagacaaaaagaaatgaactgaggaagaaagaatggaagacaatttaaagttgtttcattaattaccatatctataaaacaaacatagtatctgtcaatctctagaaaccacaagatgatggagaggtcataaaaactgtggtagtatgcttagaaactgttgatttaaaatatcttgtggttatgatatcagaggctaaattttgaaataaaatatttggcaaattcctccacattagtgtcaatgttcctatcatttcttaatataaaaataataccatcaattgctgattaatttttaaatgtatagtatagaagcagtttctgaaccagatctctgctacataggttttcaaactttagttgactaattcttctgatatgttgatatacaaatcagaaccaatgttcaa

SEQ ID NO: 6190 - DNA, 1568 bp, Homo sapiens
cggattgtcagactgctcctccctcttctttagactgccacgaggaaaaagcagatgtgagaactcaaggttcagggctgctcttctaasaaacaagtctgccataatctccatctgtgttggaatctgttaactaatgaactggtctctgtgcaaatccygagtgctaaagcttccaacaagactgatgctagctcgtgtcaccaggaagatgctacgtcatgccaagtgttttcagcgcctagcartttttggttctgtgagggcactgcataaagataatagaacagcaacccctcagaatttctccaactatgaatccatgaaacaggacttcaaactggggattccagagtatttcaactttgctaaagatgtcctggaccaatggactgataaggaaaaggctggaaagaaaccttcaaatccagccttctggtggatcaacagaaatggagaagagatgcgatggagttttgaggaacygggatctctgtccagaaaatttgccaatatactttcagaagcctgttccctacaaagaggagatcgggtaattctgattctgcccagggtcccagagtggtggcttgcaaatgtggcctgtctgcgaacagggacagttttaattccaggaaccactcagctgacccagaaagacattctctacagactacaatcttcaaaagcaaactgcattatcaccaatgatgttttagccccagcagtagacgctgttgcatccaaatgtgaaaatctgcactccaagctgatygtatcagagaactccagagaggggtgggggaacctcaaggagttgatgaaacatgccagtgacagccacacctgtgtgaagacaaaacacaatgagatcatggccatattctttaccagtggaacaagtggatatccgaaaatgactgcacacacccacagcagttttggtttaggattatctgtaaatggaaggttctggctagatttgacaccctcagatgtgatgtggaatacctcagatacgggctgggcaaagtctgcatggagtagtgttttttctccgtrgatccagggagcatgtgtattcacacaccatttaccccgttttgagccgacttctatcttgcaaacactctccaagtaccccatcacagtcttctgttcagcaccaactgtataccgaatgcttgtacagaatgatataaccagctataagtttaaaagcttaaagcactgtgtgagtgctggggaaccaattacccctgacgtgactgaaaaatggagaaacaasacgggcctggatatctacgaaggatatggacagactgaaacggtgctaatctgtggaaattttaagggaatgaaaattaaacctggctcaatgggaaaaccttctcctgctttygatgttaaggtttgcacatccccttccaggagaatgtttaacaacccaatctgtacactacctacctaccgcttacccccatataaactttctttgttatgatggtgattccattttacttccatgatactttaatttttataaatatgtgaaaatgattagaaat

SEQ ID NO: 6191 - DNA, 3078 bp, Homo sapiens
ggtgaggtctctggggttgtcttaccgcagtgagtaccacgcggtactacagagaccggctgcccgtgtgcctggcaggtggagctgcccgcatcagcggcctcggggaatggaagcggagaacgcgggcagctactcccttcagcaagctcaagctttttatacgtttccatttcaacaactgatggctgaagctcctaatatggcagttgtgaatgaacagcaaatgccagaagaagttccagccccagctcctgctcaggaaccagtgcaagaggctccaaaaggaagaaaaagaaaacccagaacaacagaaccaaaacaaccagtggaacccaaaaaacctgttgagtcaaaaaaatctagcaagtctgcaaaatcaaaagaaaagcaagaaaaattacagacacatttaaagtcaaaagaaaagtagaccgttttaatggtgtttcagaagctgaacttctgaccaagactctccccgatattttgaccttcaatctggacattgtcattattggcataaacccgggtctaatggctgcttacaaagggcatcattaccctggacctggaaaccatttttggaagtgtttgtttatgtcagggctcagtgaggtccaggtgaaccatatggatgatcacactctaccagggaagtatggtattggatttaccaacatggtggaaaggaccacgcctggcagcaaagatctctccagtaaagaatttcgtgaaggaggacgtattctagtacagaaattatagaaatatcagccacgaatagcagtgtttaatggaaaatgtatttatgaaatttttagtaaagaagtttttggtgtaaaggttaagaacttggaatttgggcttcagccccataagattccagrcacagaaactctctgctatgttaygccgtcatccagtgcaagaagtgctcagtttcctcgggcccaagacaaagttcattactacataaaactgaaagacttaagagatcagttgagaggcattgaacgaaatacggacgttcaagaggtgcaatatacatttgacctacagcttgcccaagaagatgcaaagaagatggctgttaaggaagaaaaatatgatctgggttatgaggcagcatatggtggtgcttacggagaaaatccatgcgacagtgaaccttgcagcttctcttcaaatgggctaattgagagcctggagttaagaggagaatcaactttcagtggcattcctaatgagcagtggatgacccagtcatttacagaccaaattccttcctttaataatcactgtggaacacaagaacaggaagaagaaagccatgcttaagaacggtgcttctcagctctgcttaaatgctgcagttttaatgcagttgtcaacaagtagaacctcagcttgctaactgaagtgttttattagtattttactctagtggtgtaattgtaatgtagaacagttgtgtggtagtgtgaaccgtatgaacctaagtagtttggaagaaaaagtagggttgttgtatactagcttttgtatttgaattaatcatcattccagctttttatatactatgtttcatttatgaagaaattgattttcttttgggagtcacttttgatctgtaattttaaaatacaagtctgaatatttgtagttgattcttaactgtgcataaacctagatataccattatcccttttatacctaagaagggcatgctaataattaccactgtcaaagaggcaaaggtgttgatttttgtatatgaagttaagcctcagyagagtctcatttgttagtttttagtggtaactaagggtaaactcagggttycctgagctatatgcacactcagacctctttgctttaccagtggtgtttgtgrgttgctcagtagtaaaaactggcccttacctgacagagccctggctttgacctgctcagccctgtgtgttaatcctctagtagctagtaactactctggggtggcaggttccagagaatgcagtagaccttttgccactcatctatgttttacttgagacacgtaaatatgatagggaaggaactgaatttctccattcatatttataaccattctagttttatcttccttggctttaagaatgtgccatggaaagtgataagaaatgaacttttaggctaagcaaaaagatgctggagatatttgataatctcatttaaactggtgctttatgtacatgagatgtactaaaataagtaatatagagtttttcttgctaggtaaatccagtaagccaataattttaaagattctttatctgcatcactgctgttttttactataattaaatgaacctcatggaaaggttgaggtatatacctttgtgattttctaatgagttttccatggtgctacaaataatccagactaccaggcctggtagatattaaagctgggtactaagaaatgtcatttgcatcctctcagttactcctgaatattctgatttcatacatacccagggagcatgctgttttgtcaatcaatataaaatatttatgaggtctcccccacccccaggaggttttatgattgctcttctctttataataagagaaacaaattcttgttgtgaatcttaacatgctttttagctgtggctatgatggattttattttttcctaggtcaagctgtgtaaaagtcatttatgttatttaaatgatgtactgtactgctgtttacatggacgttttgtgcgggtgctttgaagtgccttgcatcagggattaggagcaattaaattattttttcacgggacygtgtaaagcatgtaactaggtattgctttggtatataactgttgtagctttacaagagattgttttatttgaatggggaaaataccgtttaaattatgacagacatccactagagatgggtttgaggattttccaagcgtgtaataatgatgtttttcctaacatgacagatgagtagtaaatgttgatatatcctgtacatgacagtgtgagactttttcattaaataatattgaaagattttaaaattcaaaaaaaa

SEQ ID NO: 6192 - DNA, 2234 bp, Homo sapiens
cgttgccgggtcgcaggtcccrccagtgcgagcgcaacggaggtcgaaggcgttcagactcttagctgaacgcggagctgcggcggctatgctgtggagcggctgccsgcgtttcggggcgcgcctcggctgcctgcccggcggtctccgggtcctcgtccagaccggccaccggagcttgacctcctgcatcgacccttccatgggacttaatgaagagcagaaagaatttcaaaaagtggcctttgactttgctgcccgagagatggctccaaatatggcagagtgggaccagaaggagctgttcccagtggatgtgatgcggaaggcagcccagctaggcttcggaggggtctacatacaaacagatgtgggcgggtctgggctgtcacgtcttgatacctctgtcatttttgaagccttggctacaggctgcaccagcaccacagcctatataagcatccacaacatgtgtgcctggatgattgatagcttcggaaatgaggaacagaggcacaaattttgcccaccgctctgtaccatggagaagtttgcttcctactgcctcactgaaccaggaagtgggagtgatgctgcctctcttctgacctccgctaagaaacagggagatcattacatcctcaatggctccaaggccttcatcagtggtgctggtgagtcagacatctatgtggtcatgtgccgaacaggaggaccaggccccaagggcatctcatgcatagttgttgagaaggggacccctggcctcagctttggcaagaaggagaaaaaggtggggtggaactcccagccaacacgagctgtgatcttcgaagactgtgctgtccctgtggccaacagaattgggagcgaggggcagggcttcctyattgccgtgagaggactgaacggagggaggatcaatattgcttcctgctccctgggggctgcccacgcctctgtcatcctcacccgagaccacctcaatgtccggaagcagtttggagagcctctggccagtaaccagtacttgcaattcacactggctgatatggcaacaaggctggtggccgcgcggctgatggtccgcaatgcagcagtggctctgcaggaggagaggaaggatgcagtggccttgtgctccatggccaagctctttgctacagatgaatgctttgccatctgcaaccaggccttgcagatgcacgggggctacggctacctgaaggattacgctgttcagcagtacgtgcgggactccagggtccaccagattctagaaggtagcaatgaagtgatgaggatactgatctctagaagcctgcttcaggagtagaacccacacttgttctggcctggtgttcagtgcgactgcagtcagtgttgagtggtgccatgtgggccgctctattccaaaggaatcatggattagacccaagggctgagctcctctagggcaggacctgcaccctgtgtgttggcaccagcatcgggtcttggactggggcagaatccccagtggaaccggaagagctggactgatgagaaacatcagaagaacacatactaccttgttttcctaatgccagaagggtgaccagtgaagattcaccgtcaaaccatgaaagtcctttcttggatccactttatcttgattagtctgcattttactagttcactggatccctcctctaggggcctggggactttcactgatgctcttcctgattctagagcaaaggtgtgggaaggggaaatggaggaatgccctcctgtctgtgtcgttctctgtgccacagctacagatgcagaaggtttctctggatagcacacctctgaatgtaaatcatgataaaatggatatttggaaacttactcctaagctgtgatttagggtgtatttctacttctggactgcctcaatatcaagggctgagacttttgaattttgaatattcgttgggtttcatgttaagaagcctgtggtctaggagtgctattcagtgtttcttttcctgataaacmctttgaatattttttttgtgtttttgtttccttttctgaagctgttcctccttttaaatatttttaatcacattgataaaatctatccttcaccacctctggttctactatagttgatttttattttaaatgtttaattgtatttgattaaacacttaactggattttggaataataaaactctcgtccaatttggcttttaaaaagca

SEQ ID NO: 6193 - DNA, 3690 bp, Homo sapiens
ccacagagcctttcaattcagcttggggtgagctgcacttcaggcatggggatataatagtgtgatgaaccattcttctgaaggttcttctgaaaagctgctggtcttgggatactgtgagagcccctctcattgctctttagaagtaatttaaatttttctgctacattgtctgctcagctcgtattctggtcatagaggaacctgaagccagagaaactagacaaaaaggaacctctttcaggagctataaaagaaagggaggaatcatgtccacaattgcagctttctatggcggcaagtccattctcatcacgggggccacaggctttctgggcaaagtgctratggagaagctgtttcgcaccagcccagacctgaaagtcatttacatccttgtgaggcccaaggctggccagacactgcagcagagggttttccagatcctagacagtaagctatttgagaaagtcaaagaagtttgtccaaatgtgcatgagaagatcagagctatttatgcagatctcaatcagaatgactttgccatcagcaaagaggacatgcaggagcttctctcctgtacaaacataatatttcactgkgcagccactgkacgctttgacgacactctcakacatgctgtgcaacttaacgtcactgccacccggcagctcttgcttatggctagtcagatgccaaagctggaagcctttatacatatctctactgcctattcaaattgtaacctgaagcacatcgatgaagttatctatccgtgccctgtggagccaaaaaaaatcattgattcccttgagtggttagacgatgctattattgacgagattacacccaagctgatcagagattggcccaatatttatacctacaccaaggccttgggagaaatggtggtgcagcaagagagcaggaacctgaacattgccatcataaggccctccattgtgggagcaacttggcaggagcctttcccaggttgggttgataatataaatggacctaatggaatcattattgcgactgggaaagggtttcttcgggccataaaagctactccaatggctgtggcagacgtaattccagttgatacagtcgtcaatctcatgctagctgtaggatggtatactgcagttcacagacctaagtcaacattagtctaccacattacatctggtaacatgaatccctgcaattggcacaaaatgggagtccaagtcttggcaacctttgaaaaaatcccatttgagagacctttcaggaggccaaatgctaattttaccagcaacagcttcacatcacagtactggaatgcggtcagccaccgggcccctgccattatctatgactgctatctgcggctcactggaaggaagcccaggatgacaaagctcatgaatcggcttttaagaactgtttccatgttggagtatttcatcaaccggagttgggaatggagcacgtacaatacagaaatgctgatgtctgagctgagtcctgaagaccagagagtattcaactttgacgtgcgccagttgaactggttggaatacattgaaaattatgttttgggagttaaaaaatacttattgaaagaggatatggctgggatcccaaaagcaaagcaacgcttaaaaaggctccgaaatattcactacctctttaatactgccctcttccttatcgcctggcgccttctcattgcaagatctcagatggctcggaatgtctggttcttcattgtaagcttctgttataaattcctctcctactttagagcatccagcacgctcaaagtttaagagcatttagccatcgcyttttatctggaacctctcagatacctctaaaacagcaaactgtgattctcaagattagaaagtaacaaggaatatgcccaaactgtcaaatgtcacctgttatgtattcgtccctattccttaactatgtatttttatttcagtgagagaaggaaagttgtaaactagcccatagtcacctatattttagggaaaaaaatccaaattgtttcctaacattctattttatgcccttgcgtattaaacgtgaaagtactcccacttttctatatttagtttttcttttctctctgagatgattcatttaaactcagtaaatatggaaagatgcatggcagaagctgaaatgagctcaagcagtactaaccttggaaccattctgggtacccaaaagaaaaatttaaaatcaagatgagtaaaaggagaatggtctcaatatcctcaaaaatgcagtaagagaagtaattccccactgaaaatgtctctctttctttctatgttataccctggagtcctggttgaggggtgggggaatcagaaaagtaggtttacatttaacatttttcttaactacattcacttcttaaaaaggaacaagaagtgtaaataagtatgtatagagtgagggattaagcatatttgcattggggactcgtgtattatgcttttaagtcaaaattaatattctcaaattcgaatttgatagctattatttctaaatctttttaatcctcaattttcctggtaaccttctttcaagagtctccttcttctaaaagttgccaaaccctttatatttaagctttttccactcaggactcaattagagtggtcaacagggagagggatggtcccatttgatctttgccactgagcaaaacaaaacttcaaatgaacttttaaactgtagctttagtcttctggtataaagtggggaagattacacttatgtgatcaccaaaggatttactagtatcttggtcattccaattgcacaatgttaactgtacaacacacagcagaaaagtgaatagacttcactaagggattctaagtttagaaaataggttttgttttcttaaaaaattttgtgtataatacaaactaatgaaaactatacatattctccaattcctatagtaataataatgtaactgttacaccaactttcctcatatttgagagatgagtacatgttggattgcagcatttcttcatgttaaaaacatggaatattattcaaatatagtacttggggcctaaacaactaaaattagtcaccgcataactagttgaaaatggcataggcataaaatgttaataaagaatggcagttatatttatgctcacttcctggagtaattgggtaatattcagaaaggcacatcgtggtagtttaagtgtacaaggccttagggcagtatctagcccagtattattccagattctcctgagctctatataaagggcattttggaggaactcttctgggcaatatctttcccaatctcatctaaattctgggaaatattttccatagcagacaacccagctctgaaactaagcacctggtgatctttagtttgagatgtctatatggtacttttgagttatatcaattaagatacaagctatagacatgataaaaatatgaaatcaagatatagctcagtgggattggattaagacataataatagttctaagaattcacttttgattgtatgttttaccaattcaataattccactaatcaagtattcacattttgacttttgattaaataaaaatttgaattaaaattattcccctcttctagtgttgtctttaaccgttgactaccgcagcacttctcc

SEQ ID NO: 6194 - DNA, 3792 bp, Homo sapiens
ggcctgcgcgcgcggccgccctgcccacgatgctgtcgcccccgcgacctgtagggccttcgctggcccctcaccctcctcccgccccgggctgaggctgccgccggtttcgcgcccagtgccgaggcagcggcggagccggggaaggtcggagggagggtggtttcctcccgccccacacccagtctccgagccggatatatagagtgtcacgtttgggagccgaaagactggagccgtttccttgtggctggagcgcttcccgtagcctcggggaaggagcaggatttagaggaccactagttggaccccatcctcgtgctggaggaacaggaacctctttcaggagctataaaagaaagggaggaatcatgtccacaattgcagctttctatggcggcaagtccattctcatcacgggggccacaggctttctgggcaaagtgctratggagaagctgtttcgcaccagcccagacctgaaagtcatttacatccttgtgaggcccaaggctggccagacactgcagcagagggttttccagatcctagacagtaagctatttgagaaagtcaaagaagtttgtccaaatgtgcatgagaagatcagagctatttatgcagatctcaatcagaatgactttgccatcagcaaagaggacatgcaggagcttctctcctgtacaaacataatatttcactgkgcagccactgkacgctttgacgacactctcakacatgctgtgcaacttaacgtcactgccacccggcagctcttgcttatggctagtcagatgccaaagctggaagcctttatacatatctctactgcctattcaaattgtaacctgaagcacatcgatgaagttatctatccgtgccctgtggagccaaaaaaaatcattgattcccttgagtggttagacgatgctattattgacgagattacacccaagctgatcagagattggcccaatatttatacctacaccaaggccttgggagaaatggtggtgcagcaagagagcaggaacctgaacattgccatcataaggccctccattgtgggagcaacttggcaggagcctttcccaggttgggttgataatataaatggacctaatggaatcattattgcgactgggaaagggtttcttcgggccataaaagctactccaatggctgtggcagacgtaattccagttgatacagtcgtcaatctcatgctagctgtaggatggtatactgcagttcacagacctaagtcaacattagtctaccacattacatctggtaacatgaatccctgcaattggcacaaaatgggagtccaagtcttggcaacctttgaaaaaatcccatttgagagacctttcaggaggccaaatgctaattttaccagcaacagcttcacatcacagtactggaatgcggtcagccaccgggcccctgccattatctatgactgctatctgcggctcactggaaggaagcccaggatgacaaagctcatgaatcggcttttaagaactgtttccatgttggagtatttcatcaaccggagttgggaatggagcacgtacaatacagaaatgctgatgtctgagctgagtcctgaagaccagagagtattcaactttgacgtgcgccagttgaactggttggaatacattgaaaattatgttttgggagttaaaaaatacttattgaaagaggatatggctgggatcccaaaagcaaagcaacgcttaaaaaggctccgaaatattcactacctctttaatactgccctcttccttatcgcctggcgccttctcattgcaagatctcagatggctcggaatgtctggttcttcattgtaagcttctgttataaattcctctcctactttagagcatccagcacgctcaaagtttaagagcatttagccatcgcyttttatctggaacctctcagatacctctaaaacagcaaactgtgattctcaagattagaaagtaacaaggaatatgcccaaactgtcaaatgtcacctgttatgtattcgtccctattccttaactatgtatttttatttcagtgagagaaggaaagttgtaaactagcccatagtcacctatattttagggaaaaaaatccaaattgtttcctaacattctattttatgcccttgcgtattaaacgtgaaagtactcccacttttctatatttagtttttcttttctctctgagatgattcatttaaactcagtaaatatggaaagatgcatggcagaagctgaaatgagctcaagcagtactaaccttggaaccattctgggtacccaaaagaaaaatttaaaatcaagatgagtaaaaggagaatggtctcaatatcctcaaaaatgcagtaagagaagtaattccccactgaaaatgtctctctttctttctatgttataccctggagtcctggttgaggggtgggggaatcagaaaagtaggtttacatttaacatttttcttaactacattcacttcttaaaaaggaacaagaagtgtaaataagtatgtatagagtgagggattaagcatatttgcattggggactcgtgtattatgcttttaagtcaaaattaatattctcaaattcgaatttgatagctattatttctaaatctttttaatcctcaattttcctggtaaccttctttcaagagtctccttcttctaaaagttgccaaaccctttatatttaagctttttccactcaggactcaattagagtggtcaacagggagagggatggtcccatttgatctttgccactgagcaaaacaaaacttcaaatgaacttttaaactgtagctttagtcttctggtataaagtggggaagattacacttatgtgatcaccaaaggatttactagtatcttggtcattccaattgcacaatgttaactgtacaacacacagcagaaaagtgaatagacttcactaagggattctaagtttagaaaataggttttgttttcttaaaaaattttgtgtataatacaaactaatgaaaactatacatattctccaattcctatagtaataataatgtaactgttacaccaactttcctcatatttgagagatgagtacatgttggattgcagcatttcttcatgttaaaaacatggaatattattcaaatatagtacttggggcctaaacaactaaaattagtcaccgcataactagttgaaaatggcataggcataaaatgttaataaagaatggcagttatatttatgctcacttcctggagtaattgggtaatattcagaaaggcacatcgtggtagtttaagtgtacaaggccttagggcagtatctagcccagtattattccagattctcctgagctctatataaagggcattttggaggaactcttctgggcaatatctttcccaatctcatctaaattctgggaaatattttccatagcagacaacccagctctgaaactaagcacctggtgatctttagtttgagatgtctatatggtacttttgagttatatcaattaagatacaagctatagacatgataaaaatatgaaatcaagatatagctcagtgggattggattaagacataataatagttctaagaattcacttttgattgtatgttttaccaattcaataattccactaatcaagtattcacattttgacttttgattaaataaaaatttgaattaaaattattcccctcttctagtgttgtctttaaccgttgactaccgcagcacttctcc

SEQ ID NO: 6195 - DNA, 3110 bp, Homo sapiens
  misc_feature (1)...(3110): n = A,T,C or G
ctcaggctgggctggacacacctttccaaggacccccaaactctgctccgtgcacgtcaaatgctcctttcccttgtgtccaaccccctacccctctccctaacacccctcttctcaacaagactcagcytctccccgaggtgggtgagcatccttgaggtttcccacccttaactgctgtgtccccggatggagccagagaaatgtggtgggggggccggggccagagtttcaacattgccccccagaaggaggagccagagatggggccctgttaggtctggagctccccacagacactgatctcagtttcccccgagagtgtgagtgtaggcctctacaggcagctgcctytggggagytggggagcctaggggttaactctagacccccctcaaccctctggaccaaagtctgtccaggaaaayaggatgccggagcccaggagtcgtcagcctagcagttgcctggcctccagatgcctcccaggggagcagatcctagcatgggccccaggggtgaggaagggcctggaaccagaattgtctggaaccctgatctgtaccaactttagggtcaccttccagccctgtggatggcagtggaatcaggacactcccttgaacagtgaatacgattttgccctggtcaacattggacgattagaggctgtgagcggcttgtcccgagtccagctcctccrtccagggtccctgcataaatttatccctgaggagattctgattcatggccgagacttccggctgctcagagttggttttgaggctggargcctagagcctcaggcttttcaggtgaccntggccattgtccaagccagagctcagagcaatcaagcccaacagtattcggggataaccctgagcaaggctggccagggttctggctccagaaaaccaccaattcctctcatggagacagcggamgactgggagactgagcggaagaagcaggcagccagaggctggagggtcagcacggtcaacgagaggttcgacgtagccaccagcctcccccgttacttctgggtccctaaccgaattctggacagtgaggtcaggagagcatttggccactttcatcagggccgtggaccggtcagtgtgatggttagggtaatggctgtggattagagggtcatgtgggccagggacatcgtggagggaggaacctctgtgaggtcagtgtgggggcaagggtagcgtggagctaggcatttctcccacaatgaccctcttctgccccatgtgaagcgcttgtcctggcatcaccctgggggcagtgatcttctccgctgtggaggcttctatacagccagtgaccctaacaaggaggatatcagagcagtggagttgatgctccaggctgggcattcagatgttgtcctggtagacactatggatgagctgcccagccttgcagatgtccaacttgcccacctgaggctgagggccctctgcctgcctgattcatctgtagctgaggataaatggctttcagccctggaaggaacacgatggctggactatgtcagggcttgtcttcgaaaggccagtgacatttcagtattagtgacatccagggttcgttctgtaatacttcaagagcgcggtgatcgtgatctcaatggcctcctctcttcactcgtccagctgctttcagcccccgaagcccgaacactgtttggcttccaatcactagtacagcgagagtgggtggcagctggacatcccttcctgactcggcttgggggaactggggccagtgaagaggctccggtgtttctcctcttccttgattgtgtctggcagctcctccagcagtttccagctgattttgaattctctgagtttttccttcttgctcttcatgacagtgtcagrgttcctgacacccttaccttcctgagaaataccccctgggagcgcggaaagcagagcggacagttaaactcctatacacaagtctacaccccaggatactcccagcctccagctgggaactcttttaacctgcagctgtctgtctgggactgggatttacgttatagcaatgcacagatactacaattccagaatcctggctatgacccagaacactgtccagattcctggctccctagaccacagccaagcttcatggttcctggaccccccagttctgtgtggctcttctctagaggagcattgacccccctgaatcagctctgtccttggcgggacagtccttccctgctggcagtctcttctcgttggctccctcgacctgctatctcctctgaaagcctggctgaccaggaatggggtctcccctcacattggggagcttgccctttacctccagggctgctgctgcctgggtatctgggaccccagatcaggctctggagacgctgctacctgaggggaaggcctgaggtccagatgggcctctcagctcccacaatctctggcctccaggatgagctatcccatcttcaggagttattacggaaatggacaccaagaatatctcctgaggatcactccaagaaaagagatccacataccattctcaatcccactgaaattgctggcattctcaaaggcagggcagagggggatctggggtagaggagggttctgtctaatctttttttttttyttttgtatctgcacttgcagcctcagctttcayacttcagcccttaagttcactaagaaggtctgagtttctgytgcagatagtggtgttaactgctccaactcttgtcttgcttagtttctacaaatatttttgcttcttgtcatttgaaggattaagaaacaaaaacaatccagaaattgatcggtttttttaggccaatcccatcccttctggataaccagatgttaaatcatgagatcagagatgctgttcatcagtcccaacaagatggcctagaaatcgcattctcacctcgccttgctgctgctttaattccaagttctatttcttcccttatagttttctatgggaatgaggcggatacaggaaacaccctrtctcctctgtatttttgtagtggaatttctatttaaggggctcattaaagcatagtatttatacac

SEQ ID NO: 6196 - DNA, 2896 bp, Homo sapiens
  misc_feature (1)...(2896): n = A,T,C or G
ctcaggctgggctggacacacctttccaaggacccccaaactctgctccgtgcacgtcaaatgctcctttcccttgtgtccaaccccctacccctctccctaacacccctcttctcaacaagactcagcytctccccgaggtgggtgagcatccttgaggtttcccacccttaactgctgtgtccccggatggagccagagaaatgtggtgggggggccggggccagagtttcaacattgccccccagaaggaggagccagagatggggccctgttaggtctggagctccccacagacactgatctcagtttcccccgagagtgtgagtgtaggcctctacaggcagctgcctytggggagytggggagcctaggggttaactctagacccccctcaaccctctggaccaaagtctgtccaggaaaayaggatgccggagcccaggagtcgtcagcctagcagttgcctggcctccagatgcctcccaggggagcagatcctagcatgggccccaggggtgaggaagggcctggaaccagaattgtctggaaccctgatctgtaccaactttagggtcaccttccagccctgtggatggcagtggaatcaggacactcccttgaacagtgaatacgattttgccctggtcaacattggacgattagaggctgtgagcggcttgtcccgagtccagctcctccrtccagggtccctgcataaatttatccctgaggagattctgattcatggccgagacttccggctgctcagagttggttttgaggctggargcctagagcctcaggcttttcaggtgaccntggccattgtccaagccagagctcagagcaatcaagcccaacagtattcggggataaccctgagcaaggctggccagggttctggctccagaaaaccaccaattcctctcatggagacagcggamgactgggagactgagcggaagaagcaggcagccagaggctggagggtcagcacggtcaacgagaggttcgacgtagccaccaggctccggtgtttctcctcttccttgattgtgtctggcagctcctccagcagtttccagctgattttgaattctctgagtttttccttcttgctcttcatgacagtgtcagrgttcctgacacccttaccttcctgagaaataccccctgggagcgcggaaagcagagcggacaggtcagtgacttctatttttgactcgtgtttttttttccattgagatgtactctctgaagtttggtcttgatttgttttatgagaagtgaggtctgygagtggggagggggagatttattctcattttcaggacgagacttttgccctacatctttcctagaataagaggtgagaatctcatgatttgtctctagatgtgggaggattgtgtgtaaccatcctttttcttgcttcctctgtccagttaaactcctatacacaagtctacaccccaggatactcccagcctccagctgggaactcttttaacctgcagctgtctgtctgggactgggatttacgttatagcaatgcacagatactacaattccagaatcctggctatgacccagaacactgtccagattcctggctccctagaccacagccaagcttcatggttcctggaccccccagttctgtgtggctcttctctagaggagcattgacccccctgaatcagctctgtccttggcgggacagtccttccctgctggcagtctcttctcgttggctccctcgacctgctatctcctctgaaagcctggctgaccaggaatggggtctcccctcacattggggagcttgccctttacctccagggctgctgctgcctgggtatctgggaccccagatcaggctctggagacgctgctacctgaggggaaggcctgaggtccaggtaagaagggaaaatagactgggagtgggacaagggacttgactctgctgaaccagatgaacaggagctggaaaggcaaggagctgaagcctctgggagtctgggaagtgaagttctactcctcttggcatcaaacaaggtttgggagtgtaggaggtgcgggaaagtgcttgtggcttagattaagtggaatttagggcatagctgaaaggggaaacagaattaaagacaccagaagtagcagagaagcagggggccagagctacaacagtattcttctctgttcctctttgcctcctccccagatgggcctctcagctcccacaatctctggcctccaggatgagctatcccatcttcaggagttattacggaaatggacaccaagaatatctcctgaggatcactccaagaaaagagatccacataccattctcaatcccactgaaattgctggcattctcaaaggcagggcagagggggatctggggtagaggagggttctgtctaatctttttttttttyttttgtatctgcacttgcagcctcagctttcayacttcagcccttaagttcactaagaaggtctgagtttctgytgcagatagtggtgttaactgctccaactcttgtcttgcttagtttctacaaatatttttgcttcttgtcatttgaaggattaagaaacaaaaacaatccagaaattgatcggtttttttaggccaatcccatcccttctggataaccagatgttaaatcatgagatcagagatgctgttcatcagtcccaacaagatggcctagaaatcgcattctcacctcgccttgctgctgctttaattccaagttctatttcttcccttatagttttctatgggaatgaggcggatacaggaaacaccctrtctcctctgtatttttgtagtggaatttctatttaaggggctcattaaagcatagtatttatacac

SEQ ID NO: 6197 - DNA, 2782 bp, Homo sapiens
  misc_feature (1)...(2782): n = A,T,C or G
cagagtcgactgaagtttccgaggagacttctcaggctgggctggacacacctttccaaggacccccaaactctgctccgtgcacgtcaaatgctcctttcccttgtgtccaaccccctacccctctccctaacacccctcttctcaacaagactcagcytctccccgaggtgggtgagcatccttgaggtttcccacccttaactgctgtgtccccggatggagccagagaaatgtggtgggggggccggggccagagtttcaacattgccccccagaaggaggagccagagatggggtctgtccaggaaaayaggatgccggagcccaggagtcgtcagcctagcagttgcctggcctccagatgcctcccaggggagcagatcctagcatgggccccaggggtgaggaagggcctggaaccagaattgtctggaaccctgatctgtaccaactttagggtcaccttccagccctgtggatggcagtggaatcaggacactcccttgaacagtgaatacgattttgccctggtcaacattggacgattagaggctgtgagcggcttgtcccgagtccagctcctccrtccagggtccctgcataaatttatccctgaggagattctgattcatggccgagacttccggctgctcagagttggttttgaggctggargcctagagcctcaggcttttcaggtgaccntggccattgtccaagccagagctcagagcaatcaagcccaacagtattcggggataaccctgagcaaggctggccagggttctggctccagaaaaccaccaattcctctcatggagacagcggamgactgggagactgagcggaagaagcaggcagccagaggctggagggtcagcacggtcaacgagaggttcgacgtagccaccaggctccggtgtttctcctcttccttgattgtgtctggcagctcctccagcagtttccagctgattttgaattctctgagtttttccttcttgctcttcatgacagtgtcagrgttcctgacacccttaccttcctgagaaataccccctgggagcgcggaaagcagagcggacaggtcagtgacttctatttttgactcgtgtttttttttccattgagatgtactctctgaagtttggtcttgatttgttttatgagaagtgaggtctgygagtggggagggggagatttattctcattttcaggacgagacttttgccctacatctttcctagaataagaggtgagaatctcatgatttgtctctagatgtgggaggattgtgtgtaaccatcctttttcttgcttcctctgtccagttaaactcctatacacaagtctacaccccaggatactcccagcctccagctgggaactcttttaacctgcagctgtctgtctgggactgggatttacgttatagcaatgcacagatactacaattccagaatcctggctatgacccagaacactgtccagattcctggctccctagaccacagccaagcttcatggttcctggaccccccagttctgtgtggctcttctctagaggagcattgacccccctgaatcagctctgtccttggcgggacagtccttccctgctggcagtctcttctcgttggctccctcgacctgctatctcctctgaaagcctggctgaccaggaatggggtctcccctcacattggggagcttgccctttacctccagggctgctgctgcctgggtatctgggaccccagatcaggctctggagacgctgctacctgaggggaaggcctgaggtccaggtaagaagggaaaatagactgggagtgggacaagggacttgactctgctgaaccagatgaacaggagctggaaaggcaaggagctgaagcctctgggagtctgggaagtgaagttctactcctcttggcatcaaacaaggtttgggagtgtaggaggtgcgggaaagtgcttgtggcttagattaagtggaatttagggcatagctgaaaggggaaacagaattaaagacaccagaagtagcagagaagcagggggccagagctacaacagtattcttctctgttcctctttgcctcctccccagatgggcctctcagctcccacaatctctggcctccaggatgagctatcccatcttcaggagttattacggaaatggacaccaagaatatctcctgaggatcactccaagaaaagagatccacataccattctcaatcccactgaaattgctggcattctcaaaggcagggcagagggggatctggggtagaggagggttctgtctaatctttttttttttyttttgtatctgcacttgcagcctcagctttcayacttcagcccttaagttcactaagaaggtctgagtttctgytgcagatagtggtgttaactgctccaactcttgtcttgcttagtttctacaaatatttttgcttcttgtcatttgaaggattaagaaacaaaaacaatccagaaattgatcggtttttttaggccaatcccatcccttctggataaccagatgttaaatcatgagatcagagatgctgttcatcagtcccaacaagatggcctagaaatcgcattctcacctcgccttgctgctgctttaattccaagttctatttcttcccttatagttttctatgggaatgaggcggatacaggaaacaccctrtctcctctgtatttttgtagtggaatttctatttaaggggctcattaaagcatagtatttatacac

SEQ ID NO: 6198 - DNA, 2046 bp, Homo sapiens
atgtctcacctgcggatgaaactcctgtgcaagaagatacaaaagcggaacctcaaattgcggmagcagaacctaaagttgcagggggcctcaaatctgaccctatcagaaactcaaaatggaaatgtgtctgaagaaacaatgggaggtggaaaggttaaaaaatcaaaacattctatgaacatgggcttatcaggagctccaaatggagacatgtctcaagaagcagtggaaaatataaaagttaaaaaatctccccagaaatccaccatattaatcaatggagaagcagcaatgcagtctcccaattcagaatcaaaaaagaaaaagaagaagaaaaagagaaaaatgctgaacgatgttgtgcctgatacaaaaaaagcaaaaactgaaaacaaaggggaatctgaagaagaaagtgcagagactcctaaagaaacagaaaataatgtggagaagccagataatgatgaagatgatagtgaggtgcccagcctgcccctgggactgacaggagcttttgaggatacttcatttgtttctctacataatcttgtcaatgaaaacactctgaaggcaataaaagaaatgggttttacaaacatgactgaaattcagcacaaaagtatcagaccacttctggaaggcagggacttctggcagctgcaaaaacaggcagtgacttgccaggtacatacctatgggttgataatgggtggcagtaacagatctgctgaagcacagaaacttgctaatgggatcaacatcattgtggccacaccaggctgtctgctggaccatatgcagaataccccagggtttatgtataaaaacctgcagtgtctggttattgatgaagctgatcatatcttggatgttgggtttgaagaggaattaaagcaagttattaaacttttgccaacatgtagacagactatgctcttttctgccacccaaactcaaaaagttgaaggcctggcaaggatttctctgaaaaaggagccattgtattttggtgttgatgatgataaagctaatgcaacagtgaatggtcttgagcagggatatgttgtttgtccttccaaaaagagattccttctgctctttacattccttaagaagaaacaaaagaagaagcttatggccttcttttcatcttgtatgtccgtgaaatacccctatgagttgctgaactacattgatttgccctacgtggccattcatggaaagcaaaagcaaaataagtgtacaaccacattcttccagttctgcaacccagattcaggaacactattgtgtacggatgtggcaacaagaggactggacattcctgaagttgactggattgttcagtatgaccctccggatgaccctaaggaatatattcattccatagacacatacagttctgcaaactctcacacacatcaccagtcatttgaaatgatttgggtcttcttaataggaaatcatgccaacatatcaaagacactgaagcgaagggtgaatgtccatactgctggagcacatgtgatggagagaaccaaactgttttgcatggtgcagagcaccatgcaaaaaagaaaaacaaataaagcagccgaagaaaccttccaagttgatttggagactgaagaaacagccagttgtggggggccagccttggaaavttcttccatgtctctatcaccagagactctgccaaggagagaggaaggctgcaacatcaagctcttccgcatccccttcaaaactccaggtgagctagagcccttaagtgccttcgagaacagcagctgggggtggacgtatttgtcaccccaaaggagcctgsttcctggagcagcccctggagggacacagagagagcctccaccgtctcctgagtcggtcttagagaacgagtctgccagggagctgaagcaatttttcctccttgcatttttcttgttttctccaaaagtggaccccattcctcccactcttggttcctcatgctcctctattccatccccaggccagactctcaagagttggatgactgag

SEQ ID NO: 6199 - DNA, 1278 bp, Homo sapiens
atggcggactatctgagcaactgctgcaccggctacgtgcctgaggacgggctcatcccacagcagctcttcaccagcgctgacggcctcacctacaacgacgtcccgattctcccaggattcatagacttcatagctgatgaggtggacctgacctcagtcctgacccggaagatcacgctgaagacgccgctgacgctgatctcctcccccatggacactgtgacagaggccgacatggccattgcgatggctctgatgggaggtattggtttcattcaccacaactgcaccccagagttccaggccaagagacctggtggtgctgagcccctcgcacactgtggttatgtgctggaggccaagatgcggcatggcttctctggcattccgatgactgagacggacatcatgggtagcaagctggtgggcatcatcacctccgcggacatcaactttcttgctgagaaggatcacaacaccctcctcagtgaggtgatgatgccaaggatcgagctggtggtggctccagcaggcgtgatgttgaaagaggcaaatgagatcctgcagcgtagcaagaaagrgaagctgcctatcgtcaacgatctcgatgagctggtggccattatcgcctgcaccgacctgaagaagaaccgagactacccgctggcctccaakgattcccacgagcagctgctgtggcatatacatatatatgcagctgtgggcactcatgaggatggcaaatactgcctggacctgctcacccaggcgggcgacgacttcataatcttggactcatcccaagggaactcaagtgtatcagatcgccatwgtgcattacatcaaacagaagtaccccaacctccaggaagtgatggcctgcggtcggccccagggcactgctgtgtacaaggtggccaagtatgcccaacgctttggtgtgcccatcataggaccgtggagcatgtggtcaaggccctggaacttggagcctccacagtgatgatgggctgcctgctggctgccatcacggaggccccctgcaagtacttctcagacgggaagcaccagggcatgggctcactggatgccatggagaagagcagcagcagccagaaacaatacttcagcgagggggataaggtgaagatcacgcagggtgtctcgtgttccatccagtacaaaggagggctcaagtttgagaagcagaccgtgttggcccagatcgagggtggtgtccatggcctgtgctctcacgagaagcggctgtactga

SEQ ID NO: 6200 - DNA, 1248 bp, Homo sapiens
atggcggactatctgagcaactgctgcaccggctacgtgcctgaggacgggctcatcccacagcagctcttcaccagcgctgacggcctcacctacaacgacgtcccgattctcccaggattcatagacttcatagctgatgaggtggacctgacctcagtcctgacccggaagatcacgctgaagacgccgctgacgctgatctcctcccccatggacactgtgacagaggccgacatggccattgcgatggctctgatgggaggtattggtttcattcaccacaactgcaccccagagttccaggccaagagacctggtggtgctgagcccctcgcacactgtggttatgtgctggaggccaagatgcggcatggcttctctggcattccgatgactgagacggacatcatgggtagcaagctggtgggcatcatcacctccgcggacatcaactttcttgctgagaaggatcacaacaccctcctcagtgaggtgatgatgccaaggatcgagctggtggtggctccagcaggcgtgatgttgaaagaggcaaatgagatcctgcagcgtagcaagaaagrgaagctgcctatcgtcaacgatctcgatgagctggtggccattatcgcctgcaccgacctgaagaagaaccgagactacccgctggcctccaakgattcccacgagcagctgctgtggggaactcaagtgtatcagatcgccatwgtgcattacatcaaacagaagtaccccaacctccaggtgattggggggaacatagtgacagcagcccagggaaagaacctgattgatgctggtgtggacgggctgcgcgtggggatgggctgcagctccatctgcatcacccaggaagtgatggcctgcggtcggccccagggcactgctgtgtacaaggtggccaagaccgtggagcatgtggtcaaggccctggaacttggagcctccacagtgatgatgggctgcctgctggctgccatcacggaggccccctgcaagtacttctcagacgggaagcaccagggcatgggctcactggatgccatggagaagagcagcagcagccagaaacaatacttcagcgagggggataaggtgaagatcacgcagggtgtctcgtgttccatccagtacaaaggagggctcaagtttgagaagcagaccgtgttggcccagatcgagggtggtgtccatggcctgtgctctcacgagaagcggctgtactga

SEQ ID NO: 6201 - DNA, 1525 bp, Homo sapiens
cgctcgggcagcgccaccgccacgagagcccgggacgcgggaaagaccgaaaggaagaggaagaggcaccggtggccatggggctggaggcggcgcgcgaggcgcggccctcctgccgccgttctcgcctgcctgctgcccgaccgcgcgctgcggacgcgcctggtccgcggggagctggcgcgggccgtggtgctggacgagggcagtgcctcggtggcggagctccggcccgacagcccggctcatgtgctgctggccgcgctgctgcacgagacccgcgcggggcccactgccgtgtacttcctgcgaggaggcttcgacggcttccagggctgctgtcccgatctgtgctctgaggcccccgcccctgcgctgccgccaacaggggacaaaaccagccgctccgactccagggctcctgtctacgaccagggtggccctgtggagatcttgccctacctgttcctgggcagctgcagtcactcgtcagacctgcaggggctgcaggcctgtggcatcacagccgtcctcaacgtgtccgccagctgccccaaccactttgagggccttttccgctacaagagtatccctgtggaggacaaccagatggtggagatcagtgcctggttccaggaggccataggcttcattgactgggtgaagaacagcggaggccgggtgctggtgcactgccaggcgggtatctcgcgctctgccaccatctgtctggcatacctcatgcagagtcgccgtgtgcggctggacgaggcctttgacttcgttaagcagcgccggggggtcatctcccccaacttcagtttcatggggcagctgctgcagtttgagacccaggtgctgtgtcactgaggtggtgcccctctgcctscctgccccactgtgctggcaggagctgactgtggactggtgggctcccctctgggccagcacagtcccctcacctctggcagggctgctacctcctcagagtttcagaagcccccacatgggggctctaggaatgccggcatgctggtctttcmgacctggtgctcttctgctgggggactgaggctggccctcattcggggtcgggaaccragggtgtgtctgctctttccctccccatcctctggcagaaatcagctagacgctataccgtggactctccctggtccaccaccatgttgaagcccttggcagcctgagagctccaaggaacaagctgtgacaaccaggagccctgtctgtgggttcgtctgcccagggcctggagcccaagccctgtgttcctggggaagctggggacttgggaagtgatgggtgtgtcatgttgcgtgtgtctgtctgtgagcctttcacacctgtgctggcgctggaaaattatttgtgctcagctgacatttaacactccctcccccgcttcctcctagccctgtgggcaggggttggaaacttagcactttatatttatacagaacattcaggatatgtcaataaaatattgttatatttaaaaaacaac

SEQ ID NO: 6202 - DNA, 1687 bp, Homo sapiens
ggagtcgaccgctcgggcagcgccaccgccacgagagcccgggacgcgggaaagaccgaaaggaagaggaagaggcaccggtggccatggggctggaggcggcgcgcgagctggagtgcgcggcgctgggcacgctgctgcgggatccgcgggaggcggaacgcacgctgctgctggactgccgccccttcctggccttctgccggcgccacgtgcgcgccgcgcggccagtgccttggaacgcgctgctgcggcgccgcgcgcgcggccctcctgccgccgttctcgcctgcctgctgcccgaccgcgcgctgcggacgcgcctggtccgcggggagctggcgcgggccgtggtgctggacgagggcagtgcctcggtggcggagctccggcccgacagcccggctcatgtgctgctggccgcgctgctgcacgagacccgcgcggggcccactgccgtgtacttcctgcgaggaggcttcgacggcttccagggctgctgtcccgatctgtgctctgaggcccccgcccctgcgctgccgccaacaggggacaaaaccagccgctccgactccagggctcctgtctacgaccaggcctcaccgcccctctgttccctccagggtggccctgtggagatcttgccctacctgttcctgggcagctgcagtcactcgtcagacctgcaggggctgcaggcctgtggcatcacagccgtcctcaacgtgtccgccagctgccccaaccactttgagggccttttccgctacaagagtatccctgtggaggacaaccagatggtggagatcagtgcctggttccaggaggccataggcgccgggtgctggtgcactgccaggcgggtatctcgcgctctgccaccatctgtctggcatacctcatgcagagtcgccgtgtgcggctggacgaggcctttgacttcgttaagcagcgccggggggtcatctcccccaacttcagtttcatggggcagctgctgcagtttgagacccaggtgctgtgtcactgaggtggtgcccctctgcctscctgccccactgtgctggcaggagctgactgtggactggtgggctcccctctgggccagcacagtcccctcacctctggcagggctgctacctcctcagagtttcagaagcccccacatgggggctctaggaatgccggcatgctggtctttcmgacctggtgctcttctgctgggggactgaggctggccctcattcggggtcgggaaccragggtgtgtctgctctttccctccccatcctctggcagaaatcagctagacgctataccgtggactctccctggtccaccaccatgttgaagcccttggcagcctgagagctccaaggaacaagctgtgacaaccaggagccctgtctgtgggttcgtctgcccagggcctggagcccaagccctgtgttcctggggaagctggggacttgggaagtgatgggtgtgtcatgttgcgtgtgtctgtctgtgagcctttcacacctgtgctggcgctggaaaattatttgtgctcagctgacatttaacactccctcccccgcttcctcctagccctgtgggcaggggttggaaacttagcactttatatttatacagaacattcaggatatgtcaataaaatattgttatatttaaaaaacaacaa

SEQ ID NO: 6203 - DNA, 1483 bp, Homo sapiens
ggagtcgaccgctcgggcagcgccaccgccacgagagcccgggacgcgggaaagaccgaaaggaagaggaagaggcaccggtggccatggggctggaggcggcgcgcgagctggagtgcgcggcgctgggcacgctgctgcgggatccgcgggaggcggaacgcacgctgctgctggactgccgccccttcctggccttctgccggcgccacgccgcgctgctgcacgagacccgcgcggggcccactgccgtgtacttcctgcgaggaggcttcgacggcttccagggctgctgtcccgatctgtgctctgaggcccccgcccctgcgctgccgccaacaggggacaaaaccagccgctccgactccagggctcctgtctacgaccaggcctcaccgcccctctgttccctccagggtggccctgtggagatcttgccctacctgttcctgggcagctgcagtcactcgtcagacctgcaggggctgcaggcctgtggcatcacagccgtcctcaacgtgtccgccagctgccccaaccactttgagggccttttccgctacaagagtatccctgtggaggacaaccagatggtggagatcagtgcctggttccaggaggccatagcggaggccgggtgctggtgcactgccaggcgggtatctcgcgctctgccaccatctgtctggcatacctcatgcagagtcgccgtgtgcggctggacgaggcctttgacttcgttaagcagcgccggggggtcatctcccccaacttcagtttcatggggcagctgctgcagtttgagacccaggtgctgtgtcactgaggtggtgcccctctgcctscctgccccactgtgctggcaggagctgactgtggactggtgggctcccctctgggccagcacagtcccctcacctctggcagggctgctacctcctcagagtttcagaagcccccacatgggggctctaggaatgccggcatgctggtctttcmgacctggtgctcttctgctgggggactgaggctggccctcattcggggtcgggaaccragggtgtgtctgctctttccctccccatcctctggcagaaatcagctagacgctataccgtggactctccctggtccaccaccatgttgaagcccttggcagcctgagagctccaaggaacaagctgtgacaaccaggagccctgtctgtgggttcgtctgcccagggcctggagcccaagccctgtgttcctggggaagctggggacttgggaagtgatgggtgtgtcatgttgcgtgtgtctgtctgtgagcctttcacacctgtgctggcgctggaaaattatttgtgctcagctgacatttaacactccctcccccgcttcctcctagccctgtgggcaggggttggaaacttagcactttatatttatacagaacattcaggatatgtcaataaaatattgttatatttaaaaaacaacaa

SEQ ID NO: 6204 - DNA, 1529 bp, Homo sapiens
cgctcgggcagcgccaccgccacgagagcccgggacgcgggaaagaccgaaaggaagaggaagaggcaccggtggccatggggctggaggcggcgcgcgaggcgcggccctcctgccgccgttctcgcctgcctgctgcccgaccgcgcgctgcggacgcgcctggtccgcggggagctggcgcgggccgtggtgctggacgagggcagtgcctcggtggcggagctccggcccgacagcccggctcatgtgctgctggccgcgctgctgcacgagacccgcgcggggcccactgccgtgtacttcctgcgaggaggcttcgacggcttccagggctgctgtcccgatctgtgctctgaggcccccgcccctgcgctgccgccaacaggggacaaaaccagccgctccgactccagggctcctgtctacgaccaggcctcaccgcccctctgttccctccagggtggccctgtggagatcttgccctacctgttcctgggcagctgcagtcactcgtcagacctgcaggggctgcaggcctgtggcatcacagccgtcctcaacgtgtccgccagctgccccaaccactttgagggccttttccgctacaagagtatccctgtggaggacaaccagatggtggagatcagtgcctggttccaggaggccatagcggaggccgggtgctggtgcactgccaggcgggtatctcgcgctctgccaccatctgtctggcatacctcatgcagagtcgccgtgtgcggctggacgaggcctttgacttcgttaagcagcgccggggggtcatctcccccaacttcagtttcatggggcagctgctgcagtttgagacccaggtgctgtgtcactgaggtggtgcccctctgcctscctgccccactgtgctggcaggagctgactgtggactggtgggctcccctctgggccagcacagtcccctcacctctggcagggctgctacctcctcagagtttcagaagcccccacatgggggctctaggaatgccggcatgctggtctttcmgacctggtgctcttctgctgggggactgaggctggccctcattcggggtcgggaaccragggtgtgtctgctctttccctccccatcctctggcagaaatcagctagacgctataccgtggactctccctggtccaccaccatgttgaagcccttggcagcctgagagctccaaggaacaagctgtgacaaccaggagccctgtctgtgggttcgtctgcccagggcctggagcccaagccctgtgttcctggggaagctggggacttgggaagtgatgggtgtgtcatgttgcgtgtgtctgtctgtgagcctttcacacctgtgctggcgctggaaaattatttgtgctcagctgacatttaacactccctcccccgcttcctcctagccctgtgggcaggggttggaaacttagcactttatatttatacagaacattcaggatatgtcaataaaatattgttatatttaaaaaacaacaa

SEQ ID NO: 6205 - DNA, 1686 bp, Homo sapiens
ggagtcgaccgctcgggcagcgccaccgccacgagagcccgggacgcgggaaagaccgaaaggaagaggaagaggcaccggtggccatggggctggaggcggcgcgcgagctggagtgcgcggcgctgggcacgctgctgcgggatccgcgggaggcggaacgcacgctgctgctggactgccgccccttcctggccttctgccggcgccacgtgcgcgccgcgcggccagtgccttggaacgcgctgctgcggcgccgcgcgcgcggccctcctgccgccgttctcgcctgcctgctgcccgaccgcgcgctgcggacgcgcctggtccgcggggagctggcgcgggccgtggtgctggacgagggcagtgcctcggtggcggagctccggcccgacagcccggctcatgtgctgctggccgcgctgctgcacgagacccgcgcggggcccactgccgtgtacttcctgcgaggaggcttcgacggcttccagggctgctgtcccgatctgtgctctgaggcccccgcccctgcgctgccgccaacaggggacaaaaccagccgctccgactccagggctcctgtctacgaccagggtggccctgtggagatcttgccctacctgttcctgggcagctgcagtcactcgtcagacctgcaggggctgcaggcctgtggcatcacagccgtcctcaacgtgtccgccagctgccccaaccactttgagggccttttccgctacaagagtatccctgtggaggacaaccagatggtggagatcagtgcctggttccaggaggccataggcttcattgactgggtgaagaacagcggaggccgggtgctggtgcactgccaggcgggtatctcgcgctctgccaccatctgtctggcatacctcatgcagagtcgccgtgtgcggctggacgaggcctttgacttcgttaagcagcgccggggggtcatctcccccaacttcagtttcatggggcagctgctgcagtttgagacccaggtgctgtgtcactgaggtggtgcccctctgcctscctgccccactgtgctggcaggagctgactgtggactggtgggctcccctctgggccagcacagtcccctcacctctggcagggctgctacctcctcagagtttcagaagcccccacatgggggctctaggaatgccggcatgctggtctttcmgacctggtgctcttctgctgggggactgaggctggccctcattcggggtcgggaaccragggtgtgtctgctctttccctccccatcctctggcagaaatcagctagacgctataccgtggactctccctggtccaccaccatgttgaagcccttggcagcctgagagctccaaggaacaagctgtgacaaccaggagccctgtctgtgggttcgtctgcccagggcctggagcccaagccctgtgttcctggggaagctggggacttgggaagtgatgggtgtgtcatgttgcgtgtgtctgtctgtgagcctttcacacctgtgctggcgctggaaaattatttgtgctcagctgacatttaacactccctcccccgcttcctcctagccctgtgggcaggggttggaaacttagcactttatatttatacagaacattcaggatatgtcaataaaatattgttatatttaaaaaacaac

SEQ ID NO: 6206 - DNA, 7160 bp, Homo sapiens
gcgtctttcctrcgtcgttccggcgcggcgggagcagagatctgcggccgtttgcagcttgcggtagggaggcgtggtggtctgaagcctccgagcagccgcggccatggcggatgtaaccgcccgtagtctgcaatacgagtacaaggcgaactcgaatcttgtgctccaagctgaccgttctctcattgaccggacccgccgggatgaacccacaggagaggtgctgtcccttgttgggaagctggagggcacccgtatgggagacaaggctcaacggaccaaaccgcagatgcaggaggaaagaagagccaagcgaagaaagcgtgatgaggaccggcatgacatcaacaagatgaagggttatactctgctgtcggagggcattgatgagatggtgggcatcatctacaagcccaaaactaaagagactcgggagacctatgaggtgctactcagcttcatccaggctgctcttggggaccagccacgtgatatcctttgtggggcagctgatgaagttctagctgttctaaagaatgaaaagctgcgggacaaggaaaggcgaaaggagattgacctgctgctgggtcaaacagatgataccagataccatgtgctagtgaacctgggcaaaaagatcacagactatggtggagataaggaaatccaaaatatggatgacaacattgatgagacatacggtgtgaatgtgcagtttgagtctgatgaggaggaaggtgatgaagacgtatacggggaggttcgagaagaggcatctgatgatgacatggaaggggacgaggctgtcgtgcgctgcaccctctcrgctaatctcgtagcctcaggtgaactgatgagttccaagaagaaggatttgcaccctcgggatattgatgcattttggctgcagcggcagctcagtcgtttctatgatgatgccatcgtgtcgcagaagaaggcagatgaagtattggagattttgaagacggccagtgatgatcgggaatgtgaaaatcagctggttctgctgcttggtttcaacacctttgatttcattaaagtgttgcggcagcacaggatgatgattttatactgtaccttgctggccagtgcacaaagtgaagctgaaaaggaaaggattatgggaaagatggaagctgacccagagctatccaagttcctctaccagcttcatgaaaccgagaaggaggatctgatccgagaggaaaggtcccggagagagcgagtgcgtcagtctcgaatggacacagatctggaaaccatggatctcgaccagggtggagaggcactggctccacggcaggttctggacttggaggacctggtttttacccaagggagccactttatggccaataaacgctgtcagcttcctgatggatccttccgtcgccagcgtaagggctatgaagaggtgcatgtgcctgctctgaagcccaagccctttggctcagaagaacaactgcttccagtggaaaagctgccaaagtatgcccaggctgggtttgagggcttcaaaacactgaatcggatccagagtaagctctaccgtgctgcccttgagacggatgagaatctgctgctgtgtgctcctactggtgctgggaagaccaacgtggccctgatgtgcatgctccgagagattgggaaacacataaacatggacggcaccatcaatgtggatgacttcaagattatctacattgcccccatgcgctccttggtgcaggagatggtgggcagctttggaaagcgcctggccacttatggcatcactgttgctgaactgactggggaccaccagctgtgcaaagaagagatcagtgccactcagatcatcgtctgcacccccgagaagtgggacatcatcacccgcaagggtggtgagcgcacctacacccagctggtgcggctcatcattctggatgagattcatcttctccacgatgacagaggtcctgtcttagaagctttagtggccagggccatccgaaacattgagatgacccaagaggatgtccgactcattggtctcagtgccaccctacccaactatgaagatgtagccacctttctacgtgttgaccctgccaagggtctcttttactttgacaacagcttccgtccagtgcctctggaacagacatatgtgggtatcacagagaaaaaagctatcaagcgtttccagatcatgaatgaaatcgtctatgaaaaaatcatggaacatgctggaaaaaatcaggtgctggtgtttgtccactcccggaaggagactggaaagacagccagggccatccgggacatgtgcctagaaaaggacactctgggtctgtttctgagggagggctcagcctccacagaagtcctgcgaacagaagctgagcagtgcaagaacctagagctgaaggatcttctgccttatggctttgctattcatcacgcaggcatgaccagggttgaccgaacactcgtggaggatctttttgctgataaacatattcaggttttagtttccacagcaactctagcttggggtgtgaatctccctgcacatacagtcatcatcaaaggcacccaggtgtacagtccagagaaggggcgttggacagaactgggagcactggacattctgcagatgctgggacgtgccggaagaccccagtatgacaccaagggtgaaggcatactcatcacatctcatggggagctacagtactacctgtccctcctcaatcaacaacttcctattgaaagccagatggtttcaaagcttcctgacatgctcaatgcagaaatcgtgctaggaaatgtccagaatgccaaggatgcggtgaactggctgggctatgcctacctctatatccgaatgctgcgatccccaaccctctatggcatctctcatgatgacctcaagggagatcccctgctggaccagcgccgactagatctggttcatacagctgccctgatgctggacaagaacaatctggtcaagtacgacaagaagacgggcaacttccaggtgacagaactgggccgtatagccagccactactacatcaccaatgatacagtgcagacttacaaccagctgctgaagcccaccctgagtgagattgagcttttcagggtcttctcattgtcctctgagttcaagaacatcacagtgagagaggaggagaagctggagctgcagaagttgctggagagggtgcctatccctgtaaaggagagcattgaggaacccagtgctaagatcaacgttcttctgcaagccttcatctcacagctgaaattggagggctttgcactgatggctgacatggtgtatgtcacacagtcggctggccggttgatgcgagcgatatttgaaattgtcctgaaccgaggttgggcacagcttacagacaagaccctgaacctctgcaagatgatcgacaaacgcatgtggcagtccatgtgtcctctgcgccagttccggaaactccctgaggaagtagtgaagaagattgagaagaagaatttcccctttgagcgtctgtacgacctgaatcataatgagattggggagcttatccgcatgccaaagatggggaagaccatccacaaatatgtccatctgtttcccaagytggagttgtcagtgcacctgcagcctatcacacgctccaccctgaaggtggagctgaccatcacgccagacttccagtgggatgaaaaggtgcatggttcatccgaggctttttggattctggtggaggatgtggacagcgaggtgattctgcaccatgagtattttctcctcaaggccaagtacgcccaggacgagcacctcattacattcttcgtgcctgtctttgaaccgctgccccctcagtacttcatccgagtggtgtctgaccgctggctctcttgtgagacccagctgcctgtctccttccggcacctgatcttgccggagaagtacccccctccaaccgaacttttggacctgcagcccttgcccgtgtctgctctgagaaacagtgcctttgagagtctttaccaagataaatttcctttcttcaatcccatccagacccaggtgtttaacactgtatacaacagtgacgacaacgtgtttgtgggggcccccacgggcagcgggaagactatttgtgcagagtttgccatcctgcgaatgctgctgcagagctcggaggggcgctgtgtgtacatcacccccatggaggccctggcagagcaggtatacatggactggtacgagaagttccaggacaggctcaacaagaaggtggtactcctgacaggcgagaccagcacagacctgaagctgctgggcaaagggaacattatcatcagcacccctgagaagtgggacatactttcccggcgatggaagcagcgcaagaacgtgcagaacatcaacctcttcgtggtggatgaggtccaccttatcgggggcgagaatgggcctgtcttagaagtgatctgctcccgaatgcgctacatctcctcccagattgagcggcccattcgcattgtggcactcagctcttcgctctccaatgccaaggatgtggcccactggctgggctgcagtgccacctccaccttcaacttccatcccaatgtgcgtcccgtccccttggagctgcacatccagggcttcaacatcagccatacacaaacccgcctgctctccatggccaagcctgtgtaccatgctatcaccaagcactcgcccaagaagcctgtcattgtctttgtgccgtctcgcaagcagacccgcctcactgccattgacatcctcaccacctgtgcagcagacatccaacggcagaggttcttgcactgcaccgagaaggatctgattccgtacctggagaagctaagtgacagcacgctcaaggaaacgctgctaaatggggtgggctacctgcatgaggggctcagccccatggagcgacgcctggtggagcagctcttcagctcaggggctatccaggtggtggtggcttctcggagtctctgctggggcatgaacgtggctgcccacctggtaatcatcatggatacccagtactacaatggcaagatccacgcctatgtggattaccccatctatgacgtgcttcagatggtgggccacgccaaccgccctttgcaggacgatgaggggcgctgtgtcatcatgtgtcagggctccaagaaggatttcttcaagaagttcttatatgagccattgccagtagaatctcacctggaccactgtatgcatgaccacttcaatgctgagatcgtcaccaagaccattgagaacaagcaggatgctgtggactacctcacctggacctttctgtaccgccgcatgacacagaaccccaattactacaacytgcagggtcagctggtggagcagaccctgagtgacytggagcagtccaagtgcatcagcatcgaggacgagatggacgtggcgcctctgaacctaggcatgatcgccgcctactattacatcaactacaccaccattgagctcttcagcatgtccctcaatgccaagaccaaggtgcgagggcttatcgagatcatctccaatgcagcagagtatgagaacattcccatccggcaccatgaagacaatctcctgaggcagttggctcagaaggtcccccacaagctgaataaccctaagttcaatgatccgcacgtcaagaccaacctgctcctgcaggctcacttgtctcgcatgcagctgagtgctgagttgcagtcagatacggaggaaatccttagtaaggcaatccggctcatccaggcctgcgtggatgtcctttccagcaatgggtggctcagccctgctctggcagctatggaactggcccagatggtcacccaagccatgtggtccaaggactcatacctgaagcagctgccacacttcacctctgagcatatcaaacgttgcacagacaagggagtggagagtgttttcgacatcatggagatggaggatgaagaacggaacgcgttgcttcagctgactgacagccagattgcagatgtggctcgcttttgtaaccgctaccctaatatcgaactatcttatgaggtggtagataaggacagcatccgcagtggcgggccagttgtggtgctggtgcagctggagcgagaggaggaagtcacaggccctgtcattgcgcctctcttcccgcagaaacgtgaagagggctggtgggtggtgattggagatgccaagtccaatagcctcatctccatcaagaggctgaccttgcagcagaaggccaaggtgaagttggactttgtggccccagccactggtgcccacaactacactctgtacttcatgagtgacgcttacatgggatgtgaccaggagtacaaattcagygtggatgtgaaagaagctgagacagacagtgattcagattgagtcctgaggcatttacttttgggtaaaggagagttgagcctgaattaggaatgtgtacattgtaggaatcctggttgtggggascaggtctgtgggcctcaggtctggccagccagggctggtgctgtccccgcctacctccacttcctttcccttgctcactctggatccagtgacagcaggtgtcatgggtcaagcataaatcatatatagcattttcaggcatgttcctggtagttcttttgagtctgacattctaataaaataatttgtagaaaccatttgtctttgtagtgattccaaattaaaagttttctttctccaacctgagggcacggccaaaaagatctggttattttttagccaggaacgtgcttgttaatgagtatgtctggaggacagacctgctcattaggtgtgctgtcccctgtagcctcgtgagtcagcccagaggagggtacatgcgactgtggcctggcctcagtggtacccacacatcagcactaccacaagaaccaacactgagcctcggaagctagatcacaggttaggggtttctctagatgggggttctgaaatttgcagtgtctgctcctgggaggcagcaccagaaagggcactgaaatgtactagctggatgtgacccagtcttaataaacaggttttctaatccaga

SEQ ID NO: 6207 - DNA, 7193 bp, Homo sapiens
gcgtctttcctrcgtcgttccggcgcggcgggagcagagatctgcggccgtttgcagcttgcggtagggaggcgtggtggtctgaagcctccgagcagccgcggccatggcggatgtaaccgcccgtagtctgcaatacgagtacaaggcgaactcgaatcttgtgctccaagctgaccgttctctcattgaccggacccgccgggatgaacccacaggagaggtgctgtcccttgttgggaagctggagggcacccgtatgggagacaaggctcaacggaccaaaccgcagatgcaggaggaaagaagagccaagcgaagaaagcgtgatgaggaccggcatgacatcaacaagatgaagggttatactctgctgtcggagggcattgatgagatggtgggcatcatctacaagcccaaaactaaagagactcgggagacctatgaggtgctactcagcttcatccaggctgctcttggggaccagccacgtgatatcctttgtggggcagctgatgaagttctagctgttctaaagaatgaaaagctgcgggacaaggaaaggcgaaaggagattgacctgctgctgggtcaaacagatgataccagataccatgtgctagtgaacctgggcaaaaagatcacagactatggtggagataaggaaatccaaaatatggatgacaacattgatgagacatacggtgtgaatgtgcagtttgagtctgatgaggaggaaggtgatgaagacgtatacggggaggttcgagaagaggcatctgatgatgacatggaaggggacgaggctgtcgtgcgctgcaccctctcrgctaatctcgtagcctcaggtgaactgatgagttccaagaagaaggatttgcaccctcgggatattgatgcattttggctgcagcggcagctcagtcgtttctatgatgatgccatcgtgtcgcagaagaaggcagatgaagtattggagattttgaagacggccagtgatgatcgggaatgtgaaaatcagctggttctgctgcttggtttcaacacctttgatttcattaaagtgttgcggcagcacaggatgatgattttatactgtaccttgctggccagtgcacaaagtgaagctgaaaaggaaaggattatgggaaagatggaagctgacccagagctatccaagttcctctaccagcttcatgaaaccgagaaggaggatctgatccgagaggaaaggtcccggagagagcgagtgcgtcagtctcgaatggacacagatctggaaaccatggatctcgaccagggtggagaggcactggctccacggcaggttctggacttggaggacctggtttttacccaagggagccactttatggccaataaacgctgtcagcttcctgatggatccttccgtcgccagcgtaagggctatgaagaggtgcatgtgcctgctctgaagcccaagccctttggctcagaagaacaactgcttccagtggaaaagctgccaaagtatgcccaggctgggtttgagggcttcaaaacactgaatcggatccagagtaagctctaccgtgctgcccttgagacggatgagaatctgctgctgtgtgctcctactggtgctgggaagaccaacgtggccctgatgtgcatgctccgagagattgggaaacacataaacatggacggcaccatcaatgtggatgacttcaagattatctacattgcccccatgcgctccttggtgcaggagatggtgggcagctttggaaagcgcctggccacttatggcatcactgttgctgaactgactggggaccaccagctgtgcaaagaagagatcagtgccactcagatcatcgtctgcacccccgagaagtgggacatcatcacccgcaagggtggtgagcgcacctacacccagctggtgcggctcatcattctggatgagattcatcttctccacgatgacagaggtcctgtcttagaagctttagtggccagggccatccgaaacattgagatgacccaagaggatgtccgactcattggtctcagtgccaccctacccaactatgaagatgtagccacctttctacgtgttgaccctgccaagggtctcttttactttgacaacagcttccgtccagtgcctctggaacagacatatgtgggtatcacagagaaaaaagctatcaagcgtttccagatcatgaatgaaatcgtctatgaaaaaatcatggaacatgctggaaaaaatcaggtgctggtgtttgtccactcccggaaggagactggaaagacagccagggccatccgggacatgtgcctagaaaaggacactctgggtctgtttctgagggagggctcagcctccacagaagtcctgcgaacagaagctgagcagtgcaagaacctagagctgaaggatcttctgccttatggctttgctattcatcacgcaggcatgaccagggttgaccgaacactcgtggaggatctttttgctgataaacatattcaggttttagtttccacagcaactctagcttggggtgtgaatctccctgcacatacagtcatcatcaaaggcacccaggtgtacagtccagagaaggggcgttggacagaactgggagcactggacattctgcagatgctgggacgtgccggaagaccccagtatgacaccaagggtgaaggcatactcatcacatctcatggggagctacagtactacctgtccctcctcaatcaacaacttcctattgaaagccagatggtttcaaagcttcctgacatgctcaatgcagaaatcgtgctaggaaatgtccagaatgccaaggatgcggtgaactggctgggctatgcctacctctatatccgaatgctgcgatccccaaccctctatggcatctctcatgatgacctcaagggagatcccctgctggaccagcgccgactagatctggttcatacagctgccctgatgctggacaagaacaatctggtcaagtacgacaagaagacgggcaacttccaggtgacagaactgggccgtatagccagccactactacatcaccaatgatacagtgcagacttacaaccagctgctgaagcccaccctgagtgagattgagcttttcagggtcttctcattgtcctctgagttcaagaacatcacagtgagagaggaggagaagctggagctgcagaagttgctggagagggtgcctatccctgtaaaggagagcattgaggaacccagtgctaagatcaacgttcttctgcaagccttcatctcacagctgaaattggagggctttgcactgatggctgacatggtgtatgtcacacagtcggctggccggttgatgcgagcgatatttgaaattgtcctgaaccgaggttgggcacagcttacagacaagaccctgaacctctgcaagatgatcgacaaacgcatgtggcagtccatgtgtcctctgcgccagttccggaaactccctgaggaagtagtgaagaagattgagaagaagaatttcccctttgagcgtctgtacgacctgaatcataatgagattggggagcttatccgcatgccaaagatggggaagaccatccacaaatatgtccatctgtttcccaagytggagttgtcagtgcacctgcagcctatcacacgctccaccctgaaggtggagctgaccatcacgccagacttccagtgggatgaaaaggtgcatggttcatccgaggctttttggattctggtggaggatgtggacagcgaggtgattctgcaccatgagtattttctcctcaaggccaagtacgcccaggacgagcacctcattacattcttcgtgcctgtctttgaaccgctgccccctcagtacttcatccgagtggtgtctgaccgctggctctcttgtgagacccagctgcctgtctccttccggcacctgatcttgccggagaagtacccccctccaaccgaacttttggacctgcagcccttgcccgtgtctgctctgagaaacagtgcctttgagagtctttaccaagataaatttcctttcttcaatcccatccagacccaggtgtttaacactgtatacaacagtgacgacaacgtgtttgtgggggcccccacgggcagcgggaagactatttgtgcagagtttgccatcctgcgaatgctgctgcagagctcggaggggcgctgtgtgtacatcacccccatggaggccctggcagagcaggtatacatggactggtacgagaagttccaggacaggctcaacaagaaggtggtactcctgacaggcgagaccagcacagacctgaagctgctgggcaaagggaacattatcatcagcacccctgagaagtgggacatactttcccggcgatggaagcagcgcaagaacgtgcagaacatcaacctcttcgtggtggatgaggtccaccttatcgggggcgagaatgggcctgtcttagaagtgatctgctcccgaatgcgctacatctcctcccagattgagcggcccattcgcattgtggcactcagctcttcgctctccaatgccaaggatgtggcccactggctgggctgcagtgccacctccaccttcaacttccatcccaatgtgcgtcccgtccccttggagctgcacatccagggcttcaacatcagccatacacaaacccgcctgctctccatggccaagcctgtgtaccatgctatcaccaagcactcgcccaagaagcctgtcattgtctttgtgccgtctcgcaagcagacccgcctcactgccattgacatcctcaccacctgtgcagcagacatccaacggcagaggttcttgcactgcaccgagaaggatctgattccgtacctggagaagctaagtgacagcacgctcaaggaaacgctgctaaatggggtgggctacctgcatgaggggctcagccccatggagcgacgcctggtggagcagctcttcagctcaggggctatccaggtggtggtggcttctcggagtctctgctggggcatgaacgtggctgcccacctggtaatcatcatggatacccagtactacaatggcaagatccacgcctatgtggattaccccatctatgacgtgcttcagatggtgggccacgccaaccgccctttgcaggacgatgaggggcgctgtgtcatcatgtgtcagggctccaagaaggatttcttcaagaagttcttatatgagccattgccagtagaatctcacctggaccactgtatgcatgaccacttcaatgctgagatcgtcaccaagaccattgagaacaagcaggatgctgtggactacctcacctggacctttctgtaccgccgcatgacacagaaccccaattactacaacytgcagggcatctcccatcgtcacttgtcggaccacttgtcagagctggtggagcagaccctgagtgacytggagcagtccaagtgcatcagcatcgaggacgagatggacgtggcgcctctgaacctaggcatgatcgccgcctactattacatcaactacaccaccattgagctcttcagcatgtccctcaatgccaagaccaaggtgcgagggcttatcgagatcatctccaatgcagcagagtatgagaacattcccatccggcaccatgaagacaatctcctgaggcagttggctcagaaggtcccccacaagctgaataaccctaagttcaatgatccgcacgtcaagaccaacctgctcctgcaggctcacttgtctcgcatgcagctgagtgctgagttgcagtcagatacggaggaaatccttagtaaggcaatccggctcatccaggcctgcgtggatgtcctttccagcaatgggtggctcagccctgctctggcagctatggaactggcccagatggtcacccaagccatgtggtccaaggactcatacctgaagcagctgccacacttcacctctgagcatatcaaacgttgcacagacaagggagtggagagtgttttcgacatcatggagatggaggatgaagaacggaacgcgttgcttcagctgactgacagccagattgcagatgtggctcgcttttgtaaccgctaccctaatatcgaactatcttatgaggtggtagataaggacagcatccgcagtggcgggccagttgtggtgctggtgcagctggagcgagaggaggaagtcacaggccctgtcattgcgcctctcttcccgcagaaacgtgaagagggctggtgggtggtgattggagatgccaagtccaatagcctcatctccatcaagaggctgaccttgcagcagaaggccaaggtgaagttggactttgtggccccagccactggtgcccacaactacactctgtacttcatgagtgacgcttacatgggatgtgaccaggagtacaaattcagygtggatgtgaaagaagctgagacagacagtgattcagattgagtcctgaggcatttacttttgggtaaaggagagttgagcctgaattaggaatgtgtacattgtaggaatcctggttgtggggascaggtctgtgggcctcaggtctggccagccagggctggtgctgtccccgcctacctccacttcctttcccttgctcactctggatccagtgacagcaggtgtcatgggtcaagcataaatcatatatagcattttcaggcatgttcctggtagttcttttgagtctgacattctaataaaataatttgtagaaaccatttgtctttgtagtgattccaaattaaaagttttctttctccaacctgagggcacggccaaaaagatctggttattttttagccaggaacgtgcttgttaatgagtatgtctggaggacagacctgctcattaggtgtgctgtcccctgtagcctcgtgagtcagcccagaggagggtacatgcgactgtggcctggcctcagtggtacccacacatcagcactaccacaagaaccaacactgagcctcggaagctagatcacaggttaggggtttctctagatgggggttctgaaatttgcagtgtctgctcctgggaggcagcaccagaaagggcactgaaatgtactagctggatgtgacccagtcttaataaacaggttttctaatccaga

SEQ ID NO: 6208 - DNA, 2654 bp, Homo sapiens
cactgaccctcgtcccgcccccgccattcsccgcctcctcctgtcccgcagtcggcgtccagcggctctgcttgttcgtgtgtgtgtcgttgcaggccttattcatgggctcaccgctgaggttcgacgggcgggtggtactggtcaccrgcgcgggggcaggattkggccgagcctatgccctggcttttgcagaaagaggagcgttagttgttgtgaatgatttgggaggggacttcaaaggagttggtaaaggctccttagctgctgataaggttgttgaagaaataagaaggagaggtggaaaagcagtggccaactatgattcagtggaagaaggagagaaggttgtgaagacagccctggatgcttttggaagaatagatgttgtggtcaacaatgctggaattctgagggatcrttcctttgctaggataagtgatgaagactgggatataatccacagagttcatttgcggggttcattccaagtgacacgggcagcatgggaacacatgaagaawcagaagtatggaaggattattatgacttcatcagcttcaggaatatatggcaactttggccaggccaattatagtgctgcaaagttgggtcttctgggccttgcaaattytcttgcaattgaaggcaggaaaagcaacattcattgtaacaccattgctcctaatgcgggatcacggatgactcagacagttatgcctgaagatcttgtggaagccctgaagccagagtatgtggcacctcttgtcctttggctttgtcacgagagttgtgaggagaatggtggcttgtttgaggttggagcaggatggattggaaaattacgctgggagcggactcttggagctattgtaagacaaaagaatcacccaatgactcctgaggcagtcaaggctaactggaagaagatctgtgactttgagaatgccagcaagcctcagagtatccaagaatcaastggcagtataattgaagttctgagtaaaatagattcagaaggaggagtttcagcaaatcatactagtcgtgcaacgtctacagcaacatcaggatttgctggagctattggccagaaactccctccattttcttatgcttatacggaactggaagctattatgtatgcccttggagtgggagcgtcaatcaaggatccaaaagatttgaaatttatttatgaaggaagttctgatttctcctgtttgcccaccttcggagttatcataggtcagaaatctatgatgggtggaggattagcagaaattcctggactttcaatcaactttgcaaaggttcttcatggagagcagtacttagagttatataaaccacttcccagagcaggaaaattaaaatgtgaagcagttgttgctgatgtcctagataaaggatccggtgtagtgattattatggatgtctattcttattctgagaaggaacttatatgccacaatcagttctctctctttcttgttggctctggaggctttggtggaaaacggacatcagacaaagtcaaggtagctgtagccatacctaatagacctcctgatrctgtacttacagataccacctctcttaatcaggctgctttgtaccgcctcagtggagacyggaatcccttacacattgatcctaactttgctagtctagcaggttttgacaagcccatattacatggattatgtacatttggattttctgccaggcgtgtgttacagcagtttgcagataatgatgtgtcaagattcaaggcarttaaggctcgttttgcaaaaccagtatatccaggacaaactctacaaactgagatgtggaaggaaggaaacagaattcattttcaaaccaaggtccaagaaactggagacattgtyatttcaaatgcatatgtggatcttkcaccaacatctggtacttcagctaagacaccctctgagggcgggaagcttcagagtacctttgtatttgaggaaataggacgccgcctaaaggatattgggcctgaggtggtgaagaaagtaaatgctgtatttgagtggcatataaccaaaggcggaaatattggggctaagtggactattgacctgaaaagtggttctggaaaagtgtaccaaggccctgcaaaaggtgctgctgatacaacaatcatactttcagatgaagatttcatggaggtggtcctgggcaagcttgaccctcagaaggcattctttagtggcaggctgaaggccagagggaacatcatgctgagccagaaacttcagrtgattcttaaagmctaygccaagctctgaagggcrcactacactattaataaaaatggaatcattaaatactctcttcacccaaatatgcttgattattctgcaaaagtgattagaactaagatgcaggggaaattgcttaacattttcagatatcagataactgcagattttcattttctactaatttttcatgtatcattatttttacaaggaactatatataagctagcacataattatccttctgttcttagatctgtatcttcataataaaaaattttgcccaagtcctgtttccttagaatttgtgatagcattgataagttgaaaggaaaattaaatcaataaaggcctttgatacctttg

SEQ ID NO: 6209 - DNA, 2409 bp, Homo sapiens
aattcctgsaggtgctcccagcctagcccgctgcgcccggctccgcgcctgggcaacccgggctccctcccgtccctggcgccctccgcacccgcctaaggcgcggcggtcgagccctggctgcgccctgtgggcgcgctcctccgaatcccaagttcgggtcgcgagtctgaacttgggaggaacgcgccccgggtccccgcccttcccggactgcccgatccccatcccccgcaaccgggagcgcgcaggcgcagccggccggcagtcccgtcagctgtcccagagcctgtgtcgcgcccgtgccggtagcgcccgtgccggtagcgccgctgccaccgctcaccatgggcccgggtcctcggctgctgctacctctcgtgctttgcgtggggctcggcgcacttgtgttttcttcgggggccgagggcttccgcaagcgaggcccctcggtgacggccaaggtcttctttgatgtgaggattggagacaaagatgttggcagaattgtgattggcctctttggaaaagttgtgcccaagacagtggaaaattttgttgctctagcaacaggagagaaaggatatggatataaaggaagcargtttcatcgtgtcatcaaggatttcatgattcaaggaggtgacatcaccactggagatggcactgggggtgtgagcatctatggtgagacatttccagatgagaacttcaagctgaagcactatggcattgggtgggtcagcatggccaacgctgggcctgacaccaatggctctcagttctttatcaccttgaccaagcccacctggttggacggcaaacatgtggtgtttggaaaagtcattgatgggatgacagtggtgcactccatagagctccaagcaactgatgggcatgaccgtccactcaccarctgctcgatcatcaacagtggcaagatagacgtgaaaacgccttttgtggttgagatcgctgattggtgacacaactggcagaaaacaaggatatgctttggcatgtgtgtgtgtgtgtgtgtgtgtgtgtgtgtgtgtgtgtgttgtgttgtctttcaattatttgcttttttttttttactttctttttgtattctatcccagatcacaggaaagttataaaaatcaaaccgtcaccctttagtttgcttgaactttagtaaaccacctgcttagggactttgaacttaaatatatccccttcctcaagtggtgctattttaaaactaaaaaaaactttgaattggctatttttttaatgcaatattttttttctgaattcattatgatccccatattgggtaatgctgaacatttatctgaaacagatgaggatattattattttgtatccaaamagaaattcagataaagggaaatttgactagtgtaatctgagatatgtcatagggatttctttctgacaaaagggtgctttgctgttctttatattaaatacttttagatcaactctttttgcaagactttttaaaaatgtaaagttctttaagaaatatacaaaaatacacacactctagcattaayagtgaacagattagaaagattttataaatcaaactacaaacataattagataactcagaaattatgcccatccacatctcatatacttaaggtgattatttacttattgttattcaatgtaacatttttagaaagttatctttagcccagttgcaataggaatattttttgttacttacataaggggattaagactcaggctataaggcctgggtatggtggctcatgcctataatcccagcactttgggaggctgagacaagagaattgcttgagcccaggagtttgagaccagcctgggcaacatagtgagacccygtctctaacaaaactaaaattagctggtcatgttggtgcacatctgtagttccagttactcaggaggctgaggtgggaggattkcttgagtccaggagatcaaggctgtagtgagctgtgattgccccaggcaacagagtgagaccctgtctcaaacarcaacgacaacaacaaaaccyactcaggctatatttaaactagatgaggccagatgtggtggcacatgtctgtggtcccagctactgaagaggctgaggtgggatgaytacttaagcccaggaattcggggctatagtgagctatactgatggggtatctatactgtttggcatcaatatggtggccactggggagcatggtaccaccaggttgcctaaggaggggtgaactggcccaggttggaaacagagtgggtcaaaacttctgtgctggtcagtagtgggatcatgcctgtgaattgccactgcactccagtctgggcaacatagcaagaccccatcttaaaaaaaaaaaaaaaaactaatgggaaa

SEQ ID NO: 6210 - DNA, 3889 bp, Homo sapiens
aattcctgsaggtgctcccagcctagcccgctgcgcccggctccgcgcctgggcaacccgggctccctcccgtccctggcgccctccgcacccgcctaaggcgcggcggtcgagccctggctgcgccctgtgggcgcgctcctccgaatcccaagttcgggtcgcgagtctgaacttgggaggaacgcgccccgggtccccgcccttcccggactgcccgatccccatcccccgcaaccgggagcgcgcaggcgcagccggccggcagtcccgtcagctgtcccagagcctgtgtcgcgcccgtgccggtagcgcccgtgccggtagcgccgctgccaccgctcaccatgggcccgggtcctcggctgctgctacctctcgtgctttgcgtggggctcggcgcacttgtgttttcttcgggggccgagggcttccgcaagcgaggcccctcggtgacggccaaggtcttctttgatgtgaggattggagacaaagatgttggcagaattgtgattggcctctttggaaaagttgtgcccaagacagtggaaaattttgttgctctagcaacaggagagaaaggatatggatataaaggaagcargtttcatcgtgtcatcaaggatttcatgattcaaggaggtgacatcaccactggagatggcactgggggtgtgagcatctatggtgagacatttccagatgagaacttcaagctgaagcactatggcattgggtgggtcagcatggccaacgctgggcctgacaccaatggctctcagttctttatcaccttgaccaagcccacctggttggacggcaaacatgtggtgtttggaaaagtcattgatgggatgacagtggtgcactccatagagctccaagcaactgatgggcatgaccgtccactcaccarctgctcgatcatcaacagtggcaagatagacgtgaaaacgccttttgtggttgagatcgctgattggtgacacaactggcagaaaacaaggatatgctttggcatgtgtgtgtgtgtgtgtgtgtgtgtgtgtgtgtgtgtgtgttgtgttgtctttcaattatttgcttttttttttttactttctttttgtattctatcccagatcacaggaaagttataaaaatcaaaccgtcaccctttagtttgcttgaactttagtaaaccacctgcttagggactttgaacttaaatatatccccttcctcaagtggtgctattttaaaactaaaaaaaactttgaattggctatttttttaatgcaatattttttttctgaattcattatgatccccatattgggtaatgctgaacatttatctgaaacagatgaggatattattattttgtatccaaamagaaattcagataaagggaaatttgactagtgtaatctgagatatgtcatagggatttctttctgacaaaagggtgctttgctgttctttatattaaatacttttagatcaactctttttgcaagactttttaaaaatgtaaagttctttaagaaatatacaaaaatacacacactctagcattaayagtgaacagattagaaagattttataaatcaaactacaaacataattagataactcagaaattatgcccatccacatctcatatacttaaggtgattatttacttattgttattcaatgtaacatttttagaaagttatctttagcccagttgcaataggaatattttttgttacttacataaggggattaagactcaggctataaggcctgggtatggtggctcatgcctataatcccagcactttgggaggctgagacaagagaattgcttgagcccaggagtttgagaccagcctgggcaacatagtgagacccygtctctaacaaaactaaaattagctggtcatgttggtgcacatctgtagttccagttactcaggaggctgaggtgggaggattkcttgagtccaggagatcaaggctgtagtgagctgtgattgccccaggcaacagagtgagaccctgtctcaaacarcaacgacaacaacaaaaccyactcaggctatatttaaactagatgaggccagatgtggtggcacatgtctgtggtcccagctactgaagaggctgaggtgggatgaytacttaagcccaggaattcggggctatagtgagctatactgatggggtatctatactgtttggcatcaatatggtggccactggggagcatggtaccaccaggttgcctaaggaggggtgaactggcccaggttggaaacagagtgggtcaaaacttctgtgctggtcagtagtgggatcatgcctgtgaattgccactgcactccagtctgggcaacatagcaagaccccatcttaaaaaaaaaaaaaaaaactaatgggaaatgcttcattttggaagtgctgaaattctgaacccactagtgcaccagtggtaaattatcatgttacctgttatgccagatgaccaagagctaaggacatccccctgctaaaagcagtttatttcttgtacaccaagggtcaggcctcatacagaaaacatgagcaaactgatgactatgaaaataggaactgttactttttaatgttttctgcaaaagcttttgaaataaatagttcactgttttgcagatcacgttactagaaggacacatttatagttgtgggcggatgtggaatcagagggaaatttacactggacaccaccaccaagcccaaattattataatttagtcttgaatcactttaatcaacactttaaaatattttggtattcttagccataatttattttgttctcttacaagtgctctttagcagttttctggatcatcaaataagagttcagtaaaatttacttttgggtcaattagttggamtgacacttttggaattatcaattactttatttctgatgaattttgaacaggactcaccaacctcatttcttagtttagccgttttgagttacataaagacaaaaacatggcaaggattttacagcaggaaaatgatttgtttttgtttttcaacattcctataatccagagagctgaagaaatctttgatctagaaagcttggaaattcaaagcccctcaaggcacttcttttttttttttttcaaattaaagaagaattaaaaacagtatttgtaatggaaaattttggtgccattaagtacataayggcttttacttwagtctgtaattcatcytgtggatttaagattttggccaagagtaagttttaggtgtgatataacataagtgcctccaaggtttgctagtgttactgacattctagagtggtggaaaaacaactggcattaatgcagaattggagtgactagtcccaggaatcaagtcagaaaaaaagaccawctgacaaatagagttaatacaaaatgaattttaaaatcccaccctaggccaggcgcggtggctcatgcctgtaatcccagcactttgggaggccgaggcgggcggatcacaaggtcaggagttcgagaccagcctggccaatatggtgaaaccccattgctactaaaaatacaaaaattagcagggcatggtggcaggcacctgtaatcccagctacttgagaggctaaggcaggagaattgcttgaacccgggaggcggaggttgcagtgagccgakatcccaccactgcactccagcctgggcaacagagcgagactctgtgtcaaaggaaaaaaaaaattcccaccctagttagattaggatgcagaggactcacagatttggaggatttggaggacccaaattaccaaaaccccttctattacmcacttgtaaagttttattagcagtcaggtacgttttcaggtacgtttccaccc

SEQ ID NO: 6211 - DNA, 468 bp, Homo sapiens
atgcagaggactcacagatttggaggatttggaggacccaaattaccaaaaccccttctattacmcacttgtaaagttttattagcagtcagagcatgtgaggactttcttcctggagcatggtgggccttcaaagcgctgttaaaactacagccgccatttgtccgaggtggtaacattatgtcctgttatagatatcctggatctatttccaggatccagatatctctatttgaaaatgaccgtttttcttccctggtcttaaaagacaagcctgcttccggtgcctctgctggacaccaggagctgcactctgacaaactgtccagggtaaaggaggaagaactggatttaccaggtattgatggtcatggtgatattggggttgttcacatggctgattgtaatgggggcagtaacaaggacaccaggagaaaggacacgagggctgccaatatgcagaatgag

SEQ ID NO: 6212 - DNA, 4190 bp, Homo sapiens
atcgcattacgtgaacaaatagctgaggggcggccgggccagaacggcttgtgtaactttgcaaacgtgccagaaagtttaaaatctctcctccttccttcactccagacactgcccgctctccgggactgccgcgcsgctccccgttgccttccaggactgagaaaggggaaagggaagggtgccacgtccgagcagccgccttgactggggaagggtctgaatcccacccttggcattgcttggtggagactgagatacccgtgctccgctcgcctccttggttgaagatttctccttccctcacgtgatttgagccccgtttttattttctgtgagccacgtcctcctcgagcggggtcaatctggcaaaaggagtgatgcgcttcgcctggaccgtgctcctgctcgggcctttgcagctctgcgcgctagtgcactgcgcccctcccgccgccggccaacagcagcccccgcgcgagccgccggcggctccgggcgcctggcgccagcagatccaatgggagaacaacgggcaggtgttcagcttgctgagcctgggctcacagtaccagcctcagcgccgccgggacccgggcgccgcsgtccctggtgcagccaacgcctccgcccagcagccccgcactccgatcctgctgatccgcgacaaccgcaccgccgcggcgcgaacgcggacggccggctcatctggagtcaccgctggccgccccaggcccaccgcccgtcactggttccaagctggctactcgacatctagagcccgcgaasctggcgcctcgcgcgcggagaaccagacagcgccgggagaagttcctgcgctcagtaacctgcrgccgcccagccgcgtggacggcatggtgggcgacgacccttacaacccctacaagtactctgacgacaacccttattacaactactacgatacttatgaaaggcccagacctgggggcaggtaccggcccggatacggcactggctacttccagtacggtctcccagacctggtggccgacccctactacatccaggcgtccacgtacgtgcagaagatgtccatgtacaacctgagatgcgcggcggaggaaaactgtctggccagtacagcatacagggcagatgtcagagattatgatcacagggtgctgctcagatttccccaaagagtgaaaaaccaagrracatcagatttcttacccagccgaccaagatattcctgggaatggcacagttgtcatcaacattaccacagtatggatgagtttagccactatgacctgcttgakgccaacacccagaggagagtggctgaaggccacaaagcaagtttctgtcttgaagacacatcctgtgactatggctaccacaggcgatttgcatgtactgcacacacacagggattgagtcctggctgttatgatacctatggtgcagacatagactgccagtggattgatattacagatgtaaaacctggaaactatatcctaaaggtcagtgtraaccccagctacctggttcctgaatctgactataccaacaatgttgtgcgctgtgacattcgctacacaggacatcatgcgtatgcctcaggctgcacaatttcaccgtattagaaggcaaagcaaaactcccaatggataaatcagtgcctggtgttctgaagtgggaaaaaatagactaacttcagtaggatttatgtattttgaaaaagagaacagaaaacaacaaaagaatttttgtttggactgttttcaataacaaagcacataactggattttgaacgcttaagtcatcattacttgggaaatttttaatgtttattatttacatcactttgtgaattaacacagtgtttcaattctgtaattacatatttgactctttcaaagaaatccaaatttctcatgttccttttgaaattgtagtgcaaaatggtcagtattatctaaatgaatgagccaaaatgactttgaactgaaacttttctaaagtgctggaactttagtgaaacataataataatgggtttatatatgtcatagcatagatgaatttagaaacaatgctcctactgtttaaatacatatggacacatctggtgctgagaaagaaacaaacacattaccattggtgtcaagaaatattactatatagcagagaaatggcaatacatgtactcagatagttacatccctatataaaaagtatgtttacatttaaaaaattagtagataacttcctttctttcaagtgcacaatttcattttgacttgagtcaacttttgttttggaacaaattaagtaagggagctgcccaatcctgtctgatatttcttgaggctgccctctatcattttatctttcccatgggcagagatgttgtaagtgggattcttaatatcaccattcttgggactggtatacataaggcagccgtgaaactggaaagtcattttgatgactgatgtgatacatccagaggtaaaatgcatttaaacatattaaagtatttgccaaagatacaattttcttgctgacataaaaatcacacaaacaagtcccccccaaaccacaactgtctctcaaatagcttaaaaaaattgaaaaacattttaggatttttcaagttttctagattttaaaaagatgttcagctattagaggaatgttaaaaattttatattatctagaacacaggaacatcatcctgggttattcaggaatcagtcacacatgtgtgtgtgtctgagatatagtctaaattagcaaagcacatagtattacatacttgaggggttggtgaacaaaggaaaaatatactttctgcaaaaccaaggactgtgctgcgtaatgagacagctgtgatttcatttgaaactgtgaaaccatgtgccataatagaattttgagaattttgcttttacctaaattcaagaaaatgaaattacacttttaagttagtggtgcttaagcataatttttcctatattaaccagtattaaaatctcaagtaagattttccagtgccagaacatgttaggtggaattttaaaagtgcctcggcatcctgtattacatgtcatagaattgtaaagtcaacatcaattactagtaatcattctgcactcactgggtgcatagcatggttagaggggctagagatggacagtcatcaactggcggatatagcggtacatatgatccwkagccaccagggcacaagcttaccagtagacaatacagacagagcttttgttgagctgtaactgagctatggaatagcttctttgatgtacctctttgccttaaattgctttttagttctaagattgtagaatgatcctttcaaattgtaatcttttctaacagagatattttaatatasttgctttcttaaaaaacaaaaaaactactgtcagtattaatactgagccagactggcatctacagatttcagatctatcattttattgattcttaagcttgtattaaaaactaggcaatatcatcatggatacataggagaagacacatttacaatcattcattgggccttttatctgtctatccatccatcatcatttgaaggcctaatatatgccaagtactcacatggtatgcattgagacataaaaaagactgtctataacctcaataagtattaaaaatcccattattacccataaggttcatcttatttcatttttagggaataaaattacatgtctatgaaatttcaattttaagcactattgtttttcatgaccataatttatttttaaaaataaattaaaggttaattatatgcatgtatgtatttctaataattaaaaatgtgttcaatccctgaaatgtctgccttttaaatataacacctactatttggttaattttgacgatttttttttttcaattaggaagctaaaaatactactttattccttatatgaacattcatccccctcctggcacctctaaacacacccaaataactcacaagtactgatttaacactctgtattactgaacttctttgaactattttgaactttgaatctcttctctgaataactgccgaaactcaaagataataattagttgatgaaggttatcaattaataaaataacacagaccagtcttaccaaactctaaatacattttaaaaaat

SEQ ID NO: 6213 - DNA, 6774 bp, Homo sapiens
cggccccagaaaacccgagcgagtagggggcggcgcgcaggagggaggagaactgggggcgcgggaggctggtgggtgtsgggggtggagatgtagaagatgtgacgccgcggcccggcgggtgccagattagcggacgcggtgcccgcggttgcaacgggatcccgggcgctgcagcttgggaggcggctctccccaggcggcgtccgcggagacacccatcygtgaaccccaggtcccgggccgccggctcgccgcgcaccaggggccggcggacagaagagcggccgagcggctcgaggctgggggaccgcgggcgcggccgcgcgctgccgggcgggaggctggggggccggggccggggccgtgccccggagcgggtcggaggccggggccggggccgggggacggcggctccccgcgcggctccagcggctcggggatcccggccgggccccgcagggaccatggcagccgggagcatcaccacgctgcccgccttgcccgaggatggcggcagcggcgccttcccgcccggccacttcaaggaccccaagcggctgtactgcaaaaacgggggcttcttcctgcgcatccaccccgacggccgagttgacggggtccgggagaagagcgaccctcacatcaagctacaacttcaagcagaagagagaggagttgtgtctatcaaaggagtgtgtgctaaccgttacctggctatgaaggaagatggaagattactggcttctaaatgtgttacggatgagtgtttcttttttgaacgattggaatctaataactacaatacttaccggtcaaggaaatacaccagttggtatgtggcactgaaacgaactgggcagtataaacttggatccaaaacaggacctgggcagaaagctatactttttcttccaatgtctgctaagagctgattttaatggccacatctaatctcatttcacatgaaagaagaagtatattttagaaatttgttaatgagagtaaaagaaaataaatgtgtatagctcagtttggrtaattggtcaaacaattttttatccagtagtaaaatatgtaaccattgtcccagtaaagaaaaataacaaaagttgtaaaatgtatattctcccttttatattgcatctgctgttacccagtgaagcttacctagagcaatgatctttttcacgcatttgctttattcgaaaagaggcttttaaaatgtgcatgtttagaaacaaaatttcttcatggaaatcatatacattagaaaatcacagtcagatgtttaatcaatccaaaatgtccactatttcttatgtcattcgttagtctacatgtttctaaacatataaatgtgaatttaatcaattcctttcatagttttataattctctggcagttccttatgatagagtttataaaacagtcctgtgtaaactgctggaagttcttccacagtcaggtcaattttgtcaaacccttctctgtacccatacagcagcagcctagcaactctgctggtgatgggagttgtattttcagtcttcgccaggtcattgagatccatccactcacatcttaagcattcttcctggcaaaaatttatggtgaatgaatatggctttaggcggcagatgatatacatatctgacttcccaaaagctccaggatttgtgtgctgttgcygaatactcaggacggacctgaattctgattttataccagtctcttcaaaaacttctcgaaccgctgtgtctcctacktaaaaaaagagatgtacaaatcaataataattacacttttagaaactgtatcatcaaagattttcagttaaagtagcattatgtaaaggctcaaaacattaccctaacaaagtaaagttttcaatacaaattctttgccttgtggatatcaagaaatcccaaaatattttcttaccactgtaaattcaagaagcttttgaaatgctgaatatttctttggctgctacttggaggcttatctacctgtacatttttggggtcagctctttttaacttcttgctgctctttttcccaaaaggtaaaaatatagattgaaaagttaaaacattttgcatggctgcagttcctttgtttcttgagataagattccaaagaacttagattcatttcttcaacaccgaaatgctggaggtgtttgatcagttttcaagaaacttggaatataaataattttataattcaacaaaggttttcacattttataaggttgatttttcaattaaatgcaaatttrtgtggcaggatttttattgccattaacatatttttgtggctgctttttctacacatccagatggtccctctaactgggctttctctaattttgtgatgttctgtcattgtctcccaaagtatttaggagaagccctttaaaaagctgccttcctctaccactttgctggaaagcttcacaattgtcacagacaaagatttttgttccaatactcgttttgcctctatttttcttgtttgtcaaatagtaaatgatatttgcccttgcagtaattctactggtgaaaaacatgcaaagaagaggaagtcacagaaacatgtctcaattcccatgtgctgtgactgtagactgtcttaccatagactgtcttacccatcccctggatatgctcttgttttttccctctaatagctatggaaagatgcatagaaagagtataatgttttaaaacataaggcattygtctgccatttttcaattacatgctgacttcccttacaattgagatttgcccataggttaaacatggttagaaacaactgaaagcataaaagaaaaatctaggccgggtgcagtggctcatgcctatattccctgcactttgggaggccaaagcaggaggatcgcttgagcccaggagttcaagaccaacctggtgaaaccccgtctctacaaaaaaacacaaaaaatagccaggcatggtggcgtgtacatgtggtctcagatacttgggaggctgaggtgggagggttgatcacttgaggctgagaggtcaaggttgcagtgagccataatcgtgccactgcagtccagcctaggcaacagagtgagactttgtctcaaaaaaagagaaattttccttaataagaaaagtaatttttactctgatgtgcaatacatttgttattaaatttattatttaagatggtagcactagtcttaaattgtataaaatatcccctaacatgtttaaatgtccatttttattcattatgctttgaaaaataattatggggaaatacatgtttgttattaaatttattattaaagatagtagcactagtcttaaatttgatataacatctcctaacttgtttaaatgtccatttttattctttatgtttgaaaataaattatggggatcctatttagctcttagtaccactaatcaaaagttcggcatgtagctcatgatctatgctgtttctatgtcgtggaagcacyggatgggggtagtgagcaaatctgccctgctcagcagtcaccatagcagctgactgaaaatcagcactgcctgagtagttttgatcagtttaacttgaatcactaactgactgaaaattgaatgggcaaataagtgcttttgtctccagagtatgcgggagacccttccacctcaagatggatatttcttccccaaggatttcaagatgaattgaaatttttaatcaagatagtgtgctttattctgttgtattttttattattttaatatactgtaagccaaactgaaataacatttgctgttttataggtttgaagaacataggaaaaactaagaggttttgtttttatttttgctgatgaagagatatgtttaaatatgttgtattgttttgtttagttacaggacaataatgaaatggagtttatatttgttatttctattttgttatatttaataatagaattagattgaaataaaatataatgggaaataatctgcagaatgtgggttttcctggtgtttccctctgactctagtgcactgatgatctctgataaggctcagctgctttatagttctctggctaatgcagcagatactcttcctgccagtggtaatacgattttttaagaaggcagtttgtcaattttaatcttgtggatacctttatactcttagggtattattttatacaaaagccttgaggattgcattctattttctatatgaccctcttgatatttaaaaaacactatggataacaattcttcatttacctagtattatgaaagaatgaaggagttcaaacaaatgtgtttcccagttaactagggtttactgtttgagccaatataaatgtttaactgtttgtgatggcagtattcctaaagtacattgcatgttttcctaaatacagagtttaaataatttcagtaattcttagatgattcagcttcatcattaagaatatcttttgttttatgttgagttagaaatgccttcatatagacatagtctttcagacctctactgtcagttttcatttcyagctgctttcagggttttatgaattttcaggcaaagctttaatttayactaagcttaggaagtatggctaatgccaacggcagtttttttcttcttaattccacatgactgaggcatatatgatctctgggtaggtgagttgttgtgacaaccacaagcactttttttttttttaaagaaaaaaaggtagtgaatttttaatcatctggactttaagaaggattctggagtatacttaggcctgaaattatatatatttggcttggaaatgtgtttttcttcaattacatctacaagtaagtacagctgaaattcagaggacccataagagttcacatgaaaaaaatcaatttatttgaaaaggcaagatgcaggagagaggaagccttgcaaacctgcagactgctttttgcccaatatagattgggtaaggctgcaaaacataagcttaattagctcacatgctctgctctcacgtggcaccagtggatagtgtgagagaattaggctgtagaacaaatggccttctctttcagcattcacaccactacaaaatcatcttttatatcaacagaagaataagcataaactaagcaaaaggtcaataagtacctgaaaccaagattggctagagatatatcttaatgcaatccattttctgatggattgttacgagttggctatataatgtatgtatggtattttgatttgtgtaaaagttttaaaaatcaagctttaagtacatggacatttttaaataaaatatttaaagacaatttagaaaattgccttaatatcattgttggctaaatagaataggggacatgcatattaaggaaaaggtcatggagaaataatattggtatcaaacaaatacattgatttgtcatgatacacaytgaatttgatccaatagtttaaggaataggtaggaaaatttggtttctatttttcgatttcctgtaaatcagtgacataaataattcttagcttattttatatttccttgtcttaaatactgagctcagtaagttgtgttaggggattatttctcagttgagactttcttatatgacattttactatgttttgactwcctgactattaaaaataaatagtagawacaattttcataaagtgaagaattatataatcactgctttataactgactttattatatttatttcaaagttcatttaaaggctactattcatcctctgtgatggaatggtcaggaatttgttttctcatagtttaattccaacaacaatattagtcgtatccaaaataacctttaatgctaaactttactgatgtatatccaaagcttctcmttttcagacagattaatccagaagcagtcataaacagaagaataggtggtatgttcctaatgatattatttctactaatggaataaactgtaatattagaaattatgctgctaattatatcagctctgaggtaatttctgaaatgttcagactcagtcggaacaaattggaaaatttaaatttttattcttagctataaagcaagaaagtaaacacattaatttcctcaacatttttaagccaattaaaaatataaaagatacacaccaatatcttcttcaggctctgacaggcctcctggaaacttccacatatttttcaactgcagtataaagtcagaaaataaagttaacataacttycactaacacacacatatgtagatttcacaaaatccacctataattggtcaaagtggttgagaatatattttttagtaattgcatgcaaaatttttctagcttccatcctttctccctcgtttcttctttttttgggggagctggtaactgatgaaatcttttcccaccttttctcttcaggaaatataagtggttttgtttggttaacgtgatacattctgtatgaatgaaacattggagggaaacatctactgaatttctgtaatttaaaatattttgctgctagttaactatgaacagatagaagaatcttacagatgctgctataaataagtagaaaatataaatttcatcactaaaatatgctattttaaaatctatttcctatattgtatttctaatcagatgtattactcttattatttctattgtatgtgttaatgattttatgtaaaaatgtaattgcttttcatgagtagtatgaataaaattgattagtttgtgttttcttgtctccc

SEQ ID NO: 6214 - DNA, 3225 bp, Homo sapiens
ctctcagactccccagtacaatgactcaagcagaaattaagctctgttctttgttgctgcaagagcattttggagagattgtagaaaaaattggagtccatctgataagaaccggcagccagccactaagagtaattgcccatgacacaggaacatcactggatcaggtgaagaaagccctgtgtgtcctcgtccaacataacctggtgagttatcaagtgcacaaacgtggtgtggtggagtatgaagcccagtgcagccgggtattgcgaatgcttagatatccccggtacatctatactaccaaaactctgtacagtgacactggagagctgattgttgaggagcttctgttgaacggcaaactgacaatgtcagctgttgtgaagaaagtggcagaccggctcacagagaccatggaggatggcaagaccatggactatgctgaagtatcaaacacatttgtgcgactggcagacacacactttgtacaacgctgcccttcggtacctaccactgagaattcagaccctgggccaccaccacctgcccccacacttgtcattaatgaaaaggacatgtacctggttcctaaactcagcttgatagggraaggtaaaaggaggagatcatctgatgaagatgctgctggggagcccaaggccaagagaccaaaatatactacagataacaaggagcccattccagatgatgggatttattggcaggccaaccttgacagattccrccaacacttccgtgaccaagccattgtgagcgcagttgctaacaggatggaccagacaagcagcgagattgtgcgaaccatgctccgaatgagtgagattaccacttcctctagtgctcccttcacccagccattgtcttccaatgagatcttcagatccctacctgttggctataacatctctaagcaagttcttgatcagtatctcactctgctggcagatgatccactagagtttgttggaaagtctggcgacagtggtggaggaatgtatgtcatcaacctccataaggcattagcatccctagccacagccactctggagtccgtcgtacaggagagatttgggtctcgctgtgctagaatattccgtctagttttgcagaagaaacacatagagcagaagcaagtggaagactttgcaatgattcctgcaaaggaggcaaaggatatgctatataagatgctctcagaaaatttcatgtcactccaggaaattcccaaaacaccagaccatgccccatccaggaccttctatttatatactgtgaacatcctgtcagctgcccraatgttgttgcacaggtgctacaagagcatagccaacttgatagaaaggaggcaatttgaaaccaaagagaataagcgtctactagaaaaatctcagagggtagaagccatcattgcatctatgcaggctactggtgcagaggaagcacagttacaagaaatagaggagatgatcacagctcctgaacgtcagcagctagagaccctgaaacgtaatgtcaacaagttggatgccagtgagatccaggtggacgaaaccatcttcctgctggagtcttacattgagtgcaccatgaagagacagtgatccagaagaagcatcttcctcagaagatctggggggatggaaagcaaaataaaggaggtgcctggatscattatttgcagtgggataagtcgcagagtcttcaactaaacccccctctctatcccctgcagcccaggatacacctgaaagaatttggcatatttagatccattgctgtagtctcccctcatcaaatcttggcagtgggaagaaccttaaatcaacaaggttaatcatctatcagatgcatctgttcccataaagaagttacccacacctatggttacctatatccctggcaataggaaacttcctaagaagttaattttattttcagatgtctatgcctgttctttattttgttgagataggtgatagatagatagatagatagatagatagatagatagatgatttgttgttgttgagacaggatctcactctgtcactcaggctggggtgtaatagcgcaatcacagctccctacagccttgacctcctgagctcaagcagtccttccacctcagcctctggagtagctgggactacaggcatgcaccacacatacccagctattttttatttatttatttwtttttttgtagagacagggcctccctgtgttgcccaggctgatgaactgtaatttttaacacacacagtgtagggaatgtgaaagactatcacagagtagaagaaaaaattattttcagggttagcaggtggattgtcccaagcagtcacactagaatctgtggactgaagccacatttgccagctccaggcttctaacacatctgaaactgtgtatgtagaacagctagctcaatgcctggcatatggtaagcacacagtaaattagcgccttcctcttctccatggttccttaaaactggcaacgctaaattctctctctcagtatcacggatataatttgtcccagcagctttaattcatttaaagcagttagatkttttataatatcttcagttttctctcaccaatgtgttttctaattgtttaaacacttgagtgtcaaacaattgccagccaccatactaaacacaacatacaaggatagataaataagacaccatctctgccctcaagccagtcaccatcatttactaagcacctgttttgtgctaagtactggggtaagccttggggatataaagattaataaattttgagcatacagtctagtaggaggagacaaataagtacataagtaccaggaagtattaggggtgctacagtagaagagtaaacactatgtacagagaggccagaaagggaaaagggtcaggcagggaagggaacacagagagtgacaatgtatagtttgaaagatgaggatgctttatttgcaaactatcttaacaagggattcgtaaccagaatatataaggagctcaaacaatagcaaaaagaacaatccaacttaaaaatggccaaaagatcttaataggtagttttcgaaagaagatacacaaatggccgacagatacatcaaaaaatgttcaacatcactaatcagagaaatggaaatcaaaatcaatgagataacatctcaccccaattcattacttttatcaag

SEQ ID NO: 6215 - DNA, 2570 bp, Homo sapiens
caccaaagaggcgcaggaaggagagacaaacggcccgcccgccggctccacaaacagcccctcgctggtcctccagtcttccagcgagaagaaagaaagagcgtccccggaagccgccgaaactctggggtagagtggcacgcgctttttgcttttccgcgtcttcttcggtggcgatccgcgtcctagaaagggcggtgggctccacctcggcctagaaggccagcgggagccgtaggaagccgtcgcgggaagctcagccgaattggagttggagcccccggattgcgctgaccctgagctctcagactccccagtacaatgactcaagcagaaattaagctctgttctttgttgctgcaagagcattttggagagattgtagaaaaaattggagtccatctgataagaaccggcagccagccactaagagtaattgcccatgacacaggaacatcactggatcaggtgaagaaagccctgtgtgtcctcgtccaacataacctggtgagttatcaagtgcacaaacgtggtgtggtggagtatgaagcccagtgcagccgggtattgcgaatgcttagatatccccggtacatctatactaccaaaactctgtacagtgacactggagagctgattgttgaggagcttctgttgaacggcaaactgacaatgtcagctgttgtgaagaaagtggcagaccggctcacagagaccatggaggatggcaagaccatggactatgctgaagtatcaaacacatttgtgcgactggcagacacacactttgtacaacgctgcccttcggtacctaccactgagaattcagaccctgggccaccaccacctgcccccacacttgtcattaatgaaaaggacatgtacctggttcctaaactcagcttgatagggraaggtaaaaggaggagatcatctgatgaagatgctgctggggagcccaaggccaagagaccaaaatatactacagataacaaggagcccattccagatgatgggatttattggcaggccaaccttgacagattccrccaacacttccgtgaccaagccattgtgagcgcagttgctaacaggatggaccagacaagcagcgagattgtgcgaaccatgctccgaatgagtgagattaccacttcctctagtgctcccttcacccagccattgtcttccaatgagatcttcagatccctacctgttggctataacatctctaagcaagttcttgatcagtatctcactctgctggcagatgatccactagagtttgttggaaagtctggcgacagtggtggaggaatgtatgtcatcaacctccataaggcattagcatccctagccacagccactctggagtccgtcgtacaggagagatttgggtctcgctgtgctagaatattccgtctagttttgcagaagaaacacatagagcagaagcaagtggaagactttgcaatgattcctgcaaaggaggcaaaggatatgctatataagatgctctcagaaaatttcatgtcactccaggaaattcccaaaacaccagaccatgccccatccaggaccttctatttatatactgtgaacatcctgtcagctgcccraatgttgttgcacaggtgctacaagagcatagccaacttgatagaaaggaggcaatttgaaaccaaagagaataagcgtctactagaaaaatctcagagggtagaagccatcattgcatctatgcaggctactggtgcagaggaagcacagttacaagaaatagaggagatgatcacagctcctgaacgtcagcagctagagaccctgaaacgtaatgtcaacaagttggatgccagtgagatccaggtggacgaaaccatcttcctgctggagtcttacattgagtgcaccatgaagagacagtgatccagaagaagcatcttcctcagaagatctggggggatggaaagcaaaataaaggaggtgcctggatscattatttgcagtgggataagtcgcagagtcttcaactaaacccccctctctatcccctgcagcccaggatacacctgaaagaatttggcatatttagatccattgctgtagtctcccctcatcaaatcttggcagtgggaagaaccttaaatcaacaaggttaatcatctatcagatgcatctgttcccataaagaagttacccacacctatggttacctatatccctggcaataggaaacttcctaagaagttaattttattttcagatgtctatgcctgttctttattttgttgagataggtgatagatagatagatagatagatgatttgttgttgttgagacaggatctcactctgtcactcaggctggggtgtaatagcgcaatcacagctccctacagccttgacctcctgagctcaagcagtccttccacctcagcctctggagtagctgggactacaggcatgcaccacacatacccagctattttttatttatttatttwtttttttgtagagacagggcctccctgtgttgcccaggctgatgaactgtaatttttaacacacac

SEQ ID NO: 6216 - DNA, 3526 bp, Homo sapiens
caccaaagaggcgcaggaaggagagacaaacggcccgcccgccggctccacaaacagcccctcgctggtcctccagtcttccagcgagaagaaagaaagagcgtccccggaagccgccgaaactctggggtagagtggcacgcgctttttgcttttccgcgtcttcttcggtggcgatccgcgtcctagaaagggcggtgggctccacctcggcctagaaggccagcgggagccgtaggaagccgtcgcgggaagctcagccgaattggagttggagcccccggattgcgctgaccctgagctctcagactccccagtacaatgactcaagcagaaattaagctctgttctttgttgctgcaagagcattttggagagattgtagaaaaaattggagtccatctgataagaaccggcagccagccactaagagtaattgcccatgacacaggaacatcactggatcaggtgaagaaagccctgtgtgtcctcgtccaacataacctggtgagttatcaagtgcacaaacgtggtgtggtggagtatgaagcccagtgcagccgggtattgcgaatgcttagatatccccggtacatctatactaccaaaactctgtacagtgacactggagagctgattgttgaggagcttctgttgaacggcaaactgacaatgtcagctgttgtgaagaaagtggcagaccggctcacagagaccatggaggatggcaagaccatggactatgctgaagtatcaaacacatttgtgcgactggcagacacacactttgtacaacgctgcccttcggtacctaccactgagaattcagaccctgggccaccaccacctgcccccacacttgtcattaatgaaaaggacatgtacctggttcctaaactcagcttgatagggraaggtaaaaggaggagatcatctgatgaagatgctgctggggagcccaaggccaagagaccaaaatatactacagataacaaggagcccattccagatgatgggatttattggcaggccaaccttgacagattccrccaacacttccgtgaccaagccattgtgagcgcagttgctaacaggatggaccagacaagcagcgagattgtgcgaaccatgctccgaatgagtgagattaccacttcctctagtgctcccttcacccagccattgtcttccaatgagatcttcagatccctacctgttggctataacatctctaagcaagttcttgatcagtatctcactctgctggcagatgatccactagagtttgttggaaagtctggcgacagtggtggaggaatgtatgtcatcaacctccataaggcattagcatccctagccacagccactctggagtccgtcgtacaggagagatttgggtctcgctgtgctagaatattccgtctagttttgcagaagaaacacatagagcagaagcaagtggaagactttgcaatgattcctgcaaaggaggcaaaggatatgctatataagatgctctcagaaaatttcatgtcactccaggaaattcccaaaacaccagaccatgccccatccaggaccttctatttatatactgtgaacatcctgtcagctgcccraatgttgttgcacaggtgctacaagagcatagccaacttgatagaaaggaggcaatttgaaaccaaagagaataagcgtctactagaaaaatctcagagggtagaagccatcattgcatctatgcaggctactggtgcagaggaagcacagttacaagaaatagaggagatgatcacagctcctgaacgtcagcagctagagaccctgaaacgtaatgtcaacaagttggatgccagtgagatccaggtggacgaaaccatcttcctgctggagtcttacattgagtgcaccatgaagagacagtgatccagaagaagcatcttcctcagaagatctggggggatggaaagcaaaataaaggaggtgcctggatscattatttgcagtgggataagtcgcagagtcttcaactaaacccccctctctatcccctgcagcccaggatacacctgaaagaatttggcatatttagatccattgctgtagtctcccctcatcaaatcttggcagtgggaagaaccttaaatcaacaaggttaatcatctatcagatgcatctgttcccataaagaagttacccacacctatggttacctatatccctggcaataggaaacttcctaagaagttaattttattttcagatgtctatgcctgttctttattttgttgagataggtgatagatagatagatagatagatagatagatagatagatgatttgttgttgttgagacaggatctcactctgtcactcaggctggggtgtaatagcgcaatcacagctccctacagccttgacctcctgagctcaagcagtccttccacctcagcctctggagtagctgggactacaggcatgcaccacacatacccagctattttttatttatttatttwtttttttgtagagacagggcctccctgtgttgcccaggctgatgaactgtaatttttaacacacacagtgtagggaatgtgaaagactatcacagagtagaagaaaaaattattttcagggttagcaggtggattgtcccaagcagtcacactagaatctgtggactgaagccacatttgccagctccaggcttctaacacatctgaaactgtgtatgtagaacagctagctcaatgcctggcatatggtaagcacacagtaaattagcgccttcctcttctccatggttccttaaaactggcaacgctaaattctctctctcagtatcacggatataatttgtcccagcagctttaattcatttaaagcagttagatkttttataatatcttcagttttctctcaccaatgtgttttctaattgtttaaacacttgagtgtcaaacaattgccagccaccatactaaacacaacatacaaggatagataaataagacaccatctctgccctcaagccagtcaccatcatttactaagcacctgttttgtgctaagtactggggtaagccttggggatataaagattaataaattttgagcatacagtctagtaggaggagacaaataagtacataagtaccaggaagtattaggggtgctacagtagaagagtaaacactatgtacagagaggccagaaagggaaaagggtcaggcagggaagggaacacagagagtgacaatgtatagtttgaaagatgaggatgctttatttgcaaactatcttaacaagggattcgtaaccagaatatataaggagctcaaacaatagcaaaaagaacaatccaacttaaaaatggccaaaagatcttaataggtagttttcgaaagaagatacacaaatggccgacagatacatcaaaaaatgttcaacatcactaatcagagaaatggaaatcaaaatcaatgagataacatctcaccccaattcattacttttatcaag

SEQ ID NO: 6217 - DNA, 1683 bp, Homo sapiens
caccaaagaggcgcaggaaggagagacaaacggcccgcccgccggctccacaaacagcccctcgctggtcctccagtcttccagcgagaagaaagaaagagcgtccccggaagccgccgaaactctggggtagagtggcacgcgctttttgcttttccgcgtcttcttcggtggcgatccgcgtcctagaaagggcggtgggctccacctcggcctagaaggccagcgggagccgtaggaagccgtcgcgggaagctcagccgaattggagttggagcccccggattgcgctgaccctgagctctcagactccccagtacaatgactcaagcagaaattaagctctgttctttgttgctgcaagagcattttggagagattgtagaaaaaattggagtccatctgataagaaccggcagccagccactaagagtaattgcccatgacacaggaacatcactggatcaggtgaagaaagccctgtgtgtcctcgtccaacataacctggtgagttatcaagtgcacaaacgtggtgtggtggagtatgaagcccagtgcagccgggtattgcgaatgcttagatatccccggtacatctatactaccaaaactctgtacagtgacactggagagctgattgttgaggagcttctgttgaacggcaaactgacaatgtcagctgttgtgaagaaagtggcagaccggctcacagagaccatggaggatggcaagaccatggactatgctgaagtatcaaacacatttgtgcgactggcagacacacactttgtacaacgctgcccttcggtacctaccactgagaattcagaccctgggccaccaccacctgcccccacacttgtcattaatgaaaaggacatgtacctggttcctaaactcagcttgatagggraaggtaaaaggaggagatcatctgatgaagatgctgctggggagcccaaggccaagagaccaaaatatactacagataacaaggagcccattccagatgatgggatttattggcaggccaaccttgacagattccrccaacacttccgtgaccaagccattgtgagcgcagttgctaacaggatggaccagacaagcagcgagattgtgcgaaccatgctccgaatgagtgagattaccacttcctctagtgctcccttcacccagccattgtcttccaatgagatcttcagatccctacctgttggctataacatctctaagcaagttcttgatcagtatctcactctgctggcagatgatccatgaactgcattgatgatgaagtaaaaagaggccaggcatggtggactttgggaggctgaggcaggtgaattgcatgaacccaggagttcaagatcagctaagcaacatggcaaaaccccatctctaccaaaaatacaaaaactagccagatgtaacgatgcatgcttgtagtccagctcctcaggaggctgaggtgggaggatcgctagagcccaggagacagacgttgcagtaagctgagatcatgccactgtactccaacctgggtgaccctgtctcaaaaaagaaaaggaaaaaggacttttaatcaaccaaattttagttaagcaaaacccttacttaaacacttgtattaaagttttggaatatttatgtaccatgactgaaaccataaattataacatg

SEQ ID NO: 6218 - DNA, 480 bp, Homo sapiens
atgcttgttgtcctgaacagtgtcctaatggaacagcaagactgtgcccttcccctcctgacagatgtcatccaaacaaacaaagaagttgccttcaaagacctggatgtggccattctcttgggctctgtrccaagagaggaaagatttactgaaaatgtaaaaatcatcaaatggcagggtgcagccttggagaaatatgacaagaagttcgttaaggttattgttatgggaaacccagccaatatcaactgcctgactgcctccaagttggttccatccatcttcaatgagaacttcagttgcttgacttgtttggatcacaaccaaactcaagttcaaattactcttaaacttggtgtgactgctgacaataataagacctggaaatttgttgaagctctctccattaatgattcctcatgtaagaagatggatcttactgcaaaggaactggcagggaagaaaaagaaactgctt

SEQ ID NO: 6219 - DNA, 1818 bp, Homo sapiens
tctcaacccctgcctgaggcggaggcggtgcccggggcgggccaagcgtgaccgcgggtcggcggggcgtgtttaagaccgcggcgtgcgcacccggcccacgccagctcccggccgcggcacagcagccccggcgctccccgcgccgccccgcgcaggcgcccccgccccgccgtcgccgccgccgcagccaggagccgctgcaccatgccccgcatagatgcggacctcaagctcgacttcaaggaygtcctgctccgacctaagcggagcagcctcaagagccgagccgaggtggatcttgaacgcaccttcacgtttcgaaattcaaagcagacctactcagggattcccatcatcgtggccaacatggacactgtgggcacgtttgagatggcagccgtgatgtcacagcactccatgtttacagcaattcataagcattactccctggatgactggaagctctttgccacaaatcacccagaatgcctgcagaatgtagccgtgagttcaggcagtgggcagaatgatctggaaaagatgaccagcatcctggaagctgtgccacaggttaagtttatttgcctggatgtggccaatgggtattcagaacattttgtggaattcgtgaaacttgtccgtgccaaatttcctgaacacaccattatggcagggaacgtggtgacaggagaaatggtagaagagcttattctttccggagcagatatcatcaaagtgggagttggaccaggttctgtgtgcaccacccgcaccaagacgggagtggggtacccccagctgagtgccgtcattgagtgtgccgactctgcccayggcctgaagggccacatcatctctgatggaggctgtacgtgtccaggggatgtcgccaaagcctttgctggagcagattttgtcatgctgggaggaatgttttcgggtcatacggagtgtgctggagaagtgwttgagaggaacggacggaagctcaagctcttctacgggatgagctctgacaccgccatgaacaagcacgcaggaggagttgctgagtacagagcctctgagggtaagactgtggaagttccttacaaaggagatgtggaaaacactatcctggatattctcgggggactgaggtccacgtgcacctacgtgggggccgccaaactcaaggagctcagcaggagggcaacattcatccgggtgacccagcagcacaacacygtgttcagctaaccctggggacaaagcagcgtctggctcgagtggaagcgtccaaacctgcttttcccatctccccscaagtctgttccgtcagagcttctggctgctccwgaatggtggaatgctgtgtcctctcttctgtctcctgcygcctggaggcttcggggctctcccgcctgccttstcggggcccagacgcaaggcaccgattgggccaacatcagagccctgctgcccagaactcataacctcattgttcaaaccaacacttgcacctttctctttttctctttctctctccctttctttgtttttctttcttttttaaaagaagatggtttcactttaatataatgctattatcttaagacttaatggagttgctggagtttgtatttccaggagtcaagttgaatggtttgggatttgttttgctaccttcctagacaggctgayggcaagcctctcccggcgattagcagacaagtcaccttaggaggggcaaggagaggaggacagtgcgggggccaagggtggacaggccggagtcaaagtaactggcatccctcacctctagcttttggttgc

SEQ ID NO: 6220 - DNA, 1821 bp, Homo sapiens
tctcaacccctgcctgaggcggaggcggtgcccggggcgggccaagcgtgaccgcgggtcggcggggcgtgtttaagaccgcggcgtgcgcacccggcccacgccagctcccggccgcggcacagcagccccggcgctccccgcgccgccccgcgcaggcgcccccgccccgccgtcgccgccgccgcagccaggagccgctgcaccatgccccgcatagatgcggacctcaagctcgacttcaaggaygtcctgctccgacctaagcggagcagcctcaagagccgagccgaggtggatcttgaacgcaccttcacgtttcgaaattcaaagcagacctactcagggattcccatcatcgtggccaacatggacactgtgggcacgtttgagatggcagccgtgatgtcacagcactccatgtttacagcaattcataagcattactccctggatgactggaagctctttgccacaaatcacccagaatgcctgcagaatgtagccgtgagttcaggcagtgggcagaatgatctggaaaagatgaccagcatcctggaagctgtgccacaggttaagtttatttgcctggatgtggccaatgggtattcagaacattttgtggaattcgtgaaacttgtccgtgccaaatttcctgaacacaccattatggcagggaacgtggtgacaggagaaatggtagaagagcttattctttccggagcagatatcatcaaagtgggagttggaccaggttctgtgtgcaccacccgcaccaagacgggagtggggtacccccagctgagtgccgtcattgagtgtgccgactctgcccayggcctgaagggccacatcatctctgatggaggctgtacgtgtccaggggatgtcgccaaagcctttggagctggagcagattttgtcatgctgggaggaatgttttcgggtcatacggagtgtgctggagaagtgwttgagaggaacggacggaagctcaagctcttctacgggatgagctctgacaccgccatgaacaagcacgcaggaggagttgctgagtacagagcctctgagggtaagactgtggaagttccttacaaaggagatgtggaaaacactatcctggatattctcgggggactgaggtccacgtgcacctacgtgggggccgccaaactcaaggagctcagcaggagggcaacattcatccgggtgacccagcagcacaacacygtgttcagctaaccctggggacaaagcagcgtctggctcgagtggaagcgtccaaacctgcttttcccatctccccscaagtctgttccgtcagagcttctggctgctccwgaatggtggaatgctgtgtcctctcttctgtctcctgcygcctggaggcttcggggctctcccgcctgccttstcggggcccagacgcaaggcaccgattgggccaacatcagagccctgctgcccagaactcataacctcattgttcaaaccaacacttgcacctttctctttttctctttctctctccctttctttgtttttctttcttttttaaaagaagatggtttcactttaatataatgctattatcttaagacttaatggagttgctggagtttgtatttccaggagtcaagttgaatggtttgggatttgttttgctaccttcctagacaggctgayggcaagcctctcccggcgattagcagacaagtcaccttaggaggggcaaggagaggaggacagtgcgggggccaagggtggacaggccggagtcaaagtaactggcatccctcacctctagcttttggttgc

SEQ ID NO: 6221 - DNA, 6403 bp, Homo sapiens
acattatctgcccaagcacagtgctgttggccaagcctccagcagctgacgggacccagctgtagtgaggttgcagtgattgagtaggattggcctgcttcaaagcagaggtttctcatgggaatatgcttattaaactcccactggtgcagaaaccatgaacagaggatgaacaagtgaagttgcaatctcctccatcacagctcagttccccaacaacaggatcacaagctggagatgcctttaaggaagatgaagatccctttcctcctactgttctttctgtgggaagccgagagccacgcagcatcaaggccgaacatcatcctggtgatggctgacgacctcggcattggagatcctgggtgctatgggaacaaaactatcaggactcccaatatcgaccggttggccagtgggggagtgaaactcactcagcacctggcagcatcaccgctgtgcacaccaagcagggcagccttcatgactggccggtaccctgtccgatcaggaatggcatcttggtcccgcactggagttttcctcttcacagcctcttcgggaggacttcccaccgatgagattacctttgctaagcttctgaaggatcaaggttattcaacagcactgatagggaaatggcaccttgggatgagctgtcacagcaagactgacttctgtcaccaccctttacatcacggcttcaattatttctatgggatctctttgaccaatctgagagactgcaagcccggagagggcagtgtcttcaccacgggcttcaagaggctgrtcttcctccccctgcagatcgtcggggtcaccctccttacccttgctgcactcaattgtctggggctactccacgtgcctctaggcgtttttttcagccttctcttcctagcagccctaatcctgacccttttcttgggcttccttcattacttccggcccctgaactgcttcatgatgaggaactacgagatcattcagcagcccatgtcctatgacaatctcacccagaggctaacggtggaggcggcccagttcatacagcgggggcagatcttgaaccttctggatgagctgagattggctaatgataccctcatctacttcacatyggaccagkgagcacatgtagaagaagtgtcttccaaaggagaaattcatggcggaagtaatgggatctataaaggaggaaaagcaaacaactgggaaggaggtatccgggttccasgcatccttcgttggcccagggtgatayaggctggccagaagattgatgagcccactagcaacatggacatatttcctacagtagccaagctggctggagctcccttgcctgaggacaggatcattgatggacgtgatctgatgcccctgcttgaaggaaaaagccaacgctccgatcatgagtttctcttccrttactrcaacgcctacttaaatgctgtgcgctggcaccctcagaacagcacatccatctggaaggcctttttcttcacccccaacttcaaccccgtgggttccaacggatgctttgccacacacgtgtgcttctgtttcgggagttatgtcacccatcacgacccacctttactctttgatatttccaaagatcccagagagagaaacccactaactccagcatccgagccccggttttatgaaatcctcaaagtcatgcaggaagctgcggacagacacacccagaccctgccagaggtgccmgatcagttttcatggaacaactttctttggaagccctggcttcmgctgtgctgtccttccaccggcctgtcttgccagtgtgatagagaaaaacaggataagagactgagccgctagcagcgcctggggaccagacagacgcatgtggcaaagctcaccatcttcactacaaacacgcctgagagtggcactggggaaacataactccatctacaccttggatttggactgattctccattttatcacctgaaggcttgggccagagctcaacagctactcaactggaggggtgagggggataaggtctgtagtatacagacaggaagatggtaggtttatgccttctgtggccagagtcttggactcatggaaatagaatgaatagaggggcattcacaaggcacaccagtgcaagcagatgacaaaaaggtgcagaaggcaatcttaaaacagaaaggtgcaggaggtaccttaactcacccctcagcaaatacctatgtcaacagtataagttaccatttactctataatctgcagtgatgcaataaccagcataataaaaaggcaatcacataaaaaagagtttagtcgtctaaacataagtaactttaaggtgaatgaaagatcttctttaggaataatagatgatggtaagttccactttggttattggaaggcaagtcattattactggtattagttaaaacacatatcaaatgcttgctcttcatcatatatatagttatgcatacatacacacacacacatacagtatattctttcctcaaaagggttaagatgtctaaaatagggacctagaagcttaacactatttaagtaaatacagtagaagctcacaaatagatttctttgcacaatgattttttgcaaaattttacagtaataataatcccaaggcaaatctctcctgaactgctttccattccataatttgtagtataattcttggattccactgttttctttggggaatggaagttctgaattaaaagcccactgtggagatgctgtggttcatggaatctcttccagtgtaattcagaatcattggcctagaaagtctctgatatttggaggggaacaaaaatcactcacaagcaatccatgatctatacacataagcataatttcctttagttctagttagtcatcagagaacagtcatgtatgcaagttttgtgactgagaaatttctgtgcttccaatccacaatgagatgcatgattttgttttcatcccatttcccccaagcccctgtaaatcagggaaaatgcgcaactgatcgcctaggagagggcctcgtagtggcacagctggagatagtttcaaagtctaaaccaccagcccatcctgaggaaagcctcctatggaatgtaaagtgcaatcatttcttcagatataagactttccccaacaatgtgattggattcctttatggcaaaatcgagagaagctgccatccacctgcttatgcatttatctcttttgtggacttgtctgaccaccttctatttgcccagagtttgctcaattccaagacagtgcccatgaatgggacacctgtaatgtaacccacacagcggtttgcagagaatgttagccatgacttgggctttctgaaagttggctataatttctctatccctacccacaaccctgggaagttggagcaagaggggcatactattgggctgggaggatttgacagcatttccccagttgccctttaagttcttctatttcaaacgttaattttgcttctctttctaaaaaaaaaaaaaaaaaagaaagagaagaaagaagtgattcctaccccctacctccagagttgttgaaagctgaaaagcatacaagattcttccttttaacttggatttctcgttccagaaattgtgggataatctgtattcttgctttagaaaacattcttakagagggtactagcttactgatgatgtgttaggattgctactgatgctgtcatgtggaaactatttaaaggcactattataaatttatcctataagatgacaatgtttactcaaagtctaacatattcaatgcaagtaagactttctgaaaacacttgatgatgtggaaatgctgcaggattaaataacttgaagagcctttatagattatatgaatgcctatttgtgtctagaaccagttatttaacctgtaaaatgtcaatagcaaatgaaggatgaagtatatctctagatgcaaatacattgagtttaaaagtgcctcaaaataattgagatcacatttcaggacatttggaaatcaggtcgatttgtggtaactgtagtcatcttaaatttcaaaccatttaccatctgaaagttttgatttgaatgtaaaacaggaaattggaattcctttgtccaggagaaacctcacaaaccttctttaaggcatagttttgttgtttgtttgcttgtttgttgcaggctgtaaggcatggctgcttgtttacaaagcatctcattcatattacctgtggagttgcatatccaaaccttagtgagttttgaagctttaagcaaattcttttaaaaaattcttgtatttctagcattactagatattaaaagttaagcaaatagattaatgacgtatacataggcatcatttcacaaggtcagtaatgctgcaggaaaagcaaaattgcaatctacgtatctatggtactaaggaagtcctgtttttcaaaaatggaagcccacttctcagatttttytgaagggcatacaatgaaaagtgaaggggaaacacacacacrcaaaaaaacaagtatttggcttgtcacaggaatctgattgcattaagtgaaaggattatttagaatatgttaatgcaaagctaaaataaaattttccttggcaattaaaaatgctgtgcgctaataccctgctttctatcgtgactcaattcaacaatgtggggaatgtttactacatttccaacttgatgtcaagcaatggggaatacaagttccagttctgcaaagattcgtcaactttcttagctcaagagagaggctgagaaatgcagagaagaataagacataaaatagctccgacctccatgatccgagagtgggaaaaggcccgattattacccataaggcacactctctaaggccttttaaggggcctacaaaaatgttttattttataatcagaagaaaaggaaatgaacattggggattgaaaatcatattggtatttgcaccaacatagtcataaaatagtatgttaatatgtttttactttatatatttatatattaaaatatatttaatatgttttgcctttgtggcccatgaaagtcttactgggccctggggaaggtatcctaccctggtgaagcagctgctttgctctacaaatacctggggcagaaatttgatttgaaaagtattattctctcttctctttgtttcaactggattcctttggaaaaccaaactagtatcagaacaaaccccgaaacagtaagaaattggagtgagaagggcatggtattgggactaggatcggctctcattcgatcgagctattctcttaaaatgacaaaaagtgtccataaagaggctgctggagagtgcgtggccatagggagccgacatgcccgggaggaaaggtgttgattacatggatacttctaaaagctaaagccttgttgccttctctttaatgcctagagaatgggatgtgtgatgcaaatgctcaaaacctcttaaatcatagctgtctgacctctacggacctcacatccatctgaggcttcatggacaaagattctccacttggccaaactttagccaagctcctcaaccttctcccaggcccaatctgggcacttccttgtaaaatctagttttggcaagaagtctattaggtcagtttagcaagaacacctaacccccccatatctgttcaacctcagtatctgatcaggctcctcagcctccaccatcccccaggtgatgtctggtcaactggcctrccttcagctagaatcctgttaggtcggtttagatgaatgctccctgatatttcctcttggtaatcttccatccactgcccctgaccctgttccctgtctataaatccccagttttccatggtgtattcagagctgagtccagtctctctcccctactacaagtccccattgctgtggtccccgtacctgtcatgatggtcctaaataaagtcttactgtgctttaataggtagcattgaaaaatttttttctttgacatcattcatgacaacatgaaacctattgggacagcatgactgtgcagggtctttagagctcagctttctgaggccctgagcattcttggttttccgacatcgtgaacctgttctgtgttgcaagatatcactcaagccagtgttgcttaataccatctctttgtgtaatagatctgaataaagtaattgtaatacaccaatattttactttgttgagtattattttaatgggagcctttccaatgaaggaaacatcagctttccttgttagaatgcaagcagcttaaaaactacccatgtctttctggaaaggaaacattgccatgtaactatgtatcagttttctaagaacttcatgggccttccata

SEQ ID NO: 6222 - DNA, 5200 bp, Homo sapiens
gcggccgccgcattcgacccgcgccatggcagaggagagcgggtgccgggagggaagccgggaaccgtctccattctgaaactagggcggggaagccgccgcgggagcccgggaggggggcggaggcgggcggaggcggcggcgcggccagcgcaccattcactccacctgatctcggggcgctgtgcgctgaggaaggcgcgggcgagycggagcagaagaaggagggagggagccagccgctgcagccaccaccgccaccatgtcctaccaaggcaagaagaacatcccgcggatcacgagtgaccgtctccttatcaagggaggcagaatcgtcaatgatgatcagtccttttatgctgatatttacatggaagatggcttaataaaacaaattggagacaatctgattgttcctggaggagtgaagaccattgaagccaatgggaagatggtgatccctggaggcatcgatgtccatactcacttccagatgccatataagggaatgaccacagtagatgacttcttccaagggacaaaggcggccttagcaggtggcaccaccatgatcattgaccatgtggtgcctgagcctgagtccagcctgactgaggcctatgagaaatggagagagtgggctgatgggaagagttgctgtgactatgccctgcatgtggacatcacccactggaatgacagcgtcaagcaggaagtgcagaacctcatcaaggacaaaggggttaactccttcatggtttatatggcttataaggatttgtatcaagtatctaacacagagctctatgagatcttcacctgcctgggagagctgggggccattgctcaagttcatgctgagaatggggatatcattgcccaggagcaaacscgcatgttggaaatgggrataactggcccagaaggccatgtactgagcaggccagaagagctggaagctgaggctgtgttccgtgccatcaccattgccagccaaaccaattgccctctctacgtcacaaaggtcatgagcaagagtgcagctgacctcatctcacaagccaggaaaaaaggaaatgtagtctttggtgagcccatcactgccagcctcggcatagatggaacccattattggagcaagaactgggccaaggcggctgcatttgtgacatccccacccctgagccctgacccaactactccggactacatcaactccttgctggccagcggggatctgcagctatctgggagtgcccactgcaccttcagcactgcccagaaagcaattgggaaggacaacttcacagccattcctgagggcaccaatggtgtggaggagcggatgtctgtyatctgggacaaggctgtggccacagggaaaatggacgaaaaccagttcgtggctgtgacaagcacaaacgctgccaagatcttcaacctgtatccccgcaagggaagaatatctgtsggttctgacagcgacctcgtcatctgggatccagatgctgtgaagatcgtctctgccaagaaccaccagtctgcggcagagtacaacatctttgaagggatggagctgcgcgggkctcctctggttgtcatctgccagggcaagatcatgctggaagatggcaacctgcacgtgacccagggggctggccgcttcataccctgcagcccgttctccgactatgtctacaagcgcattaaagcacggaggaagatggcagacctgcatgccgtcccaaggggcatgtacgatgggcctgtgtttgacctgaccaccacccccaaaggtggcacccccgcagkctctgctcggggctctcctactcggccgaacccacctgtgaggaatcttcatcagtcgggatttagcctgtcaggcacycaagtggatgagggggttcgctcagccagcaagcgcatcgtggcgcccccaggcggccgttctaatatcacatctctgagttaagcaagccttcctcaaagagaggggcagaagcaagaagagattgttttgaagccaaaatggtacaccgatatttaagaaggaaagcgaatccaaacggttgtgatctaaagaatcaataagcctcaagccttatgtttctccaatgttacgctcgcttgcctagctttacgaatattgctttgttttctgtttatgcatagccttgatttgtttgactcccctccccccatttacatgcatgcaatcagacaggccactaaggtaaaagagtctgctctatcatagtgttgagagcgtgtgtagtgctgcatcttatgacaaggggacagacaagctgggacgtcagggaaatgaacaaaagggacgcaggttatttggggtgagtgggtggtgggagcctggagcaaggtggagggtgcagaggggctggggtagggcatgtaggagggaggtgggtgggtcaggtgagtggaaggggtgttgtatattgtgttgatgacgtacgttatttccatggaagatagccgctgtggcagctgtcacatcaccacagctccctagrgtctgccgagaaggcaggcagtctttgggttctgttctttgtcaygtcccctacaagtaaattttgtytctttgaacgtttattaaaatgccaagacccaaccatttcttccacctgcttgattgtgccagtgtttgctcaggcctctttcttagtgttgctttcaaatccttctctttcctgggttgggaaggccaggcagggacagagcaaatgacacttctcttcctcttgccctccctgcctctttggtgctcttaaaagccagcagctgagaacatagcacaggcccacgtggtgagggcacccacagcttaaagacgcttccttctaaacacggcgaggtcacctctcactcttctgtctttgcaaaccgagaagagtggcatgcttctggcatcccaagtcaggattttagctcagatgaggcagaatgaagggcctctcttacaggcagtttgtgtttgattctctcgatcctggcacatccatgataaataggagtttttgaaagttggttttattaggtgttccctaatttttaccgtaataggtcatctcagcttatatgaaagtcaagtggggaactgggaaagccaaagtcagtcttgagcagagggagcacattttgtggacctggttccacctttccattccaaaccacctgtttccccttccattagcagaaactctgggggaactttgtgtctcagtcctagaatctccccaagtgagtggaagtgacatgatgcagtcttcctcatggggcacctgaaagaaattagtgtgggtgcttcgatctaccttgtctgtcagagttgaatatctctttccctatcatgctgcttctgaaaattcagttttggagcaagtcctgtgagcaagataagaatctatagaaccaagatgctcattttcagaagaaatatgttcaacctgggatcagacttccatgctctggggaatccaagtggtagcacctgtaaccctgtgtactaagtgctttgaagagaagagcaggcctcagacaccttttaattgcttaggagaaaccattrtctctgactgcaggtttgaataagttgaagaccagagaaaagtacacactgggctacaaaggaatttggagatagccaaggaacaggatttcccctagcaagctaccttctgttcaaatcatgaaaaaagactatttccccttagaatagggaagcttgctattttaaagctcttgtagtgcttttcttttaagggagatgtagtaaaagggaaaatgtagctcttartttacacttcaaagatgtgggggtctttcagagaactaagaataacagttttatgtgcagagagagtttgccagatctgaagcatatacctcattgactaggctgttactttgggataggttgcagtaccagccacagccagcagatagaggaaaagacacacataaactcgcttctgagsgtccacttctgcactctctgctctgctgttactcagcccctgagtctgactcatctctgcacaacctctctgtgccatgaagataagtcttccatggccaaatcggtcatccgcactgcccttgggacttccgaagtgaaccattccaccagaacctttgattctgcacaagatttccttgctctgggaacaacccccaaatgcccttgggaggaacaacatgagctcaggaagcctctctttcttcacttaccattactaactctccaagcatagaaatccctgggaattgcgagaataactcccactattttaaaatttatattcagatttgtttcgtttcataagacacatcaaacaggcctatacaaaaggtttaggaaaagaaaacaatggtgagtcccggccctcttcgaattcactggcacctcatgcaagtgtaggaaggcacgctggatcgtctakctgattccaaagctgtcctttgccatctcatcccttggcctgccccccaaccctgaggatgcccctgccatccccccaacctcctcatattgcctctgaacccagatggcaatccatcccggttctctctgagggccacgggcttgggtagtggaaagggtgtttgggaaattgttaaatcagttacccgtagtagagctatttcttgtacttctaagttttctagaagtggaaggattgtagtcatcctgaaaatgggtttacttcaaaatccctcagccttgttcttcacgactgtctatactgagagtgtcatgtttccacaaagggctgacacctgagcctggattttcactcayccctgagaagccctttccagtagggtgggcaattcccaacttccttgccacaagcttcccaggctttctcccctggaaaactccagcttgagtcccagatacactcatgggctgcccygggcagccagcattcattgtaagttccctctttgaaaactggtgtgtgggtgttcagttctgtgtctggtgggtatggacagacagtaatctcctgtgatctgtgctagctgtgaggcagctctggaacgtgaagagctgtttkgtttgaaccgtgaacaaaactgtgttttgagtttagctgacattaaagaaaaaagttcatcacgtgactgttaatgtaaacctggttattaaaataactatgaaattacc

SEQ ID NO: 6223 - DNA, 5105 bp, Homo sapiens
ccgccgcgggagcccgggaggggggcggaggcgggcggaggcggcggcgcggccagcgcaccattcactccacctgatctcggggcgctgtgcgctgaggaaggcgcgggcgagycggagcagaagaaggagggagggagccagccgctgcagccaccaccgccaccatgtcctaccaaggcaagaagaacatcccgcggatcacgagtgaccgtctccttatcaagggaggcagaatcgtcaatgatgatcagtccttttatgctgatatttacatggaagatggcttaataaaacaaattggagacaatctgattgttcctggaggagtgaagaccattgaagccaatgggaagatggtgatccctggaggcatcgatgtccatactcacttccagatgccatataagggaatgaccacagtagatgacttcttccaagggacaaaggcggccttagcaggtggcaccaccatgatcattgaccatgtggtgcctgagcctgagtccagcctgactgaggcctatgagaaatggagagagtgggctgatgggaagagttgctgtgactatgccctgcatgtggacatcacccactggaatgacagcgtcaagcaggaagtgcagaacctcatcaaggacaaaggggttaactccttcatggtttatatggcttataaggatttgtatcaagtatctaacacagagctctatgagatcttcacctgcctgggagagctgggggccattgctcaagttcatgctgagaatggggatatcattgcccaggagcaaacscgcatgttggaaatgggrataactggcccagaaggccatgtactgagcaggccagaagagctggaagctgaggctgtgttccgtgccatcaccattgccagccaaaccaattgccctctctacgtcacaaaggtcatgagcaagagtgcagctgacctcatctcacaagccaggaaaaaaggaaatgtagtctttggtgagcccatcactgccagcctcggcatagatggaacccattattggagcaagaactgggccaaggcggctgcatttgtgacatccccacccctgagccctgacccaactactccggactacatcaactccttgctggccagcggggatctgcagctatctgggagtgcccactgcaccttcagcactgcccagaaagcaattgggaaggacaacttcacagccattcctgagggcaccaatggtgtggaggagcggatgtctgtyatctgggacaaggctgtggccacagggaaaatggacgaaaaccagttcgtggctgtgacaagcacaaacgctgccaagatcttcaacctgtatccccgcaagggaagaatatctgtsggttctgacagcgacctcgtcatctgggatccagatgctgtgaagatcgtctctgccaagaaccaccagtctgcggcagagtacaacatctttgaagggatggagctgcgcgggkctcctctggttgtcatctgccagggcaagatcatgctggaagatggcaacctgcacgtgacccagggggctggccgcttcataccctgcagcccgttctccgactatgtctacaagcgcattaaagcacggaggaagatggcagacctgcatgccgtcccaaggggcatgtacgatgggcctgtgtttgacctgaccaccacccccaaaggtggcacccccgcagkctctgctcggggctctcctactcggccgaacccacctgtgaggaatcttcatcagtcgggatttagcctgtcaggcacycaagtggatgagggggttcgctcagccagcaagcgcatcgtggcgcccccaggcggccgttctaatatcacatctctgagttaagcaagccttcctcaaagagaggggcagaagcaagaagagattgttttgaagccaaaatggtacaccgatatttaagaaggaaagcgaatccaaacggttgtgatctaaagaatcaataagcctcaagccttatgtttctccaatgttacgctcgcttgcctagctttacgaatattgctttgttttctgtttatgcatagccttgatttgtttgactcccctccccccatttacatgcatgcaatcagacaggccactaaggtaaaagagtctgctctatcatagtgttgagagcgtgtgtagtgctgcatcttatgacaaggggacagacaagctgggacgtcagggaaatgaacaaaagggacgcaggttatttggggtgagtgggtggtgggagcctggagcaaggtggagggtgcagaggggctggggtagggcatgtaggagggaggtgggtgggtcaggtgagtggaaggggtgttgtatattgtgttgatgacgtacgttatttccatggaagatagccgctgtggcagctgtcacatcaccacagctccctagrgtctgccgagaaggcaggcagtctttgggttctgttctttgtcaygtcccctacaagtaaattttgtytctttgaacgtttattaaaatgccaagacccaaccatttcttccacctgcttgattgtgccagtgtttgctcaggcctctttcttagtgttgctttcaaatccttctctttcctgggttgggaaggccaggcagggacagagcaaatgacacttctcttcctcttgccctccctgcctctttggtgctcttaaaagccagcagctgagaacatagcacaggcccacgtggtgagggcacccacagcttaaagacgcttccttctaaacacggcgaggtcacctctcactcttctgtctttgcaaaccgagaagagtggcatgcttctggcatcccaagtcaggattttagctcagatgaggcagaatgaagggcctctcttacaggcagtttgtgtttgattctctcgatcctggcacatccatgataaataggagtttttgaaagttggttttattaggtgttccctaatttttaccgtaataggtcatctcagcttatatgaaagtcaagtggggaactgggaaagccaaagtcagtcttgagcagagggagcacattttgtggacctggttccacctttccattccaaaccacctgtttccccttccattagcagaaactctgggggaactttgtgtctcagtcctagaatctccccaagtgagtggaagtgacatgatgcagtcttcctcatggggcacctgaaagaaattagtgtgggtgcttcgatctaccttgtctgtcagagttgaatatctctttccctatcatgctgcttctgaaaattcagttttggagcaagtcctgtgagcaagataagaatctatagaaccaagatgctcattttcagaagaaatatgttcaacctgggatcagacttccatgctctggggaatccaagtggtagcacctgtaaccctgtgtactaagtgctttgaagagaagagcaggcctcagacaccttttaattgcttaggagaaaccattrtctctgactgcaggtttgaataagttgaagaccagagaaaagtacacactgggctacaaaggaatttggagatagccaaggaacaggatttcccctagcaagctaccttctgttcaaatcatgaaaaaagactatttccccttagaatagggaagcttgctattttaaagctcttgtagtgcttttcttttaagggagatgtagtaaaagggaaaatgtagctcttartttacacttcaaagatgtgggggtctttcagagaactaagaataacagttttatgtgcagagagagtttgccagatctgaagcatatacctcattgactaggctgttactttgggataggttgcagtaccagccacagccagcagatagaggaaaagacacacataaactcgcttctgagsgtccacttctgcactctctgctctgctgttactcagcccctgagtctgactcatctctgcacaacctctctgtgccatgaagataagtcttccatggccaaatcggtcatccgcactgcccttgggacttccgaagtgaaccattccaccagaacctttgattctgcacaagatttccttgctctgggaacaacccccaaatgcccttgggaggaacaacatgagctcaggaagcctctctttcttcacttaccattactaactctccaagcatagaaatccctgggaattgcgagaataactcccactattttaaaatttatattcagatttgtttcgtttcataagacacatcaaacaggcctatacaaaaggtttaggaaaagaaaacaatggtgagtcccggccctcttcgaattcactggcacctcatgcaagtgtaggaaggcacgctggatcgtctakctgattccaaagctgtcctttgccatctcatcccttggcctgccccccaaccctgaggatgcccctgccatccccccaacctcctcatattgcctctgaacccagatggcaatccatcccggttctctctgagggccacgggcttgggtagtggaaagggtgtttgggaaattgttaaatcagttacccgtagtagagctatttcttgtacttctaagttttctagaagtggaaggattgtagtcatcctgaaaatgggtttacttcaaaatccctcagccttgttcttcacgactgtctatactgagagtgtcatgtttccacaaagggctgacacctgagcctggattttcactcayccctgagaagccctttccagtagggtgggcaattcccaacttccttgccacaagcttcccaggctttctcccctggaaaactccagcttgagtcccagatacactcatgggctgcccygggcagccagcattcattgtaagttccctctttgaaaactggtgtgtgggtgttcagttctgtgtctggtgggtatggacagacagtaatctcctgtgatctgtgctagctgtgaggcagctctggaacgtgaagagctgtttkgtttgaaccgtgaacaaaactgtgttttgagtttagctgacattaaagaaaaaagttcatcacgtgactgttaatgtaaacctggttattaaaataactatgaaattacc

SEQ ID NO: 6224 - DNA, 2904 bp, Homo sapiens
gcggccgccgcattcgacccgcgccatggcagaggagagcgggtgccgggagggaagccgggaaccgtctccattctgaaactagggcggggaagccgccgcgggagcccgggaggggggcggaggcgggcggaggcggcggcgcggccagcgcaccattcactccacctgatctcggggcgctgtgcgctgaggaaggcgcgggcgagycggagcagaagaaggagggagggagccagccgctgcagccaccaccgccaccatgtcctaccaaggcaagaagaacatcccgcggatcacgagtgaccgtctccttatcaagggaggcagaatcgtcaatgatgatcagtccttttatgctgatatttacatggaagatggcttaataaaacaaattggagacaatctgattgttcctggaggagtgaagaccattgaagccaatgggaagatggtgatccctggaggcatcgatgtccatactcacttccagatgccatataagggaatgaccacagtagatgacttcttccaagggacaaaggcggccttagcaggtggcaccaccatgatcattgaccatgtggtgcctgagcctgagtccagcctgactgaggcctatgagaaatggagagagtgggctgatgggaagagttgctgtgactatgccctgcatgtggacatcacccactggaatgacagcgtcaagcaggaagtgcagaacctcatcaaggacaaaggggttaactccttcatggtttatatggcttataaggatttgtatcaagtatctaacacagagctctatgagatcttcacctgcctgggagagctgggggccattgctcaagttcatgctgagaatggggatatcattgcccaggagcaaacscgcatgttggaaatgggrataactggcccagaaggccatgtactgagcaggccagaagagctggaagctgaggctgtgttccgtgccatcaccattgccagccaaaccaattgccctctctacgtcacaaaggtcatgagcaagagtgcagctgacctcatctcacaagccaggaaaaaaggaaatgtagtctttggtgagcccatcactgccagcctcggcatagatggaacccattattggagcaagaactgggccaaggcggctgcatttgtgacatccccacccctgagccctgacccaactactccggactacatcaactccttgctggccagcggggatctgcagctatctgggagtgcccactgcaccttcagcactgcccagaaagcaattgggaaggacaacttcacagccattcctgagggcaccaatggtgtggaggagcggatgtctgtyatctgggacaaggctgtggccacagggaaaatggacgaaaaccagttcgtggctgtgacaagcacaaacgctgccaagatcttcaacctgtatccccgcaagggaagaatatctgtsggttctgacagcgacctcgtcatctgggatccagatgctgtgaagatcgtctctgccaagaaccaccagtctgcggcagagtacaacatctttgaagggatggagctgcgcgggkctcctctggttgtcatctgccagggcaagatcatgctggaagatggcaacctgcacgtgacccagggggctggccgcttcataccctgcagcccgttctccgactatgtctacaagcgcattaaagcacggaggaagatggcagacctgcatgccgtcccaaggggcatgtacgatgggcctgtgtttgacctgaccaccacccccaaaggtggcacccccgcagkctctgctcggggctctcctactcggccgaacccacctgtgaggaatcttcatcagtcgggatttagcctgtcaggcacycaagtggatgagggggttcgctcagccagcaagcgcatcgtggcgcccccaggcggccgttctaatatcacatctctgagttaagcaagccttcctcaaagagaggggcagaagcaagaagagattgttttgaagccaaaatggtacaccgatatttaagaaggaaagcgaatccaaacggttgtgatctaaagaatcaataagcctcaagccttatgtttctccaatgttacgctcgcttgcctagctttacgaatattgctttgttttctgtttatgcatagccttgatttgtttgactcccctccccccatttacatgcatgcaatcagacaggccactaaggtaaaagagtctgctctatcatagtgttgagagcgtgtgtagtgctgcatcttatgacaaggggacagtgagtggaaggggtgttgtatattgtgttgatgacgtacgttatttccatggaagatagccgctgtggcagctgtcacatcaccacagctccctagrgtctgccgagaaggcaggcagtctttgggttctgttctttgtcaygtcccctacaagtaaattttgtytctttgaacgtttattaaaatgccaagacccaaccatttcttccacctgcttgattgtgccagtgtttgctcaggcctctttcttagtgttgctttcaaatccttctctttcctgggttgggaaggccaggcagggacagagcaaatgacacttctcttcctcttgccctccctgcctctttggtgctcttaaaaccagcattcattgtaagttccctctttgaaaactggtgtgtgggtgttcagttctgtgtctggtgggtatggacagacagtaatctcctgtgatctgtgctagctgtgaggcagctctggaacgtgaagagctgtttkgtttgaaccgtgaacaaaactgtgttttgagtttagctgacattaaagaaaaaagttcatcacgtgactgttaatgtaaacctggttattaaaataactatg

SEQ ID NO: 6225 - DNA, 3784 bp, Homo sapiens
gcggccgccgcattcgacccgcgccatggcagaggagagcgggtgccgggagggaagccgggaaccgtctccattctgaaactagggcggggaagccgccgcgggagcccgggaggggggcggaggcgggcggaggcggcggcgcggccagcgcaccattcactccacctgatctcggggcgctgtgcgctgaggaaggcgcgggcgagycggagcagaagaaggagggagggagccagccgctgcagccaccaccgccaccatgtcctaccaaggcaagaagaacatcccgcggatcacgagtgaccgtctccttatcaagggaggcagaatcgtcaatgatgatcagtccttttatgctgatatttacatggaagatggcttaataaaacaaattggagacaatctgattgttcctggaggagtgaagaccattgaagccaatgggaagatggtgatccctggaggcatcgatgtccatactcacttccagatgccatataagggaatgaccacagtagatgacttcttccaagggacaaaggcggccttagcaggtggcaccaccatgatcattgaccatgtggtgcctgagcctgagtccagcctgactgaggcctatgagaaatggagagagtgggctgatgggaagagttgctgtgactatgccctgcatgtggacatcacccactggaatgacagcgtcaagcaggaagtgcagaacctcatcaaggacaaaggggttaactccttcatggtttatatggcttataaggatttgtatcaagtatctaacacagagctctatgagatcttcacctgcctgggagagctgggggccattgctcaagttcatgctgagaatggggatatcattgcccaggagcaaacscgcatgttggaaatgggrataactggcccagaaggccatgtactgagcaggccagaagagctggaagctgaggctgtgttccgtgccatcaccattgccagccaaaccaattgccctctctacgtcacaaaggtcatgagcaagagtgcagctgacctcatctcacaagccaggaaaaaaggaaatgtagtctttggtgagcccatcactgccagcctcggcatagatggaacccattattggagcaagaactgggccaaggcggctgcatttgtgacatccccacccctgagccctgacccaactactccggactacatcaactccttgctggccagcggggatctgcagctatctgggagtgcccactgcaccttcagcactgcccagaaagcaattgggaaggacaacttcacagccattcctgagggcaccaatggtgtggaggagcggatgtctgtyatctgggacaaggctgtggccacagggaaaatggacgaaaaccagttcgtggctgtgacaagcacaaacgctgccaagatcttcaacctgtatccccgcaagggaagaatatctgtsggttctgacagcgacctcgtcatctgggatccagatgctgtgaagatcgtctctgccaagaaccaccagtctgcggcagagtacaacatctttgaagggatggagctgcgcgggkctcctctggttgtcatctgccagggcaagatcatgctggaagatggcaacctgcacgtgacccagggggctggccgcttcataccctgcagcccgttctccgactatgtctacaagcgcattaaagcacggaggaagatggcagacctgcatgccgtcccaaggggcatgtacgatgggcctgtgtttgacctgaccaccacccccaaaggtggcacccccgcagkctctgctcggggctctcctactcggccgaacccacctgtgaggaatcttcatcagtcgggatttagcctgtcaggcacycaagtggatgagggggttcgctcagccagcaagcgcatcgtggcgcccccaggcggccgttctaatatcacatctctgagttaagcaagccttcctcaaagagaggggcagaagcaagaagagattgttttgaagccaaaatggtacaccgatatttaagaaggaaagcgaatccaaacggttgtgatctaaagaatcaataagcctcaagccttatgtttctccaatgttacgctcgcttgcctagctttacgaatattgctttgttttctgtttatgcatagccttgatttgtttgactcccctccccccatttacatgcatgcaatcagacaggccactaaggtaaaagagtctgctctatcatagtgttgagagcgtgtgtagtgctgcatcttatgacaaggggacagacaagctgggacgtcagggaaatgaacaaaagggacgcaggttatttggggtgagtgggtggtgggagcctggagcaaggtggagggtgcagaggggctggggtagggcatgtaggagggaggtgggtgggtcaggtgagtggaaggggtgttgtatattgtgttgatgacgtacgttatttccatggaagatagccgctgtggcagctgtcacatcaccacagctccctagrgtctgccgagaaggcaggcagtctttgggttctgttctttgtcaygtcccctacaagtaaattttgtytctttgaacgtttattaaaatgccaagacccaaccatttcttccacctgcttgattgtgccagtgtttgctcaggcctctttcttagtgttgctttcaaatccttctctttcctgggttgggaaggccaggcagggacagagcaaatgacacttctcttcctcttgccctccctgcctctttggtgctcttaaaagccagcagctgagaacatagcacaggcccacgtggtgagggcacccacagcttaaagacgcttccttctaaacacggcgaggtcacctctcactcttctgtctttgcaaaccgagaagagtggcatgcttctggcatcccaagtcaggattttagctcagatgaggcagaatgaagggcctctcttacaggcagtttgtgtttgattctctcgatcctggcacatccatgataaataggagtttttgaaagttggtttaactgggaaagccaaagtcagtcttgagcagagggagcacattttgtggacctggttccacctttccattccaaaccacctgtttccccttccattagcagaaactctgggggaactttgtgtctcagtcctagaatctccccaagtgagtggaagtgacatgatgcagtcttcctcatggggcacctgaaagaaattagtgtgggtgcttcgatctaccttgtctgtcagagttgaatatctctttccctatcatgctgcttctgaaaattcagttttggagcaagtcctgtgagcaagataagaatctatagaaccaagatgctcattttcagaagaaatatgttcaacctgggatcagacttccatgctctggggaatccaagtggtagcacctgtaaccctgtgtactaagtgctttgaagagaagagcaggcctcagacaccttttaattgcttaggagaaaccattrtctctgactgcaggtttgaataagttgaagaccagagaaaagtacacactgggctacaaaggaatttggagatagccaaggaacaggatttcccctagcaagctaccttctgttcaaatcatgaaaaaagactatttccccttagaatagggaagcttgctattttaaagctcttgtagtgcttttcttttaagggagatgtagtaaaagggaaaatgtagctcttartttacacttcaaagatgtgggggtc

SEQ ID NO: 6226 - DNA, 5301 bp, Homo sapiens
gggcggcgcggcggtgcagcgagaaagacgcggagagagggcgctgctctgtggctctgcaaccttccgccagctcccacgctttccccgcgcgtccccggcgcctcctcgctcctcttgcttccccgcgacccctgcgttcccgtgcgcgcgcgcccgcttgcctgtttcctgtcgccgtcgttgcccgggccatggcgacctgcatttggctgcggagctgtggggcccggcgcctcgggtcgacgtttccaggctgccgcctccgcccccgcgccggcggcctggtccctgcctccgggcctgcgcccggcccggcccagctccgctgctacgctgggcgcctggcgggcctctctgcggcgctgctgcgcaccgacagcttcgtgggcggccgctggctcccggccgccgccaccttccccgtgcaagacccggccagcggcgccgctctgggcatggtagccgactgcggggtgcgagaggcccgcgccgccgtgcgcgctgcctacgaggctttctgccgctggagggaggtctccgccaaggagaggagttcattacttcggaagtggtacaatttaatgatacaaaataaggatgaccttgccagaataatcacagctgaaagtggaaagccactgaaggaggcacatggagaaattctctattccgcctttttcctagagtggttctctgaggaagcccgccgtgtttacggagacattatcyacacccyggcaaaggacaggcgggccctggtcctcaagcagcccataggcgtggctgcagtcatcaccccgtgraatttccccagtgccatgatcacccggaaggtgggggccgccctggcagccggctgtactgtcgtggtgaagcctgccgaagacacgcccttctccgccctggccctggctgagcttgcaagccaggctgggattccttcaggtgtatacaatgttattccctgttctcgaaagaatgccaaggaagtagrggaggcaatttgtactgatcctctggtgtccaaaatttcctttactggttcaacaactacaggaaagatcctgttgcaccacgcagcaaactctgtgaaaagggtctctatggagctgggcggccttgctccatttatagtatttgacagtgccaacgtggaccaggctgtagcaggggccatggcatctaaatttaggaacactggacagacttgtgtttgctcaaaccaattcttggtgcaaaggggcatccatgatgcctttgtaaaagcattcgccgaggccatgaagaagaacctgcgcgtaggtaatggatttgaggaaggaactactcagggcccattaattaatgaaaaagcggtagaaaaggtggagaaacaggtgaatgatgccgtttctaaaggtgccaccgttgtgacagrtggaaaaygacaccaacttggaaaaaatttctttgagcctaccctgctgtgcaatgtcacccaggacatgctgtgcactcatgaagagactttcgggcctctggcaccagttatcaagttcgatacagaggaggaggctatagcaatcgctaacgcagctgaygttgggttagcaggttatttttmctctcaagacccagcccagatctggagagtggcagagcagctggaagwgggcatggttggcgtcaacgaaggattaatttcctctgtggagtgcccttttggtggagtgaagcagtccggccttgggcgagaggggtccaagtatggcattgatgagtatctggaactcaagtatgtgtgttacgggggcttgtaggattctttggttctttaaaaaaatttaaaaggagacttatctacatatataggtacatgccatccattattttaaataaactaataggttttcagaattatgaatttttcagaactcatccagtccttgtaatcttaaacagatgcaaatcctacccctgcccttaatgtaactagggaccaatatgtgccacgtgcctgtggctgcagactcccagagaaccagcactgggtttacagaatgaggccctggmtccccaccacagccccagctgcctcagagcaggcacagcacaaggcaggcccagccccatgggccgtcacaaaggcttgatcactgcctgggcagtggcacaaccatcccccatgtcgctacagaacatgggcccagagcaccttgaaggagacccttgactgtgactggcaggcaggtgaggggcacagcacccctccccggcatctgccagctcagcacagaagacaccgaatgtgcatctggaggtgttgcggcagaggtttgagtgaaccctctttcaaagacaataaatagcacagaattgtccgtgcttctgtgaggcacgaaggagcacctctccctattcctgaaccatattttaattgatgcctttattgtcccaaatttaccacttaaagaattctattttcatttctgtcctgtttgccacttcatttcatttccttgagtaaatgagctgaagtgtaaagcaaagaatagcagaagcagcttggtaggatggaaggcacgcagtggcatggcctggctccttccctgagtggccttgttgccttgggcgtgtgttcagcacctcccatcccatggatacagtggagattccatacaggccttacttagctccttgcgatactgtgagccagagagaaagtaaaagcacttcacaaaaaaatgaaaattctaaggacatacaagagccattgttacgagcagcaccgcccagcccttccttgcctactgtcagtggctttgccaagatgggaggaggccagtgcccacttgcccaccgacctgagcctgagtaagtggctgtcacctgagcctgttctttctgtcctggtgtggtgctgctccctcacctccaaaagagcaaaagtactttcaccacagtcaacccaaaagggaaagaatttctgtaattgccaacccactttgtagaagaggcatgagcccttgaatttcaggcaccttttatctaatgagagtttttacagctcatcattcaaataacgcacaaaaaacaaaagccgctatgaccggcgttgcctctcactttgaaagaaagactccgtaatcttaaacagatgcaaatccaattaggcggccaagtaggtggagacgaagcaccttcctttccccatctctgtctgtgtagactccacttacatcttgtggttattctgggttgtggaaggaaaatgtgaatgaaagtagtgctggatgcaattactcctgaaccccacctaggatttaacatccctcattgagccactgggaagctatggttgagtaactaaaggtctggcaagaccctgggcacacagggagctgcctagcatctggcctggagtgtactagccacattcccaaggtcccaaggagaaggaagagctgaaattcatctcctagtgacagtgccccggccctgtcaagaatcacatactcagcattttgacagttaatgtcttctctttatttgtgtagtttttaggtggttttatataacattttaattacttgtgatttagatgtatccatcctttttctattaagaatacaaatgctgggctgggcacagtggctcacrcctgtaatcccaacaccttgggaggccaaggcaggcagatcacgacatcaggagatcgagaccatcctggctaacacggtgaaaccccgtctctactaaaaatacaaaaaaaattagtcggatgtggtggcaggtgcctgtagtcccagctactctggaggctgaggcaggagaatggcgtgaacccaggaggcggagcttgcagtgagcagagatcaygccactgcactccagcctggatgacagagcgagactccgcctcaaaaaaagaatayaaatgctccaacattattttttataactctggattaccgatgctgagatgtgtgcaggaatacttccaaataaatttttaacattgtaagccagtagattctttggctgggtggcaaattttgagtcttcttgcatatttggctcatgggttcataaattgaggccagagactcattgtatatccttgatcaattttctaattaaaggaaatagcttattgtttagtaaaatggcccttggttgtgggaagaaagagaattatttttaactgaacgtttttgttgttttttaaataaagtagccatatgtaacgggattttaaaaatatatacattttacaacatggactagaaaaggaccattagatcaggggttggcaaactatggcccacgaatcaaacctggcctgccacctgtttttatacaacctgtgagctaagaatggtttatatgttttcaaatgattgggcagaaaatcaaaagaagaacaatatttcatgacacctgaaaattctatgaaattcagatttcagtgtccataaacaaaatgttattagagcatagccacacccattcatttatggtattgtctgggactgctttcttggcagagttgaatagttgggacagggacagtatagcctgcaaarcctaaaagatttactacttgtctccttaaagaaaaagtttgccagctcctgatctagaccaagagggagatattgaccttacttgcatttatccggcattatttcaacacctcctgtgaagaaagtacttttctggcatagctaccgtgagttctcagcaggaacttcccagcgatgataatgtacatgaaattagccacgtaacaagagtctatttgccttgaaaaaacaattatccttgaacttcctccagctatgcagggattctcattaaagagctgatctgcatctgtttatccattttagtagcttttaaatatgattttatgtgaagtgccatttctttattctactaaagagagacagcagaaataaagatcagaagcaaatgtgagcaaatctgttttactgttaacttcaattatgaacttgaaattgtgccacatgactttttcctctaaaaactggatcctagtgttttaattacctgtgtgcagctattttaaatagcattttacttgaataatatgtatgttgtcattgtttcatgctatactttgtgggataaaacttgggaatgagtgtggtaagaaatttataaagttttgcttttaaaacgtggacataactcatttttctagtttttgacaattgtgtgttttagtgtctagtctgcagagagctgtgtgattaataaacgtggaattaacagaatttcctctccctgtattaa

SEQ ID NO: 6227 - DNA, 5248 bp, Homo sapiens
gggcggcgcggcggtgcagcgagaaagacgcggagagagggcgctgctctgtggctctgcaaccttccgccagctcccacgctttccccgcgcgtccccggcgcctcctcgctcctcttgcttccccgcgacccctgcgttcccgtgcgcgcgcgcccgcttgcctgtttcctgtcgccgtcgttgcccgggccatggcgacctgcatttggctgcggagctgtggggcccggcgcctcgggtcgacgtttccaggctgccgcctccgcccccgcgccggcggcctggtccctgcctccgggcctgcgcccggcccggcccagctccgctgctacgctgggcgcctggcgggcctctctgcggcgctgctgcgcaccgacagcttcgtgggcggccgctggctcccggccgccgccaccttccccgtgcaagacccggccagcggcgccgctctgggcatggtagccgactgcggggtgcgagaggcccgcgccgccgtgcgcgctgcctacgaggctttctgccgctggagggaggtctccgccaaggagaggagttcattacttcggaagtggtacaatttaatgatacaaaataaggatgaccttgccagaataatcacagctgaaagtggaaagccactgaaggaggcacatggagaaattctctattccgcctttttcctagagtggttctctgaggaagcccgccgtgtttacggagacattatcyacacccyggcaaaggacaggcgggccctggtcctcaagcagcccataggcgtggctgcagtcatcaccccgtgraatttccccagtgccatgatcacccggaaggtgggggccgccctggcagccggctgtactgtcgtggtgaagcctgccgaagacacgcccttctccgccctggccctggctgagcttgcaagccaggctgggattccttcaggtgtatacaatgttattccctgttctcgaaagaatgccaaggaagtagrggaggcaatttgtactgatcctctggtgtccaaaatttcctttactggttcaacaactacaggaaagatcctgttgcaccacgcagcaaactctgtgaaaagggtctctatggagctgggcggccttgctccatttatagtatttgacagtgccaacgtggaccaggctgtagcaggggccatggcatctaaatttaggaacactggacagacttgtgtttgctcaaaccaattcttggtgcaaaggggcatccatgatgcctttgtaaaagcattcgccgaggccatgaagaagaacctgcgcgtaggtaatggatttgaggaaggaactactcagggcccattaattaatgaaaaagcggtagaaaaggtggagaaacaggtgaatgatgccgtttctaaaggtgccaccgttgtgacagrtggaaaaygacaccaacttggaaaaaatttctttgagcctaccctgctgtgcaatgtcacccaggacatgctgtgcactcatgaagagactttcgggcctctggcaccagttatcaagttcgatacagaggaggaggctatagcaatcgctaacgcagctgaygttgggttagcaggttatttttmctctcaagacccagcccagatctggagagtggcagagcagctggaagwgggcatggttggcgtcaacgaaggattaatttcctctgtggagtgcccttttggtggagtgaagcagtccggccttgggcgagaggggtccaagtatggcattgatgagtatctggaactcaagtatgtgtgttacgggggcttgtaggattctttggttctttaaaaaaatttaaaaggagacttatctacatatataggtacatgccatccattattttaaataaactaataggttttcagaattatgaatttttcagaactcatccagtccttgtaatcttaaacagatgcaaatcctacccctgcccttaatgtaactagggaccaatatgtgccacgtgcctgtggctgcagactcccagagaaccagcactgggtttacagaatgaggccctggmtccccaccacagccccagctgcctcagagcaggcacagcacaaggcaggcccagccccatgggccgtcacaaaggcttgatcactgcctgggcagtggcacaaccatcccccatgtcgctacagaacatgggcccagagcaccttgaaggagacccttgactgtgactggcaggcaggtgaggggcacagcacccctccccggcatctgccagctcagcacagaagacaccgaatgtgcatctggaggtgttgcggcagaggtttgagtgaaccctctttcaaagacaataaatagcacagaattgtccgtgcttctgtgaggcacgaaggagcacctctccctattcctgaaccatattttaattgatgcctttattgtcccaaatttaccacttaaagaattctattttcatttctgtcctgtttgccacttcatttcatttccttgagtaaatgagctgaagtgtaaagcaaagaatagcagaagcagcttggtaggatggaaggcacgcagtggcatggcctggctccttccctgagtggccttgttgccttgggcgtgtgttcagcacctcccatcccatggatacagtggagattccatacaggccttacttagctccttgcgatactgtgagccagagagaaagtaaaagcacttcacaaaaaaatgaaaattctaaggacatacaagagccattgttacgagcagcaccgcccagcccttccttgcctactgtcagtggctttgccaagatgggaggaggccagtgcccacttgcccaccgacctgagcctgagtaagtggctgtcacctgagcctgttctttctgtcctggtgtggtgctgctccctcacctccaaaagagcaaaagtactttcaccacagtcaacccaaaagggaaagaatttctgtaattgccaacccactttgtagaagaggcatgagcccttgaatttcaggcaccttttatctaatgagagtttttacagctcatcattcaaataacgcacaaaaaacaaaagccgctatgaccggcgttgcctctcactttgaaagaaagactccgtaatcttaaacagatgcaaatccaattaggcggccaagtaggtggagacgaagcaccttcctttccccatctctgtctgtgtagactccacttacatcttgtggttattctgggttgtggaaggatttaacatccctcattgagccactgggaagctatggttgagtaactaaaggtctggcaagaccctgggcacacagggagctgcctagcatctggcctggagtgtactagccacattcccaaggtcccaaggagaaggaagagctgaaattcatctcctagtgacagtgccccggccctgtcaagaatcacatactcagcattttgacagttaatgtcttctctttatttgtgtagtttttaggtggttttatataacattttaattacttgtgatttagatgtatccatcctttttctattaagaatacaaatgctgggctgggcacagtggctcacrcctgtaatcccaacaccttgggaggccaaggcaggcagatcacgacatcaggagatcgagaccatcctggctaacacggtgaaaccccgtctctactaaaaatacaaaaaaaattagtcggatgtggtggcaggtgcctgtagtcccagctactctggaggctgaggcaggagaatggcgtgaacccaggaggcggagcttgcagtgagcagagatcaygccactgcactccagcctggatgacagagcgagactccgcctcaaaaaaagaatayaaatgctccaacattattttttataactctggattaccgatgctgagatgtgtgcaggaatacttccaaataaatttttaacattgtaagccagtagattctttggctgggtggcaaattttgagtcttcttgcatatttggctcatgggttcataaattgaggccagagactcattgtatatccttgatcaattttctaattaaaggaaatagcttattgtttagtaaaatggcccttggttgtgggaagaaagagaattatttttaactgaacgtttttgttgttttttaaataaagtagccatatgtaacgggattttaaaaatatatacattttacaacatggactagaaaaggaccattagatcaggggttggcaaactatggcccacgaatcaaacctggcctgccacctgtttttatacaacctgtgagctaagaatggtttatatgttttcaaatgattgggcagaaaatcaaaagaagaacaatatttcatgacacctgaaaattctatgaaattcagatttcagtgtccataaacaaaatgttattagagcatagccacacccattcatttatggtattgtctgggactgctttcttggcagagttgaatagttgggacagggacagtatagcctgcaaarcctaaaagatttactacttgtctccttaaagaaaaagtttgccagctcctgatctagaccaagagggagatattgaccttacttgcatttatccggcattatttcaacacctcctgtgaagaaagtacttttctggcatagctaccgtgagttctcagcaggaacttcccagcgatgataatgtacatgaaattagccacgtaacaagagtctatttgccttgaaaaaacaattatccttgaacttcctccagctatgcagggattctcattaaagagctgatctgcatctgtttatccattttagtagcttttaaatatgattttatgtgaagtgccatttctttattctactaaagagagacagcagaaataaagatcagaagcaaatgtgagcaaatctgttttactgttaacttcaattatgaacttgaaattgtgccacatgactttttcctctaaaaactggatcctagtgttttaattacctgtgtgcagctattttaaatagcattttacttgaataatatgtatgttgtcattgtttcatgctatactttgtgggataaaacttgggaatgagtgtggtaagaaatttataaagttttgcttttaaaacgtggacataactcatttttctagtttttgacaattgtgtgttttagtgtctagtctgcagagagctgtgtgattaataaacgtggaattaacagaatttcctctccctgtattaa

SEQ ID NO: 6228 - DNA, 953 bp, Homo sapiens
atgtccagcaaaggctccatgagagttctggcctatggtggcggcctggacacctcctgcatcctcgtgtgggtgaaggaacaaggctatgatgtcattgcctacctggccaacactggccagaaggaagacttcgaggaagccaggaagaaggcactgaaacttggggccaaaaaggtgttcattgaggatgtcakcagggagtttgtggaagagttcatctggccggccatccagtccagcacactgtatgaggaccgctacctcctgggcacctttctcgccaggccctgcattgccagcaaacaagtggaaatcgcccagcaggagggggtgtcccgcggcgccaccggtaaggggaatatcaggtccggtttgagctcacctggtactcgctggtcccccagataaagggcactgctccctggaggatgcccgagttctacaaccggttcaagggccgtaatgacctgatggaatacgcaaagcagcaygggattcctatcccggtcactcccaagaacccgtggaacatggacgagaacctcatgcacatcagctacgaggctggaatcctggagaaccccaagaaccaagtgcctccagatcgagttaaaaaaggggtccccgtgaaggtgaccaacgtcaacgatggctccacccacccgacctccttggagttcttcatgtacctgaacgaagtcgcggacaaacacggtgtgggctgtactgacatcgtggagaaccgcttcactggaatgaagtcccgaggtatctatgagaccccagcaggcaccatcctttaccacactcatttagacatcraggccttcaccatggactgggaggtgtgcaaaatcaaacaaggcctgggcttgaaatttgctgagctggtgtacaccgctttctggcatagccctgagtgtgaatttgtccgccactgcatcgccaag

SEQ ID NO: 6229 - DNA, 1471 bp, Homo sapiens
atgtccagcaaaggctccatgagagttctggcctatggtggcggcctggacacctcctgcatcctcgtgtgggtgaaggaacaaggctatgatgtcattgcctacctggccaacactggccagaaggaagacttcgaggaagccaggaagaaggcactgaaacttggggccaaaaaggtgttcattgaggatgtcakcagggagtttgtggaagagttcatctggccggccatccagtccagcacactgtatgaggaccgctacctcctgggcacctttctcgccaggccctgcattgccagcaaacaagtggaaatcgcccagcaggagggggtgtcccgcggcgccaccggtaaggggaatatcaggtccggtttgagctcacctggtactcgctggtcccccagataaagggcactgctccctggaggatgcccgagttctacaaccggttcaagggccgtaatgacctgatggaatacgcaaagcagcaygggattcctatcccggtcactcccaagaacccgtggaacatggacgagaacctcatgcacatcagctacgaggctggaatcctggagaaccccaagaaccaagtgcctccaggtctctacacgaagacctaggaaccggtcaaagcccccaacacccctgacatcctcgagatcgagttaaaaaaggggtccccgtgaaggtgaccaacgtcaacgatggctccacccacccgacctccttggagttcttcatgtacctgaacgaagtcgcggacaaacacggtgtgggctgtactgacatcgtggagaaccgcttcactggaatgaagtcccgaggtatctatgagaccccagcaggcaccatcctttaccacactcatttagacatcraggccttcaccatggactgggaggtgtgcaaaatcaaacaaggcctgggcttgaaatttgctgagctggtgtacaccgctttctggcatagccctgagtgtgaatttgtccgccactgcatcgccaagtcctaggggcaagtgggagggaaagcgcaggtgtccgtcctcaagggccgggtgtacatccttggctgggagtccccactctctccctacaacgaggagccggtgagcatgaacgtgtagggtgattatgagccaattgatgccaccgggttcatcaacatcaattccctcaggctgaaggaataggaatatcatcgtctscagagcaaggtcactgccaaatagacccctgtacaatgaggagctggagcctcctcaatttgcagatcccccaagtacaggcgctaattgttgtgataatttgtaattgtgacttgttcttcccggctggcagcgtagtggggctaccaggccccagctttgttccctggtcccctgaagcctgcaaacgtcgtcattaaagggaagggtggggggcagctgtggtgggtagctatwaaatgacaaytaaaagataca

SEQ ID NO: 6230 - DNA, 3310 bp, Homo sapiens
gtgggtctgcacctggattttggagtcccagtgctgctgcagctctgagcattcccacgtcaccagagaagccggtgggcaatgagakcatgtctgctttcaggttgtggcctggcctgctgatcatgttgggttctstctgccatagaggttcaccgtgtggcctttcaacacacrtagaaataggacacagagctctggagtttcttcagcttcacaatgggcgtgttaactacagagagctgttactagaacaccaggatgcgtatcaggctggaatcgtgtttcctgattgtttttaccctagcatctgcaaaggaggaaaattccatgatgtgtctgagagcactcactggactccgtttcttaaygcaagcgttcattatatccgagagaactatccccttccctgggagaaggacacagagaaactggtagctttcttgtttggaattacttctcacatggcggcagatgtcagctggcatagtctgggccttgaacaaggattccttaggaccatgggagctattgattttcacggctcctattcagaggctcattcggctggtgattttggaggagatgtgttgagccagtttgaatttaattttaattaccttgcacgacgctggtatgtgccagtcaaagatctactgggaatttatgagaaactgtatggtcgaaaagtcatcaccgaaaatgtaatcgttgattgttcacatatccagttcttagaaatgtatggtgagatgctagctgtttccaagttatatcccacttactctacaaagtccccgtttttggtggaacaattccaagagtattttcttggaggactggatgatatggcattttggtccactaatatttaccatctaacaagcttcatgttggagaatgggaccagtgactgcaacctgcctgagaaccctctgttcattgcatgtggcggccagcaaaaccacacccagggctcaaaaatgcagaaaaatgattttcacagaaatttgactwcatccctaactgaaagygttgacaggaatataaactatacygaaagaggagtgttctttagtgtaaattcctggaccccggattccatgtcctttatctacaaggctttggaaaggaacrtaaggacaatgttcataggtggctctcagttgtcacaraagcacrtctcyagccccttagcatcttacttcttgtcatttccttatgcgaggcttggctgggcaatgacctcagctgacctcaaccaggatggkcacrgtgacctcgtggtgggcgcaccaggctacagccgcccyggccrcatccacatcgggcgcgtgtacctcatctacggcaatgamctgggyctgccrcctgttgacctggacctggacaaggaggcccacaggatccttgaaggcttccagccctcaggtyggtttggctcggccttggctrtgttggactttaacrtggayggcgtgcctgacctggccgtgggagctccctcggtgggctccgagcagctcacctacaaaggtgccgtgtatgtctactttggttccaaacaaggaggaatgwcttcttcccctaacatcaccatttcttgccaggacatctactgtaacttgggctggactctcttggctgcagatgtgaatggagacagtgaacccgatctggtcatyggctccccttttgcaccaggtggagggaagcagaagggaattgtggctgcgttttattctggccccagcctgagcgacaaagaaaaactgaacgtggaggcagccaactggacggtgagaggcgaggaagacttctcctggtttggatattcccttcacggtgtcactgtggacaacagaaccttgctgttggttgggagcccgacctggaagaatgccagcaggctgggccatttgttacacatccgagatgagaaaaagagccttgggagggtgtatggctacttcccaccaaacggccaaagctggtttaccatttctggagacaaggcaatggggaaactgggtacttccctktccagtggccaygtrctgatgaatggractctgammcargtgctgctggttggagcccctacgtacgatgacgtgwctaaggtggcattcctgaccgtgaccctacaccaaggcggagccactcgcrtgtacgcrctcayatcygacgcrcagccwctgctgctcagcaccttcagyggagaccgccgcttctcycgatttggtggcgttctgcacttgagtgacctggatgatgatggcttagatgaaatcatcatggcagcccccctgaggatagcagatgtaacctctggrctgattgggggagaagayggccgagtwtatgtatataatggcaaagagaccacccttggtgacatgactggcaaatgcaaatcrtggataactccatgtccagaagaaaaggcccaatatgtattgatttctcctgaagccagctcaaggtttgggagctccctcatcaccgtgaggtccaaggcaaagaaccaagtcgtcattgctgctggaaggagytctttgggagcccgactctccggggcacttcacgtctatagccttggctcagattgaagatttcactrcrtttccccactctgcccacctctctcatgctgaatcacatccatggtgagcattttgatggacaaartggcacatccagtggagckgtggyagatcctratagayrtggggctcctgggagtagagasacacacyaacagccacaccctctggaaatctgatayagtawatatatgactgcaccagaaatatgtgaaatagcagacattctgcttactcatgtctccttccacagtttacttcctcgctccctttgcatctaaacctttcttctttcccaacttattgcctgtagtcagacctgctgtacaacctatttcctcttcctcttgaatgtctttccartggctggaaaggtccctctgtggttatctgttagaacagtctctgtacacaattcctcctaaaaacatccttttttaaaaaaagaattgttcagccataaagaaagaacaagatcatgccctttgcagggacatggatggagctggaggccattatccttcataaactattgcaggaacagaaaaccaaacactccatattctcacttgtaagtgggagctaaatgagaacacgtggacacatagagggaaacaacacacactggggcctatgagagggcggaaggtgggaggagggagagatcaggaaaaataactaatggatacttagggtgatgaaat

SEQ ID NO: 6231 - DNA, 954 bp, Homo sapiens
gtgggtctgcacctggattttggagtcccagtgctgctgcagctctgagcattcccacgtcaccagagaagccggtgggcaatgagakcatgtctgctttcaggttgtggcctggcctgctgatcatgttgggttctstctgccatagaggttcaccgtgtggcctttcaacacacrtagaaataggacacagagctctggagtttcttcagcttcacaatgggcgtgttaactacagagagctgttactagaacaccaggatgcgtatcaggctggaatcgtgtttcctgattgtttttaccctagcatctgcaaaggaggaaaattccatgatgtgtctgagagcactcactggactccgtttcttaaygcaagcgttcattatatccgagagaactatccccttccctgggagaaggacacagagaaactggtagctttcttgtttggaattacttctcacatggcggcagatgtcagctggcatagtctgggccttgaacaaggattccttaggaccatgggagctattgattttcacggctcctattcagaggctcattcggctggtgattttggtactgtttatttacatttgctaaattttctcgtggtatagttcacttataatgacatcactactgtgctttaaatatgtgtgtctttaatattttgctggttgcatgtattttctatttaatgttgcagttcatttagagtagagatgtacctcatttaacatagagatgtatttctaaaaacttgtgtctatatgtatttttttgttaaaaaattctacactttgttgttgacatgtcataattttagaaaaactttacttatacattgggttaaaattcattagctagtgtctcctactttcctaatactttagctttaaactagtaaactccaccttttgcctgtagtagtaaattgcttttaaatattta

SEQ ID NO: 6232 - DNA, 3087 bp, Homo sapiens
gtgggtctgcacctggattttggagtcccagtgctgctgcagctctgagcattcccacgtcaccagagaagccggtgggcaatgagakcatgtctgctttcaggttgtggcctggcctgctgatcatgttgggttctstctgccatagaggttcaccgtgtggcctttcaacacacrtagaaataggacacagagctctggagtttcttcagcttcacaatgggcgtgttaactacagagagctgttactagaacaccaggatgcgtatcaggctggaatcgtgtttcctgattgtttttaccctagcatctgcaaaggaggaaaattccatgatgtgtctgagagcactcactggactccgtttcttaaygcaagcgttcattatatccgagagaactatccccttccctgggagaaggacacagagaaactggtagctttcttgtttggaattacttctcacatggcggcagatgtcagctggcatagtctgggccttgaacaaggattccttaggaccatgggagctattgattttcacggctcctattcagaggctcattcggctggtgattttggaggagatgtgttgagccagtttgaatttaattttaattaccttgcacgacgctggtatgtgccagtcaaagatctactgggaatttatgagaaactgtatggtcgaaaagtcatcaccgaaaatgtaatcgttgattgttcacatatccagttcttagaaatgtatggtgagatgctagctgtttccaagttatatcccacttactctacaaagtccccgtttttggtggaacaattccaagagtattttcttggaggactggatgatatggcattttggtccactaatatttaccatctaacaagcttcatgttggagaatgggaccagtgactgcaacctgcctgagaaccctctgttcattgcatgtggcggccagcaaaaccacacccagggctcaaaaatgcagaaaaatgattttcacagaaatttgactwcatccctaactgaaagygttgacaggaatataaactatacygaaagaggagtgttctttagtgtaaattcctggaccccggattccatgtcctttatctacaaggctttggaaaggaacrtaaggacaatgttcataggtggctctcagttgtcacaraagcacrtctcyagccccttagcatcttacttcttgtcatttccttatgcgaggcttggctgggcaatgacctcagctgacctcaaccaggatggkcacrgtgacctcgtggtgggcgcaccaggctacagccgcccyggccrcatccacatcgggcgcgtgtacctcatctacggcaatgamctgggyctgccrcctgttgacctggacctggacaaggaggcccacaggatccttgaaggcttccagccctcaggtyggtttggctcggccttggctrtgttggactttaacrtggayggcgtgcctgacctggccgtgggagctccctcggtgggctccgagcagctcacctacaaaggtgccgtgtatgtctactttggttccaaacaaggaggaatgwcttcttcccctaacatcaccatttcttgccaggacatctactgtaacttgggctggactctcttggctgcagatgtgaatggagacagtgaacccgatctggtcatyggctccccttttgcaccaggtggagggaagcagaagggaattgtggctgcgttttattctggccccagcctgagcgacaaagaaaaactgaacgtggaggcagccaactggacggtgagaggcgaggaagacttctcctggtttggatattcccttcacggtgtcactgtggacaacagaaccttgctgttggttgggagcccgacctggaagaatgccagcaggctgggccatttgttacacatccgagatgagaaaaagagccttgggagggtgtatggctacttcccaccaaacggccaaagctggtttaccatttctggagacaaggcaatggggaaactgggtacttccctktccagtggccaygtrctgatgaatggractctgammcargtgctgctggttggagcccctacgtacgatgacgtgwctaaggtggcattcctgaccgtgaccctacaccaaggcggagccactcgcrtgtacgcrctcayatcygacgcrcagccwctgctgctcagcaccttcagyggagaccgccgcttctcycgatttggtggcgttctgcacttgagtgacctggatgatgatggcttagatgaaatcatcatggcagcccccctgaggatagcagatgtaacctctggrctgattgggggagaagayggccgagtwtatgtatataatggcaaagagaccacccttggtgacatgactggcaaatgcaaatcrtggataactccatgtccagaagaaaaggcccaatatgtattgatttctcctgaagccagctcaaggtttgggagctccctcatcaccgtgaggtccaaggcaaagaaccaagtcgtcattgctgctggaaggagytctttgggagcccgactctccggggcacttcacgtctatagccttggctcagattgaagatttcactrcrtttccccactctgcccacctctctcatgctgaatcacatccatgcttccctctaatggcttcccatgaccacacacaggagtggggaaaccttacttgtacttcatcggttttcttccaaatcagcgacrggagtaacatttttattcctatcaccaaaccacctgaaaaatggactcctaaacttcctcatatgacatcacattaggctaatcatgtaccctcaatatcatcagggtaagtgtatttattctgttattattacatttgtagtgcaagagctggacactctagaatcttccatgcacactactttgggaggcttaacwaatgttctagtgcctaactgtacttaacctccagaaaatattttaaaaggtaggtaggatgttaaagaggatggcagctttcaggcttacaaatattagccatttgttttaaacccaaatctctgtggaaatga

SEQ ID NO: 6233 - DNA, 3164 bp, Homo sapiens
gagccagcggccgcccacgaagctgtcggtgcgcagcagcgccgcagagaggcccgccaggcgcccagcgtagcagcggagctgggccgggccgggcgcaggcccggaggcagggaccaggccgccggcgcgggggcggaggcggcagcctggaaacgtcgacccgaggcgccgggccccacagctccgcagccaaatgcaggtcgccatggcccgggcaacgacggcgacaggaaacaggttgtggcctggcctgctgatcatgttgggttctstctgccatagaggttcaccgtgtggcctttcaacacacrtagaaataggacacagagctctggagtttcttcagcttcacaatgggcgtgttaactacagagagctgttactagaacaccaggatgcgtatcaggctggaatcgtgtttcctgattgtttttaccctagcatctgcaaaggaggaaaattccatgatgtgtctgagagcactcactggactccgtttcttaaygcaagcgttcattatatccgagagaactatccccttccctgggagaaggacacagagaaactggtagctttcttgtttggaattacttctcacatggcggcagatgtcagctggcatagtctgggccttgaacaaggattccttaggaccatgggagctattgattttcacggctcctattcagaggctcattcggctggtgattttggaggagatgtgttgagccagtttgaatttaattttaattaccttgcacgacgctggtatgtgccagtcaaagatctactgggaatttatgagaaactgtatggtcgaaaagtcatcaccgaaaatgtaatcgttgattgttcacatatccagttcttagaaatgtatggtgagatgctagctgtttccaagttatatcccacttactctacaaagtccccgtttttggtggaacaattccaagagtattttcttggaggactggatgatatggcattttggtccactaatatttaccatctaacaagcttcatgttggagaatgggaccagtgactgcaacctgcctgagaaccctctgttcattgcatgtggcggccagcaaaaccacacccagggctcaaaaatgcagaaaaatgattttcacagaaatttgactwcatccctaactgaaagygttgacaggaatataaactatacygaaagaggagtgttctttagtgtaaattcctggaccccggattccatgtcctttatctacaaggctttggaaaggaacrtaaggacaatgttcataggtggctctcagttgtcacaraagcacrtctcyagccccttagcatcttacttcttgtcatttccttatgcgaggcttggctgggcaatgacctcagctgacctcaaccaggatggkcacrgtgacctcgtggtgggcgcaccaggctacagccgcccyggccrcatccacatcgggcgcgtgtacctcatctacggcaatgamctgggyctgccrcctgttgacctggacctggacaaggaggcccacaggatccttgaaggcttccagccctcaggtyggtttggctcggccttggctrtgttggactttaacrtggayggcgtgcctgacctggccgtgggagctccctcggtgggctccgagcagctcacctacaaaggtgccgtgtatgtctactttggttccaaacaaggaggaatgwcttcttcccctaacatcaccatttcttgccaggacatctactgtaacttgggctggactctcttggctgcagatgtgaatggagacagtgaacccgatctggtcatyggctccccttttgcaccaggtggagggaagcagaagggaattgtggctgcgttttattctggccccagcctgagcgacaaagaaaaactgaacgtggaggcagccaactggacggtgagaggcgaggaagacttctcctggtttggatattcccttcacggtgtcactgtggacaacagaaccttgctgttggttgggagcccgacctggaagaatgccagcaggctgggccatttgttacacatccgagatgagaaaaagagccttgggagggtgtatggctacttcccaccaaacggccaaagctggtttaccatttctggagacaaggcaatggggaaactgggtacttccctktccagtggccaygtrctgatgaatggractctgammcargtgctgctggttggagcccctacgtacgatgacgtgwctaaggtggcattcctgaccgtgaccctacaccaaggcggagccactcgcrtgtacgcrctcayatcygacgcrcagccwctgctgctcagcaccttcagyggagaccgccgcttctcycgatttggtggcgttctgcacttgagtgacctggatgatgatggcttagatgaaatcatcatggcagcccccctgaggatagcagatgtaacctctggrctgattgggggagaagayggccgagtwtatgtatataatggcaaagagaccacccttggtgacatgactggcaaatgcaaatcrtggataactccatgtccagaagaaaaggcccaatatgtattgatttctcctgaagccagctcaaggtttgggagctccctcatcaccgtgaggtccaaggcaaagaaccaagtcgtcattgctgctggaaggagytctttgggagcccgactctccggggcacttcacgtctatagccttggctcagacttccctctaatggcttcccatgaccacacacaggagtggggaaaccttacttgtacttcatcggttttcttccaaatcagcgacrggagtaacatttttattcctatcaccaaaccacctgaaaaatggactcctaaacttcctcatatgacatcacattaggctaatcatgtaccctcaatatcatcagggtaagtgtatttattctgttattattacatttgtagtgcaagagctggacactctagaatcttccatgcacactactttgggaggcttaacwaatgttctagtgcctaactgtacttaacctccagaaaatattttaaaaggtaggtaggatgttaaagaggatggcagctttcaggcttacaaatattagccatttgttttaaacccaaatctctgtggaaatgag

SEQ ID NO: 6234 - DNA, 3593 bp, Homo sapiens
cttggcgggagatcctcccgcggccggagggccctgaaccctaggccaagactcatccacaacctagggggaggcrgccaccagcgccccatcgaagctaaagggctgacagaagggctgtagcggcaagtgtgcgccaacacagctgcacacgcccagacacctgaggcgctgagaggaacttccccgcgatccgccccggctgcrcagagcctcttctccccgccggggccccgcccagcctcacttcttttaaaagcagcagccagcagcgcgccggtggcgtgcggctcgaaaggccgggaggacgtcatcgacgcgctgtcgagcctccagcccgcccgggtttccttcgcagtcgcgcaccgacgctcaaacgcgcgctccaacccgcagcctcctcctgcctcaccgcccgaagatggcggctctcaaactcctctcctccgggcttcggctctgcgcctctgcccgcggatctggggcaacctggtacaagggatgtgtttgttccttttccaccagtgctcatcgccataccaagttttatacagatccagtagaagctgtaaaagacatccctgatggtgccacggttttggttggtggttttgggctatgtggaattccagagaatcttatagatgctttactgaaaactggagtaaaaggactaactgcagtcagcaacaatgcaggggttgacaattttggtttggggcttttgcttcggtccaagcagataaaacgcatggtctcttcatatgtgggagaaaatgcagaatttgaacgacagtacttatctggtgaattagaagwggagctgacaccacagggcacacttgcagagaggatccgtgcaggcggggctggagttcctgcattttacaccccaacaggktatgggaccctggtacaagaaggaggatcgcccatcaaatacaacaaagatggcagtgttgccattgccagtaagccaagagaggtgagggagttcaatggtcagcactttattttggaggaagcaattacaggggattttgctttggtgaaagcctggaaggcggaccgagcaggaaacgtgattttcaggaaaagtgcaaggaatttcaacttrccaatgtgcaaagctgcagaaaccacagtggtagaggttgaagaaattgtggatattggagcatttgctccagaagacatccatattcctcagatttatgtacatcgccttataaagggagaaaaatatgagaaaagaattgagcgtttatsaatccggaaagagggagatggggaagccaaatctgctaaacctggagatgacgtaagggaacgaatcatcaagagggccgctcttgagtttgaggatggcatgtatgctaatttgggcataggaatccctctcctggccagcaattttatcagcccaaatataactgttcatcttcaaagtgaaaatggagttctgggtttgggtccatatccacgacaacatgaagctgaygcagatctcatcaatgcaggcaaggaaacagttactattcttccaggagcctcttttttctccagcgatgaatcatttgcaatgattagaggtggacacgtcgatctgacaatgctaggagcgatgcaggtttccaaatatggtgacctggctaactggatgatacctgggaagatggtgaaaggaatgggaggtgctatggatttagtgtccagtgcgaaaaccaaagtggtggtcaccatggagcattctgcaaagggaaatgcacataaaatcatggagaaatgtacattaccattgactggaaagcaatgtgtcaaccgcattattactgaaaaggctgtgtttgatgtggacaagaagaaagggttgactctgattgagctctgggaaggcctgacagtggatgacgtacagaagagtactgggtgtgattttgcagtttcaccaaaactcatgccaatgcagcagatcgcaaattgaaatatggatatttgtaccaggctgcgtgtttttcattttaaacacacaagatttaattgaaaggacatcaataatcataattgtgtatttaacaggtggttttttattagttttcttgtgtttcagactttatgcagccatataaactgttctctaggcatgctgtgacattttaataaaaagcaaaaggtaattatattgaatgcattttcactgaatatggtatgtatgctaaattatatgaacctttccccaagaagggccctagaaattgatgtggctttcctcttaaatattaattattagtcctgaaagaaagataacatatgtgatttttgtggttaggagagttgctgtcatgattgttttttcttcagcctcctctgacttttcttttggggcttcagattttatgattacatcttgtccccctagaacatcccccttcctcccatactgcttttaaacagatgcccaagaaggcaagcaggaatgcctcttgtgggggagggcagggagaaataactagttcaaaccaactatctatctatgctttgcaaagactaaggcgtattataggaagagggctagaaacctaactgattcttctcagttttctcattttaaaacagcccagtattcctttgtatcctcaagggtccttgagaatacttctgttattgagaccctgtgggctacttgtactgtacctcctctcaagccaagaagggctgtgggataatttaccatgaatccttagtagcaatgacagcagagttaaaaaataaaaggtgttttactttcaggctcttgttttggttcagaggagattttaaatattgaatgacacttctacagaacaacggtttttcttctgccaaggctacttcctttaacgaagtgcctttaattcagccttatccaactagggaaaataatgttggacaagtctaggatttgaagagtcagtgaacttttagtgtcagggaataaacatggtgggtagattaggtttgaaaaaaacttccttagaggtatttattctcaatacctgacaggggcccatgggaatgacttcagaagcatcccggataatagatgggtaaaaagtctaggcaccctgaagaacaggtgagacagctggcctctggacagaggtaggcatagtacagtacgatatatcattcctctggtcctaaatatacaaacttattcatgtttttaggtgatgatggtcattgaaactcacttcttttcaggtgtagctacaattgtgtaatgtacaatattagagaaaggacaggctttttatgagtaacacacaccatatataaaacagcctttctggctgaccacatggttaaatgcataccttcccagtactgggggkaaaaaatgacccttcttagaatgtgcaagttccatgagagtaatatattgatatgattttgaaaagaattgttgatagttacatcttcaaacttatcattccagtatgcatctttaagataatgtgattctaagtagatgactttatattcttgattraagagtgctatacatgttaagaaatgcattaaggaatacaataaatattctaaagtgatgt

SEQ ID NO: 6235 - DNA, 3647 bp, Homo sapiens
cttggcgggagatcctcccgcggccggagggccctgaaccctaggccaagactcatccacaacctagggggaggcrgccaccagcgccccatcgaagctaaagggctgacagaagggctgtagcggcaagtgtgcgccaacacagctgcacacgcccagacacctgaggcgctgagaggaacttccccgcgatccgccccggctgcrcagagcctcttctccccgccggggccccgcccagcctcacttcttttaaaagcagcagccagcagcgcgccggtggcgtgcggctcgaaaggccgggaggacgtcatcgacgcgctgtcgagcctccagcccgcccgggtttccttcgcagtcgcgcaccgacgctcaaacgcgcgctccaacccgcagcctcctcctgcctcaccgcccgaagatggcggctctcaaactcctctcctccgggcttcggctctgcgcctctgcccgcggatctggggcaacctggtacaagggatgtgtttgttccttttccaccagtgctcatcgccataccaagttttatacagatccagtagaagctgtaaaagacatccctgatggtgccacggttttggttggtggttttgggctatgtggaattccagagaatcttatagatgctttactgaaaactggagtaaaaggactaactgcagtcagcaacaatgcaggggttgacaattttggtttggggcttttgcttcggtccaagcagataaaacgcatggtctcttcatatgtgggagaaaatgcagaatttgaacgacagtacttatctggtgaattagaagwggagctgacaccacagggcacacttgcagagaggatccgtgcaggcggggctggagttcctgcattttacaccccaacaggktatgggaccctggtacaagaaggaggatcgcccatcaaatacaacaaagatggcagtgttgccattgccagtaagccaagagaggtgagggagttcaatggtcagcactttattttggaggaagcaattacaggggattttgctttggtgaaagcctggaaggcggaccgagcaggaaacgtgattttcaggaaaagtgcaaggaatttcaacttrccaatgtgcaaagctgcagaaaccacagtggtagaggttgaagaaattgtggatattggagcatttgctccagaagacatccatattcctcagatttatgtacatcgccttataaagggagaaaaatatgagaaaagaattgagcgtttatsaatccggaaagagggagatggggaagccaaatctgctaaacctggagatgacgtaagggaacgaatcatcaagagggccgctcttgagtttgaggatggcatgtatgctaatttgggcataggaatccctctcctggccagcaattttatcagcccaaatataactgttcatcttcaaagtgaaaatggagttctgggtttgggtccatatccacgacaacatgaagctgaygcagatctcatcaatgcaggcaaggaaacagttactattcttccaggagcctcttttttctccagcgatgaatcatttgcaatgattagaggtggacacgtcgatctgacaatgctaggagcgatgcaggtttccaaatatggtgacctggctaactggatgatacctgggaagatggtgaaaggaatgggaggtgctatggatttagtgtccagtgcgaaaaccaaagtggtggtcaccatggagcattctgcaaagggaaatgcacataaaatcatggagaaatgtacattaccattgactggaaagcaatgtgtcaaccgcattattactgaaaaggctgtgtttgatgtggacaagaagaaagggttgactctgattgagctctgggaaggcctgacagtggatgacgtacagaagagtactgggtgtgattttgcagtttcaccaaaactcatgccaatgcagcagatcgcaaattgaaatatggatatttgtaccaggctgcgtgtttttcattttaaacacacaagatttaattgaaaggacatcaataatcataattgtgtatttaacaggtggttttttattagttttcttgtgtttcagactttatgcagccatataaactgttctctaggcatgctgtgacattttaataaaaagcaaaaggagcatttataattatctcatttgttaaggctgagaaggttgtttttataataggtaattatattgaatgcattttcactgaatatggtatgtatgctaaattatatgaacctttccccaagaagggccctagaaattgatgtggctttcctcttaaatattaattattagtcctgaaagaaagataacatatgtgatttttgtggttaggagagttgctgtcatgattgttttttcttcagcctcctctgacttttcttttggggcttcagattttatgattacatcttgtccccctagaacatcccccttcctcccatactgcttttaaacagatgcccaagaaggcaagcaggaatgcctcttgtgggggagggcagggagaaataactagttcaaaccaactatctatctatgctttgcaaagactaaggcgtattataggaagagggctagaaacctaactgattcttctcagttttctcattttaaaacagcccagtattcctttgtatcctcaagggtccttgagaatacttctgttattgagaccctgtgggctacttgtactgtacctcctctcaagccaagaagggctgtgggataatttaccatgaatccttagtagcaatgacagcagagttaaaaaataaaaggtgttttactttcaggctcttgttttggttcagaggagattttaaatattgaatgacacttctacagaacaacggtttttcttctgccaaggctacttcctttaacgaagtgcctttaattcagccttatccaactagggaaaataatgttggacaagtctaggatttgaagagtcagtgaacttttagtgtcagggaataaacatggtgggtagattaggtttgaaaaaaacttccttagaggtatttattctcaatacctgacaggggcccatgggaatgacttcagaagcatcccggataatagatgggtaaaaagtctaggcaccctgaagaacaggtgagacagctggcctctggacagaggtaggcatagtacagtacgatatatcattcctctggtcctaaatatacaaacttattcatgtttttaggtgatgatggtcattgaaactcacttcttttcaggtgtagctacaattgtgtaatgtacaatattagagaaaggacaggctttttatgagtaacacacaccatatataaaacagcctttctggctgaccacatggttaaatgcataccttcccagtactgggggkaaaaaatgacccttcttagaatgtgcaagttccatgagagtaatatattgatatgattttgaaaagaattgttgatagttacatcttcaaacttatcattccagtatgcatctttaagataatgtgattctaagtagatgactttatattcttgattraagagtgctatacatgttaagaaatgcattaaggaatacaataaatattctaaagtgatgt

SEQ ID NO: 6236 - DNA, 2603 bp, Homo sapiens
tgccagcatctgcctccactgctctgtgctgggatcatggaacttgcactgctgtgtgggctggtggtgatggctggtgtgattccaatccagggcgggatcctgaacctgaacaagatggtcaagcaagtgactgggaaaatgcccatcctctcctactggccctacggctgtcactgcggactaggtggcagaggccaacccaaagatgccacggactggtgctgccagacccatgactgctgctatgaccacctgaagacccaggggtgcrgcatctacaaggactattacagatacaacttttcccaggggaacatccactgctctgacaagggaagctggtgtgagcagcagctgtgtgcctgtgacaaggaggtggccttctgcctgaagcgcaacctggacacctaccagaagcgactgcgtttctactggcggccccactgccgggggcagacccctgggtgctagaagcccacacyctctaccctgttcctcagcatggagctctggcatccccacctcagtatctaacctgaaccagcctggcttttcaaacactccggggggaggtagtcccagcctcccccggaaccctctaccaatgccttctgacyttctgaagctttccraatcctcccagttgaggcagtagctgtgtcctctgagggtggatgggaatcttgggagaagcccaagcaagggagccctcagaggtggtgtttggaccaaagcatcggggtgggggaggggtctgccgctgtcccccacctgctggcccccttgtccttcctcaccccctccaatatagtctcggagctacaaccgcagcagccactataaagggcaatattgatctttctgtccatgtggctctatcttttaaaacctcaaggccctccactgtcctaagataaagcctctcataggcactggggaccctgcacagtctggccatgtgaccctctccccaggcaagctctgaagtccctgcaggtggaggccatgcctgtcttaaactcagttgcatccctggtgcccaaagcaacaccagaaccaagaaggagctccataaatccttcttgggtgaagcctagacaaagccgccaggtcttgtggctccaggcaccagagccttgagtactttctcctgcctccaggcattggctcagggtgaattacaaggggctactgaatggctattactttcatcacgactgatccccacctcctcagggtcaaagggctactttctggaagtctccccaggctgactccttctccctgactgcaagggctcactccctcctccaagctcccacaatgcttcatggctctgccgcttacctagcttggcctagagtggcaaatggaacttctctgatctcccccaactagactggagcccccgaaggatggagaccatgtctgtgccatctctgtttcccctgttttcccacatactaggtgctcaattcatgcctgtgaatggcgtgagcccataatggatacacagaggttgcagcagatggtgtgggtacctcacccagatatcwtccaggcccaaggcccctctccctgagtgaggccaggtgttggcagccaactgctccaatctgcctccttcccctaaatactgccctggtctagtgggagctgccttccccctgccccacctctcccaccaagaggccacctgtcactcatggccaggagagtgacaccatggagggtacaattgccagctcccccgtgtctgtgcagsattgtctgggttgaatgacactctcaaattgttcctgggatcgggctgaggccaggcctctcctggaaccacctctctgcttggtctgaccccttggcctatccagttttcctggttccctcacaggtttctccagaaagtactccctcastaaagcatttgcacaagaatccttgtctcaggctctgcttctaaggaaagagactgaagagggacaactttttcctatgaggactcccaatctgccatttgtgtgtggctagctgtttccagccagggggctgaggcacctgcagtcacccacactctgggcctgtggcaccatctgtgcctcagctgactgagcagttctgagatgtggtgactcatgtgaagtggtgtcataggaatgaaggactgtgggcgctgggttcaaattccagttctatgcaccactccaggtagggatacccatgggggcagctgtgcctgtgtgggggaacagggtagggaaatctccataccttctcaattttgctgtgaacctaaaactgccatataaagataaagtctaggccaggcatggtggctcatgcctgtaatcccaacacttagggtggctgaggcaggcaratcacctggggtcaggagttcaagaccagcctgcccaacatggcaaaacctcgtctctactaaaaatacaaaaattagccaggcatcgtggtgggtgcctgtaatcccagctattcaggaggctgaggcaggagaatcacttggacctgggaggcagaggtttcagtgagcccagatcgcgacactgcactccagcctgggcaacagagtgacactctgtctc

SEQ ID NO: 6237 - DNA, 1593 bp, Homo sapiens
atgtgtcctgcaggctggaagctcctggccatgttggctctggtcctggtcgtcatggtgtggtattccatctcccgggaagacaggtacatcgagcttttttattttcccatcccagagaagaaggagccgtgcctccagggtgaggcagagagcaaggcctctaagctctttggcaactactcccgggatcagcccatcttcctgcggcttgaggattatttctgggtcaagacgccatctgcttaygagctgccctatgggaccaaggggagtgaggatctgctcctccgggtgctagccatcaccagctcctccatccccaagaacatccagagcctcaggtgccgccgctgtgtggtcgtggggaacgggcaccggctgcggaacagctcactgggagatgccatcaacaagtaygatgtggtcatcagaytgaacaatgccccagtggctggctatgagggtgacgtgggctccaagaccaccatgcgtctcttctaccctgaatctgcccacttcgaccccaaagtagaaaacaacccagacacactcctcgtcctggtagctttcaaggcaatggacttccactggattgagaccatcctgagtgataagaagcgggtgcgaaagggtttctggaaacagcctcccctcatctgggatgtcaatcctaaacagattcggattctcaaccccttcttcatggagattgcagctgacaaactgctgagcctgccaatgcaacagccacggaagattaagcagaagcccaccacgggcctgttggccatcacgctggccctccacctctgtgacttggtgcacattgccggctttggctacccagacgcctacaacaagaagcagaccattcactactatgagcagatcacgctcaagtccatggcggggtcaggccataatgtctcccaagaggccctggccattaagcggatgctggagatgggagctatcaagaacctcacgtccttctgacctgggcaagagctgtagcctgtcggttgcctactctgctgtctgggtgacccccatgcgtggctgtgggggtggctggtgccagtatgacccacttggactcaccccctcttggggagggagttctgggcctggccaggtctgagatgaggccatgcccctggctgctcttatggagccgagatccagtcagggtgggggcgctggagccgtgggagcccggccagggcagggggctcgttgctgtggcaccccctctctgccagcaccaagagattatttaatgggctatttaattaaggggtaggaaggtgctgtgggctggtcccacacatccaggaaagaggccagtagagaattctgcccmctttttataaaaacttacagcgatggccccaccaaggcctagacacggcactggcctcccaggagggcaggggcattgggaatgggtgggtgccctccaragaggggctgctacctcccagcaggcatgggaagagcactggtgtgggggttccaccgagaaggggacctcatctagaaaagaggttacaaacctaccattaaactatttttcctaaaacggaagca

SEQ ID NO: 6238 - DNA, 1812 bp, Homo sapiens
ccttccccgcccccaacccgggcccgggtccccgcctcccctgcaggcggactcgcccgctcccaggccggacccgcgcccgggacagggacccggccgagtcgagccgtcgcgccagcgctgcgccgccggtcggtgcgcctagcggatcggagctgcgcgcggaaccgtgctgccccgccccgctccacccgtgagggtggcccgaggcagccgggatgacagctctccccaggaatcctgctgcctgctgagaaacatggtcagcaagtcccgctggaagctcctggccatgttggctctggtcctggtcgtcatggtgtggtattccatctcccgggaagacaggtacatcgagcttttttattttcccatcccagagaagaaggagccgtgcctccagggtgaggcagagagcaaggcctctaagctctttggcaagctttcacctctgtgcagctactcccgggatcagcccatcttcctgcggcttgaggattatttctgggtcaagacgccatctgcttaygagctgccctatgggaccaaggggagtgcctcaggtgccgccgctgtgtggtcgtggggaacgggcaccggctgcggaacagctcactgggagatgccatcaacaagtaygatgtggtcatcagaytgaacaatgccccagtggctggctatgagggtgacgtgggctccaagaccaccatgcgtctcttctaccctgaatctgcccacttcgaccccaaagtagaaaacaacccagacacactcctcgtcctggtagctttcaaggcaatggacttccactggattgagaccatcctgagtgataagaagcgggtgcgaaagggtttctggaaacagcctcccctcatctgggatgtcaatcctaaacagattcggattctcaaccccttcttcatggagattgcagctgacaaactgctgagcctgccaatgcaacagccacggaagattaagcagaagcccaccacgggcctgttggccatcacgctggccctccacctctgtgacttggtgcacattgccggctttggctacccagacgcctacaacaagaagcagaccattcactactatgagcagatcacgctcaagtccatggcggggtcaggccataatgtctcccaagaggccctggccattaagcggatgctggagatgggagctatcaagaacctcacgtccttctgacctgggcaagagctgtagcctgtcggttgcctactctgctgtctgggtgacccccatgcgtggctgtgggggtggctggtgccagtatgacccacttggactcaccccctcttggggagggagttctgggcctggccaggtctgagatgaggccatgcccctggctgctcttatggagccgagatccagtcagggtgggggcgctggagccgtgggagcccggccagggcagggggctcgttgctgtggcaccccctctctgccagcaccaagagattatttaatgggctatttaattaaggggtaggaaggtgctgtgggctggtcccacacatccaggaaagaggccagtagagaattctgcccmctttttataaaaacttacagcgatggccccaccaaggcctagacacggcactggcctcccaggagggcaggggcattgggaatgggtgggtgccctccaragaggggctgctacctcccagcaggcatgggaagagcactggtgtgggggttccaccgagaaggggacctcatctagaaaagaggttacaaacctaccattaaactatttttcctaaaacggaagca

SEQ ID NO: 6239 - DNA, 1890 bp, Homo sapiens
cgcctcccctgcaggcggactcgcccgctcccaggccggacccgcgcccgggacagggacccggccgagtcgagccgtcgcgccagcgctgcgccgccggtcggtgcgcctagcggatcggagctgcgcgcggaaccgtgctgccccgccccgctccacccgtgaggagctctttgacccagaggaatctgcaggaatggagggagttggccaaagtagggagatttttactcagaccatatccaggtggcccgaggcagccgggatgacagctctccccaggaatcctgctgcctgctgagaaacatggtcagcaagtcccgctggaagctcctggccatgttggctctggtcctggtcgtcatggtgtggtattccatctcccgggaagacagtttttattttcccatcccagagaagaaggagccgtgcctccagggtgaggcagagagcaaggcctctaagctctttggcaactactcccgggatcagcccatcttcctgcggcttgaggattatttctgggtcaagacgccatctgcttaygagctgccctatgggaccaaggggagtgaggatctgctcctccgggtgctagccatcaccagctcctccatccccaagaacatccagagcctcaggtgccgccgctgtgtggtcgtggggaacgggcaccggctgcggaacagctcactgggagatgccatcaacaagtaygatgtggtcatcagaytgaacaatgccccagtggctggctatgagggtgacgtgggctccaagaccaccatgcgtctcttctaccctgaatctgcccacttcgaccccaaagtagaaaacaacccagacacactcctcgtcctggtagctttcaaggcaatggacttccactggattgagaccatcctgagtgataagaagcgggtgcgaaagggtttctggaaacagcctcccctcatctgggatgtcaatcctaaacagattcggattctcaaccccttcttcatggagattgcagctgacaaactgctgagcctgccaatgcaacagccacggaagattaagcagaagcccaccacgggcctgttggccatcacgctggccctccacctctgtgacttggtgcacattgccggctttggctacccagacgcctacaacaagaagcagaccattcactactatgagcagatcacgctcaagtccatggcggggtcaggccataatgtctcccaagaggccctggccattaagcggatgctggagatgggagctatcaagaacctcacgtccttctgacctgggcaagagctgtagcctgtcggttgcctactctgctgtctgggtgacccccatgcgtggctgtgggggtggctggtgccagtatgacccacttggactcaccccctcttggggagggagttctgggcctggccaggtctgagatgaggccatgcccctggctgctcttatggagccgagatccagtcagggtgggggcgctggagccgtgggagcccggccagggcagggggctcgttgctgtggcaccccctctctgccagcaccaagagattatttaatgggctatttaattaaggggtaggaaggtgctgtgggctggtcccacacatccaggaaagaggccagtagagaattctgcccmctttttataaaaacttacagcgatggccccaccaaggcctagacacggcactggcctcccaggagggcaggggcattgggaatgggtgggtgccctccaragaggggctgctacctcccagcaggcatgggaagagcactggtgtgggggttccaccgagaaggggacctcatctagaaaagaggttacaaacctaccattaaactatttttcctaaaacggaagca

SEQ ID NO: 6240 - DNA, 1914 bp, Homo sapiens
cgggtccccgcctcccctgcaggcggactcgcccgctcccaggccggacccgcgcccgggacagggacccggccgagtcgagccgtcgcgccagcgctgcgccgccggtcggtgcgcctagcggatcggagctgcgcgcggaaccgtgctgccccgccccgctccacccgtgagggtccagcacttgggagctgactgtgctggaggtgacaggctttgcggggtccgcctgtgtgcaggagtcgcaaggtcgctgagcaggacccaaaggtggcccgaggcagccgggatgacagctctccccaggaatcctgctgcctgctgagaaacatggtcagcaagtcccgctggaagctcctggccatgttggctctggtcctggtcgtcatggtgtggtattccatctcccgggaagacagtttttattttcccatcccagagaagaaggagccgtgcctccagggtgaggcagagagcaaggcctctaagctctttggcaactactcccgggatcagcccatcttcctgcggcttgaggattatttctgggtcaagacgccatctgcttaygagctgccctatgggaccaaggggagtgaggatctgctcctccgggtgctagccatcaccagctcctccatccccaagaacatccagagcctcaggtgccgccgctgtgtggtcgtggggaacgggcaccggctgcggaacagctcactgggagatgccatcaacaagtaygatgtggtcatcagaytgaacaatgccccagtggctggctatgagggtgacgtgggctccaagaccaccatgcgtctcttctaccctgaatctgcccacttcgaccccaaagtagaaaacaacccagacacactcctcgtcctggtagctttcaaggcaatggacttccactggattgagaccatcctgagtgataagaagcgggtgcgaaagggtttctggaaacagcctcccctcatctgggatgtcaatcctaaacagattcggattctcaaccccttcttcatggagattgcagctgacaaactgctgagcctgccaatgcaacagccacggaagattaagcagaagcccaccacgggcctgttggccatcacgctggccctccacctctgtgacttggtgcacattgccggctttggctacccagacgcctacaacaagaagcagaccattcactactatgagcagatcacgctcaagtccatggcggggtcaggccataatgtctcccaagaggccctggccattaagcggatgctggagatgggagctatcaagaacctcacgtccttctgacctgggcaagagctgtagcctgtcggttgcctactctgctgtctgggtgacccccatgcgtggctgtgggggtggctggtgccagtatgacccacttggactcaccccctcttggggagggagttctgggcctggccaggtctgagatgaggccatgcccctggctgctcttatggagccgagatccagtcagggtgggggcgctggagccgtgggagcccggccagggcagggggctcgttgctgtggcaccccctctctgccagcaccaagagattatttaatgggctatttaattaaggggtaggaaggtgctgtgggctggtcccacacatccaggaaagaggccagtagagaattctgcccmctttttataaaaacttacagcgatggccccaccaaggcctagacacggcactggcctcccaggagggcaggggcattgggaatgggtgggtgccctccaragaggggctgctacctcccagcaggcatgggaagagcactggtgtgggggttccaccgagaaggggacctcatctagaaaagaggttacaaacctaccattaaactatttttcctaaaacggaagca

SEQ ID NO: 6241 - DNA, 1739 bp, Homo sapiens
gtccagcacttgggagctgactgtgctggaggtgacaggctttgcggggtccgcctgtgtgcaggagtcgcaaggtcgctgagcaggacccaaaggtggcccgaggcagccgggatgacagctctccccaggaatcctgctgcctgctgagaaacatggtcagcaagtcccgctggaagctcctggccatgttggctctggtcctggtcgtcatggtgtggtattccatctcccgggaagacagtttttattttcccatcccagagaagaaggagccgtgcctccagggtgaggcagagagcaaggcctctaagctctttggcaactactcccgggatcagcccatcttcctgcggcttgaggattatttctgggtcaagacgccatctgcttaygagctgccctatgggaccaaggggagtgaggatctgctcctccgggtgctagccatcaccagctcctccatccccaagaacatccagagcctcaggtgccgccgctgtgtggtcgtggggaacgggcaccggctgcggaacagctcactgggagatgccatcaacaagtaygatgtggtcatcagaytgaacaatgccccagtggctggctatgagggtgacgtgggctccaagaccaccatgcgtctcttctaccctgaatctgcccacttcgaccccaaagtagaaaacaacccagacacactcctcgtcctggtagctttcaaggcaatggacttccactggattgagaccatcctgagtgataagaagcgggtgcgaaagggtttctggaaacagcctcccctcatctgggatgtcaatcctaaacagattcggattctcaaccccttcttcatggagattgcagctgacaaactgctgagcctgccaatgcaacagccacggaagattaagcagaagcccaccacgggcctgttggccatcacgctggccctccacctctgtgacttggtgcacattgccggctttggctacccagacgcctacaacaagaagcagaccattcactactatgagcagatcacgctcaagtccatggcggggtcaggccataatgtctcccaagaggccctggccattaagcggatgctggagatgggagctatcaagaacctcacgtccttctgacctgggcaagagctgtagcctgtcggttgcctactctgctgtctgggtgacccccatgcgtggctgtgggggtggctggtgccagtatgacccacttggactcaccccctcttggggagggagttctgggcctggccaggtctgagatgaggccatgcccctggctgctcttatggagccgagatccagtcagggtgggggcgctggagccgtgggagcccggccagggcagggggctcgttgctgtggcaccccctctctgccagcaccaagagattatttaatgggctatttaattaaggggtaggaaggtgctgtgggctggtcccacacatccaggaaagaggccagtagagaattctgcccmctttttataaaaacttacagcgatggccccaccaaggcctagacacggcactggcctcccaggagggcaggggcattgggaatgggtgggtgccctccaragaggggctgctacctcccagcaggcatgggaagagcactggtgtgggggttccaccgagaaggggacctcatctagaaaagaggttacaaacctaccattaaactatttttcctaaaacggaagca

SEQ ID NO: 6242 - DNA, 1431 bp, Homo sapiens
cgcctcccctgcaggcggactcgcccgctcccaggccggacccgcgcccgggacagggacccggccgagtcgagccgtcgcgccagcgctgcgccgccggtcggtgcgcctagcggatcggagctgcgcgcggaaccgtgctgccccgccccgctccacccgtgaggagctctttgacccagaggaatctgcaggaatggagggagttggccaaagtagggagatttttactcagaccatatccaggtggcccgaggcagccgggatgacagctctccccaggaatcctgctgcctgctgagaaacatggtcagcaagtcccgctggaagctcctggccatgttggctctggtcctggtcgtcatggtgtggtattccatctcccgggaagacaggtacatcgagcttttttattttcccatcccagagaagaaggagccgtgcctccagggtgaggcagagagcaaggcctctaagctctttggcaactactcccgggatcagcccatcttcctgcggcttgaggattatttctgggtcaagacgccatctgcttaygagctgccctatgggaccaaggggagtgaggatctgctcctccgggtgctagccatcaccagctcctccatccccaagaacatccagagaytgaacaatgccccagtggctggctatgagggtgacgtgggctccaagaccaccatgcgtctcttctaccctgaatctgcccacttcgaccccaaagtagaaaacaacccagacacactcctcgtcctggtagctttcaaggcaatggacttccactggattgagaccatcctgagtgataagaagcgggtgcgaaagggtttctggaaacagcctcccctcatctgggatgtcaatcctaaacagattcggattctcaaccccttcttcatggagattgcagctgacaaactgctgagcctgccaatgcaacagccacggaagattaagcaggwtgcggaatttggtcagagccgttcatgtcagagctcrgcagaatggcagctgaaccctgggagagcactgcctrttctgagaaaggcctgcaattgtgtcttcacgatgcttttccaagacagccaaggcaggtataattttcctcagcaagaaagaggaacctcggaggtgtgcaccgcctggctggccacccaggtattggcaaaagtgactgtygggctgctggmccggcccccgcccgccgtccctggagcactcacgatgcggtccggcggcggcgtgctccggatgaagcacttgatctggcccttctcgccgtggagggcgtgctgggtctgggtgctggagatgatggggggtcctgttgagaaacagcgtcccattaggcacccgggaagggcacgtccctgctggcgccctcttgggtgggttcagaagtgtattcat

SEQ ID NO: 6243 - DNA, 3986 bp, Homo sapiens
agccgcggcggcaccggcgcatccgccgccacctcggggactctgcgccggcccggtcggctcggctccggccgcgcgccccccctcgccctctcgccccggcgcccgctccccgctccccctccccgctccccctccccgccccccgccccccgcctccctgcccgcgccctccctcccgcgcgctcccagccttcggccgccgcctcgctgagcccagaacgagccgggccggggcggcggggccgggcggggcgggcgggcgcgcggaccccgcggctatgaagtggcccccgggggcccggagcccgacagtccccggggagggagccgcacgcggcccagggcagcggtctaggggcgccggggccggggcgtaggggccgttgcccgcgatggaccgcaccggagacgctccggactcgtcgccgcaggtgtccaccccccagggttcctgacccctgcccctggacagcgaccccttctcagactccagttgggccggactctccaaacctgcttccgcaatgggtgggttgtgagtgctggtaagacctgctagccaacattcagctgctctgtcctctccatgcctggccggcccggcccatgcctgttcttttctcccctgtgctgccgccgcccgtggccgcccctctcctgaacttaccgccactcaggtaatgaggagccgtgggtgcagccagccttggagatgccgaagagacgggacatcctagcgatcgtcctcatcgtgctgccctggactctgctcatcactgtctggcaccagagcaccctcgcacccctgctcgcggtacataaggatgagggcagtgacccccgacgcgaaacgccgcccggcgccgaccccagggagtactgcacgtctgaccgcgacatcgtggaggtggtgcgcaccgagtacgtgtacacgcggcccccgccatggtccgacacgctgcccaccatccacgtggtgacgcccacctacagccgcccggtgcagaaggccgagctgacgcgcatggccaacacgctgctgcacgtgcccaacctccactggctggtggtggaggatgcgccgcgccggacgccgctgaccrcgcgcctgctgcgcgacaccggcctcaactacacgcacctgcacgtggagacgccccgcaactacaagctgcgcggagacgcccgcgacccacgcatcccgcggggcaccatgcagcgcaacctggccctgcgctggctgcgcgagaccttcccgcgcaactccagccagcctggcgtggtctacttcgccgacgacgacaacacctacagcctggagctcttcgaagagatgcgcagcaccaggagggtgtccgtgtggcccgtcgccttcgtgggtggcctgcggtacgaggccccacgggtgaacggggcagggaaggtggtcggctggaagacggtgtttgacccccaccggccatttgcaatagacatggctggatttgccgtcaacctgcggctcattctgcagcgaagccaggcctacttcaagctgcgaggtgtgaagggaggctaccaggaaagcagcctccttcgagaacttgtcaccctcaacgacctggagcccaaggcagccaactgcaccaagatcctggtgtggcacacacggacagagaagccagtgctggtgaatgagggcaagaagggcttcactgacccctcggtggagatctgagcctcaggatgcaggagcctcctcctcagaccctgttcttggccttccatcctctccccacggctgatggtccctccaaggccgactcctaaggaatcaccatcaccctcctttctattctgggggcttctgagagagcccagcctgatgccagaacaaaggacagagaatttaagcacagaaatcccagacctgttgttctctccatcyagcgtgaccagggcccgagagacctgatggccagggtggggtgtccagcaccagccaagctggtgctccagcgcacctccccagagctccccgcactgacggggctgcaggagcaggtgcagtgggcgcccacactggccctgcagtgatgcagggcgggagggagataagaagaccccgcagtcaagtggagcatggccctccctggctccctgtccctgggctcagcacgaccacacaggacacccagccagggaattctgaagaccagagagcagcccacgggcatcacgagcgctctgctcctctcctgggcccctgctcttcccgagagctgcccccaaatcagacatacctctgtggctctcctctggttcacgtttacagagcataaggctgtcttggatcccaacaggcacccagccctgcatggggggagcctgggcctaataggcaccccctgtacctcaggctgtggcgggagcagagtccccccctccggcccctcttcctttaccccttctcctccagcagtggcaaaggggtaggctctagagccagcacaggtcactgcctgacctggactaagaaccccacggccccactgtccacacactgcctccccaccgcccacctcggctgctaggcccctcgcctggactggactggggagggaaagcgccttttcctgcagctcttcagagccacagacctcagggtggagtgagcccatggtgggcagtgggcaaggcggtgggtggtgggcaaggtgggacctcctgcagcctggaaagaggagggaggccaaggccattccctaactccctcctgcccctggtytgaggaggagggactctggagtagcagaggggctgggaaagagggggcaggggctgctgggacactgagcaggagggaggcctgagcacactgctttggaaattattctaaacacaaaaaagggaaagaaaatgttatttctccctaagtcaggagcatgcagagctagcccacctcatgtccagctgtccactttccatcctggagaaagaacagtgtgcctcaaactcctgccctccccaggcctctggggcccrctggaaagggctctgaccccctggcccrgccgggctctctagtggtgatccggctcattctcctgcaagttggaagcacaattttccccccaagtggaggaaaaggaaagggccccagcctactgaagaggtgtttattttttaactaacagcctcccaccccattaagactcaccaggagaggtctgagggccattcagaacccactcctgagtgggtgggtgggtgggactcagtccagagacctaacattcagaatatagcattggttgcctattttgagatggatttaatctcccacagtattcatgagaccatctgatggaatcagatccctgagccaccttgcaggacgttttccccaacctcttacaccctggatgtcactttggaaaccaagcccttggaagcaagtggggtggcatgggagagaagggaggaggtgggcacaggtggtgagcttatgtgtgggcactctactgcctcacagaagccagccaagtgccaaggtcagcttggctggtctgaggccaccttcttagccaaaaacctagggttcattttcaggactttgataatgaacaacaaaatggggacttctttgggcagatgctaggtcagttgttttcacctaatatcctcttttagctgcatgtatatttatttataattataaccctggtggactgcagccttcatctttattgggaatgagtttgttataaatcagaaatgggtccatgatgaccactgttttccaaacccagtctgttccctgctccctcgctggcaagccccaccacacaggagtgaggccaggggctaggagttctaagaacagaggctggggtgagggtggcacccaggcagctgcatctggtctgttttaatttaactgtatttaatttgctttcaaaattaaaagtcaaatacagtttttaacagtcctaatcctcttc

SEQ ID NO: 6244 - DNA, 3432 bp, Homo sapiens
tctctcttgcaggtgtccaccccccagggttcctgacccctgcccctggacagcgaccccttctcagactccagttgggccggactctccaaacctgcttccgcaatgggtgggttgtgagtgctggtaatgaggagccgtgggtgcagccagccttggagatgccgaagagacgggacatcctagcgatcgtcctcatcgtgctgccctggactctgctcatcactgtctggcaccagagcaccctcgcacccctgctcgcggtacataaggatgagggcagtgacccccgacgcgaaacgccgcccggcgccgaccccagggagtactgcacgtctgaccgcgacatcgtggaggtggtgcgcaccgagtacgtgtacacgcggcccccgccatggtccgacacgctgcccaccatccacgtggtgacgcccacctacagccgcccggtgcagaaggccgagctgacgcgcatggccaacacgctgctgcacgtgcccaacctccactggctggtggtggaggatgcgccgcgccggacgccgctgaccrcgcgcctgctgcgcgacaccggcctcaactacacgcacctgcacgtggagacgccccgcaactacaagctgcgcggagacgcccgcgacccacgcatcccgcggggcaccatgcagcgcaacctggccctgcgctggctgcgcgagaccttcccgcgcaactccagccagcctggcgtggtctacttcgccgacgacgacaacacctacagcctggagctcttcgaagagatgcgcagcaccaggagggtgtccgtgtggcccgtcgccttcgtgggtggcctgcggtacgaggccccacgggtgaacggggcagggaaggtggtcggctggaagacggtgtttgacccccaccggccatttgcaatagacatggctggatttgccgtcaacctgcggctcattctgcagcgaagccaggcctacttcaagctgcgaggtgtgaagggaggctaccaggaaagcagcctccttcgagaacttgtcaccctcaacgacctggagcccaaggcagccaactgcaccaagatcctggtgtggcacacacggacagagaagccagtgctggtgaatgagggcaagaagggcttcactgacccctcggtggagatctgagcctcaggatgcaggagcctcctcctcagaccctgttcttggccttccatcctctccccacggctgatggtccctccaaggccgactcctaaggaatcaccatcaccctcctttctattctgggggcttctgagagagcccagcctgatgccagaacaaaggacagagaatttaagcacagaaatcccagacctgttgttctctccatcyagcgtgaccagggcccgagagacctgatggccagggtggggtgtccagcaccagccaagctggtgctccagcgcacctccccagagctccccgcactgacggggctgcaggagcaggtgcagtgggcgcccacactggccctgcagtgatgcagggcgggagggagataagaagaccccgcagtcaagtggagcatggccctccctggctccctgtccctgggctcagcacgaccacacaggacacccagccagggaattctgaagaccagagagcagcccacgggcatcacgagcgctctgctcctctcctgggcccctgctcttcccgagagctgcccccaaatcagacatacctctgtggctctcctctggttcacgtttacagagcataaggctgtcttggatcccaacaggcacccagccctgcatggggggagcctgggcctaataggcaccccctgtacctcaggctgtggcgggagcagagtccccccctccggcccctcttcctttaccccttctcctccagcagtggcaaaggggtaggctctagagccagcacaggtcactgcctgacctggactaagaaccccacggccccactgtccacacactgcctccccaccgcccacctcggctgctaggcccctcgcctggactggactggggagggaaagcgccttttcctgcagctcttcagagccacagacctcagggtggagtgagcccatggtgggcagtgggcaaggcggtgggtggtgggcaaggtgggacctcctgcagcctggaaagaggagggaggccaaggccattccctaactccctcctgcccctggtytgaggaggagggactctggagtagcagaggggctgggaaagagggggcaggggctgctgggacactgagcaggagggaggcctgagcacactgctttggaaattattctaaacacaaaaaagggaaagaaaatgttatttctccctaagtcaggagcatgcagagctagcccacctcatgtccagctgtccactttccatcctggagaaagaacagtgtgcctcaaactcctgccctccccaggcctctggggcccrctggaaagggctctgaccccctggcccrgccgggctctctagtggtgatccggctcattctcctgcaagttggaagcacaattttccccccaagtggaggaaaaggaaagggccccagcctactgaagaggtgtttattttttaactaacagcctcccaccccattaagactcaccaggagaggtctgagggccattcagaacccactcctgagtgggtgggtgggtgggactcagtccagagacctaacattcagaatatagcattggttgcctattttgagatggatttaatctcccacagtattcatgagaccatctgatggaatcagatccctgagccaccttgcaggacgttttccccaacctcttacaccctggatgtcactttggaaaccaagcccttggaagcaagtggggtggcatgggagagaagggaggaggtgggcacaggtggtgagcttatgtgtgggcactctactgcctcacagaagccagccaagtgccaaggtcagcttggctggtctgaggccaccttcttagccaaaaacctagggttcattttcaggactttgataatgaacaacaaaatggggacttctttgggcagatgctaggtcagttgttttcacctaatatcctcttttagctgcatgtatatttatttataattataaccctggtggactgcagccttcatctttattgggaatgagtttgttataaatcagaaatgggtccatgatgaccactgttttccaaacccagtctgttccctgctccctcgctggcaagccccaccacacaggagtgaggccaggggctaggagttctaagaacagaggctggggtgagggtggcacccaggcagctgcatctggtctgttttaatttaactgtatttaatttgctttcaaaattaaaagtcaaatacagtttttaacagtcctaatcctcttc

SEQ ID NO: 6245 - DNA, 4093 bp, Homo sapiens
cctggagatcccgctgcccccggcctccccgcgcccgtccgcccacgcaggcctcccgggcctctctccggaacgccgggtgcaccggcccggaaggggaggctgggagccgcggcggcaccggcgcatccgccgccacctcggggactctgcgccggcccggtcggctcggctccggccgcgcgccccccctcgccctctcgccccggcgcccgctccccgctccccctccccgctccccctccccgccccccgccccccgcctccctgcccgcgccctccctcccgcgcgctcccagccttcggccgccgcctcgctgagcccagaacgagccgggccggggcggcggggccgggcggggcgggcgggcgcgcggaccccgcggctatgaagtggcccccgggggcccggagcccgacagtccccggggagggagccgcacgcggcccagggcagcggtctaggggcgccggggccggggcgtaggggccgttgcccgcgatggaccgcaccggagacgctccggactcgtcgccgcaggtgtccaccccccagggttcctgacccctgcccctggacagcgaccccttctcagactccagttgggccggactctccaaacctgcttccgcaatgggtgggttgtgagtgctggtaagacctgctagccaacattcagctgctctgtcctctccatgcctggccggcccggcccatgcctgttcttttctcccctgtgctgccgccgcccgtggccgcccctctcctgaacttaccgccactcaggtaatgaggagccgtgggtgcagccagccttggagatgccgaagagacgggacatcctagcgatcgtcctcatcgtgctgccctggactctgctcatcactgtctggcaccagagcaccctcgcacccctgctcgcggtacataaggatgagggcagtgacccccgacgcgaaacgccgcccggcgccgaccccagggagtactgcacgtctgaccgcgacatcgtggaggtggtgcgcaccgagtacgtgtacacgcggcccccgccatggtccgacacgctgcccaccatccacgtggtgacgcccacctacagccgcccggtgcagaaggccgagctgacgcgcatggccaacacgctgctgcacgtgcccaacctccactggctggtggtggaggatgcgccgcgccggacgccgctgaccrcgcgcctgctgcgcgacaccggcctcaactacacgcacctgcacgtggagacgccccgcaactacaagctgcgcggagacgcccgcgacccacgcatcccgcggggcaccatgcagcgcaacctggccctgcgctggctgcgcgagaccttcccgcgcaactccagccagcctggcgtggtctacttcgccgacgacgacaacacctacagcctggagctcttcgaagagatgcgcagcaccaggagggtgtccgtgtggcccgtcgccttcgtgggtggcctgcggtacgaggccccacgggtgaacggggcagggaaggtggtcggctggaagacggtgtttgacccccaccggccatttgcaatagacatggctggatttgccgtcaacctgcggctcattctgcagcgaagccaggcctacttcaagctgcgaggtgtgaagggaggctaccaggaaagcagcctccttcgagaacttgtcaccctcaacgacctggagcccaaggcagccaactgcaccaagatcctggtgtggcacacacggacagagaagccagtgctggtgaatgagggcaagaagggcttcactgacccctcggtggagatctgagcctcaggatgcaggagcctcctcctcagaccctgttcttggccttccatcctctccccacggctgatggtccctccaaggccgactcctaaggaatcaccatcaccctcctttctattctgggggcttctgagagagcccagcctgatgccagaacaaaggacagagaatttaagcacagaaatcccagacctgttgttctctccatcyagcgtgaccagggcccgagagacctgatggccagggtggggtgtccagcaccagccaagctggtgctccagcgcacctccccagagctccccgcactgacggggctgcaggagcaggtgcagtgggcgcccacactggccctgcagtgatgcagggcgggagggagataagaagaccccgcagtcaagtggagcatggccctccctggctccctgtccctgggctcagcacgaccacacaggacacccagccagggaattctgaagaccagagagcagcccacgggcatcacgagcgctctgctcctctcctgggcccctgctcttcccgagagctgcccccaaatcagacatacctctgtggctctcctctggttcacgtttacagagcataaggctgtcttggatcccaacaggcacccagccctgcatggggggagcctgggcctaataggcaccccctgtacctcaggctgtggcgggagcagagtccccccctccggcccctcttcctttaccccttctcctccagcagtggcaaaggggtaggctctagagccagcacaggtcactgcctgacctggactaagaaccccacggccccactgtccacacactgcctccccaccgcccacctcggctgctaggcccctcgcctggactggactggggagggaaagcgccttttcctgcagctcttcagagccacagacctcagggtggagtgagcccatggtgggcagtgggcaaggcggtgggtggtgggcaaggtgggacctcctgcagcctggaaagaggagggaggccaaggccattccctaactccctcctgcccctggtytgaggaggagggactctggagtagcagaggggctgggaaagagggggcaggggctgctgggacactgagcaggagggaggcctgagcacactgctttggaaattattctaaacacaaaaaagggaaagaaaatgttatttctccctaagtcaggagcatgcagagctagcccacctcatgtccagctgtccactttccatcctggagaaagaacagtgtgcctcaaactcctgccctccccaggcctctggggcccrctggaaagggctctgaccccctggcccrgccgggctctctagtggtgatccggctcattctcctgcaagttggaagcacaattttccccccaagtggaggaaaaggaaagggccccagcctactgaagaggtgtttattttttaactaacagcctcccaccccattaagactcaccaggagaggtctgagggccattcagaacccactcctgagtgggtgggtgggtgggactcagtccagagacctaacattcagaatatagcattggttgcctattttgagatggatttaatctcccacagtattcatgagaccatctgatggaatcagatccctgagccaccttgcaggacgttttccccaacctcttacaccctggatgtcactttggaaaccaagcccttggaagcaagtggggtggcatgggagagaagggaggaggtgggcacaggtggtgagcttatgtgtgggcactctactgcctcacagaagccagccaagtgccaaggtcagcttggctggtctgaggccaccttcttagccaaaaacctagggttcattttcaggactttgataatgaacaacaaaatggggacttctttgggcagatgctaggtcagttgttttcacctaatatcctcttttagctgcatgtatatttatttataattataaccctggtggactgcagccttcatctttattgggaatgagtttgttataaatcagaaatgggtccatgatgaccactgttttccaaacccagtctgttccctgctccctcgctggcaagccccaccacacaggagtgaggccaggggctaggagttctaagaacagaggctggggtgagggtggcacccaggcagctgcatctggtctgttttaatttaactgtatttaatttgctttcaaaattaaaagtcaaatacagtttttaacagtcctaatcctcttc

SEQ ID NO: 6246 - DNA, 3797 bp, Homo sapiens
cagccttcggccgccgcctcgctgagcccagaacgagccgggccggggcggcggggccgggcggggcgggcgggcgcgcggaccccgcggctatgaagtggcccccgggggcccggagcccgacagtccccggggagggagccgcacgcggcccagggcagcggtctaggggcgccggggccggggcgtaggggccgttgcccgcgatggaccgcaccggagacgctccggactcgtcgccgcaggtgtccaccccccagggttcctgacccctgcccctggacagcgaccccttctcagactccagttgggccggactctccaaacctgcttccgcaatgggtgggttgtgagtgctggtaagacctgctagccaacattcagctgctctgtcctctccatgcctggccggcccggcccatgcctgttcttttctcccctgtgctgccgccgcccgtggccgcccctctcctgaacttaccgccactcaggtaatgaggagccgtgggtgcagccagccttggagatgccgaagagacgggacatcctagcgatcgtcctcatcgtgctgccctggactctgctcatcactgtctggcaccagagcaccctcgcacccctgctcgcggtacataaggatgagggcagtgacccccgacgcgaaacgccgcccggcgccgaccccagggagtactgcacgtctgaccgcgacatcgtggaggtggtgcgcaccgagtacgtgtacacgcggcccccgccatggtccgacacgctgcccaccatccacgtggtgacgcccacctacagccgcccggtgcagaaggccgagctgacgcgcatggccaacacgctgctgcacgtgcccaacctccactggctggtggtggaggatgcgccgcgccggacgccgctgaccrcgcgcctgctgcgcgacaccggcctcaactacacgcacctgcacgtggagacgccccgcaactacaagctgcgcggagacgcccgcgacccacgcatcccgcggggcaccatgcagcgcaacctggccctgcgctggctgcgcgagaccttcccgcgcaactccagccagcctggcgtggtctacttcgccgacgacgacaacacctacagcctggagctcttcgaagagatgcgcagcaccaggagggtgtccgtgtggcccgtcgccttcgtgggtggcctgcggtacgaggccccacgggtgaacggggcagggaaggtggtcggctggaagacggtgtttgacccccaccggccatttgcaatagacatggctggatttgccgtcaacctgcggctcattctgcagcgaagccaggcctacttcaagctgcgaggtgtgaagggaggctaccaggaaagcagcctccttcgagaacttgtcaccctcaacgacctggagcccaaggcagccaactgcaccaagatcctggtgtggcacacacggacagagaagccagtgctggtgaatgagggcaagaagggcttcactgacccctcggtggagatctgagcctcaggatgcaggagcctcctcctcagaccctgttcttggccttccatcctctccccacggctgatggtccctccaaggccgactcctaaggaatcaccatcaccctcctttctattctgggggcttctgagagagcccagcctgatgccagaacaaaggacagagaatttaagcacagaaatcccagacctgttgttctctccatcyagcgtgaccagggcccgagagacctgatggccagggtggggtgtccagcaccagccaagctggtgctccagcgcacctccccagagctccccgcactgacggggctgcaggagcaggtgcagtgggcgcccacactggccctgcagtgatgcagggcgggagggagataagaagaccccgcagtcaagtggagcatggccctccctggctccctgtccctgggctcagcacgaccacacaggacacccagccagggaattctgaagaccagagagcagcccacgggcatcacgagcgctctgctcctctcctgggcccctgctcttcccgagagctgcccccaaatcagacatacctctgtggctctcctctggttcacgtttacagagcataaggctgtcttggatcccaacaggcacccagccctgcatggggggagcctgggcctaataggcaccccctgtacctcaggctgtggcgggagcagagtccccccctccggcccctcttcctttaccccttctcctccagcagtggcaaaggggtaggctctagagccagcacaggtcactgcctgacctggactaagaaccccacggccccactgtccacacactgcctccccaccgcccacctcggctgctaggcccctcgcctggactggactggggagggaaagcgccttttcctgcagctcttcagagccacagacctcagggtggagtgagcccatggtgggcagtgggcaaggcggtgggtggtgggcaaggtgggacctcctgcagcctggaaagaggagggaggccaaggccattccctaactccctcctgcccctggtytgaggaggagggactctggagtagcagaggggctgggaaagagggggcaggggctgctgggacactgagcaggagggaggcctgagcacactgctttggaaattattctaaacacaaaaaagggaaagaaaatgttatttctccctaagtcaggagcatgcagagctagcccacctcatgtccagctgtccactttccatcctggagaaagaacagtgtgcctcaaactcctgccctccccaggcctctggggcccrctggaaagggctctgaccccctggcccrgccgggctctctagtggtgatccggctcattctcctgcaagttggaagcacaattttccccccaagtggaggaaaaggaaagggccccagcctactgaagaggtgtttattttttaactaacagcctcccaccccattaagactcaccaggagaggtctgagggccattcagaacccactcctgagtgggtgggtgggtgggactcagtccagagacctaacattcagaatatagcattggttgcctattttgagatggatttaatctcccacagtattcatgagaccatctgatggaatcagatccctgagccaccttgcaggacgttttccccaacctcttacaccctggatgtcactttggaaaccaagcccttggaagcaagtggggtggcatgggagagaagggaggaggtgggcacaggtggtgagcttatgtgtgggcactctactgcctcacagaagccagccaagtgccaaggtcagcttggctggtctgaggccaccttcttagccaaaaacctagggttcattttcaggactttgataatgaacaacaaaatggggacttctttgggcagatgctaggtcagttgttttcacctaatatcctcttttagctgcatgtatatttatttataattataaccctggtggactgcagccttcatctttattgggaatgagtttgttataaatcagaaatgggtccatgatgaccactgttttccaaacccagtctgttccctgctccctcgctggcaagccccaccacacaggagtgaggccaggggctaggagttctaagaacagaggctggggtgagggtggcacccaggcagctgcatctggtctgttttaatttaactgtatttaatttgctttcaaaattaaaagtcaaatacagtttttaacagtcctaatcctcttc

SEQ ID NO: 6247 - DNA, 3961 bp, Homo sapiens
cctggagatcccgctgcccccggcctccccgcgcccgtccgcccacgcaggcctcccgggcctctctccggaacgccgggtgcaccggcccggaaggggaggctgggagccgcggcggcaccggcgcatccgccgccacctcggggactctgcgccggcccggtcggctcggctccggccgcgcgccccccctcgccctctcgccccggcgcccgctccccgctccccctccccgctccccctccccgccccccgccccccgcctccctgcccgcgccctccctcccgcgcgctcccagccttcggccgccgcctcgctgagcccagaacgagccgggccggggcggcggggccgggcggggcgggcgggcgcgcggaccccgcggctatgaagtggcccccgggggcccggagcccgacagtccccggggagggagccgcacgcggcccagggcagcggtctaggggcgccggggccggggcgtaggggccgttgcccgcgatggaccgcaccggagacgctccggactcgtcgccgcaggtgtccaccccccagggttcctgacccctgcccctggacagcgaccccttctcagactccagttgggccggactctccaaacctgcttccgcaatgggtgggttgtgagtgctggtaatgaggagccgtgggtgcagccagccttggagatgccgaagagacgggacatcctagcgatcgtcctcatcgtgctgccctggactctgctcatcactgtctggcaccagagcaccctcgcacccctgctcgcggtacataaggatgagggcagtgacccccgacgcgaaacgccgcccggcgccgaccccagggagtactgcacgtctgaccgcgacatcgtggaggtggtgcgcaccgagtacgtgtacacgcggcccccgccatggtccgacacgctgcccaccatccacgtggtgacgcccacctacagccgcccggtgcagaaggccgagctgacgcgcatggccaacacgctgctgcacgtgcccaacctccactggctggtggtggaggatgcgccgcgccggacgccgctgaccrcgcgcctgctgcgcgacaccggcctcaactacacgcacctgcacgtggagacgccccgcaactacaagctgcgcggagacgcccgcgacccacgcatcccgcggggcaccatgcagcgcaacctggccctgcgctggctgcgcgagaccttcccgcgcaactccagccagcctggcgtggtctacttcgccgacgacgacaacacctacagcctggagctcttcgaagagatgcgcagcaccaggagggtgtccgtgtggcccgtcgccttcgtgggtggcctgcggtacgaggccccacgggtgaacggggcagggaaggtggtcggctggaagacggtgtttgacccccaccggccatttgcaatagacatggctggatttgccgtcaacctgcggctcattctgcagcgaagccaggcctacttcaagctgcgaggtgtgaagggaggctaccaggaaagcagcctccttcgagaacttgtcaccctcaacgacctggagcccaaggcagccaactgcaccaagatcctggtgtggcacacacggacagagaagccagtgctggtgaatgagggcaagaagggcttcactgacccctcggtggagatctgagcctcaggatgcaggagcctcctcctcagaccctgttcttggccttccatcctctccccacggctgatggtccctccaaggccgactcctaaggaatcaccatcaccctcctttctattctgggggcttctgagagagcccagcctgatgccagaacaaaggacagagaatttaagcacagaaatcccagacctgttgttctctccatcyagcgtgaccagggcccgagagacctgatggccagggtggggtgtccagcaccagccaagctggtgctccagcgcacctccccagagctccccgcactgacggggctgcaggagcaggtgcagtgggcgcccacactggccctgcagtgatgcagggcgggagggagataagaagaccccgcagtcaagtggagcatggccctccctggctccctgtccctgggctcagcacgaccacacaggacacccagccagggaattctgaagaccagagagcagcccacgggcatcacgagcgctctgctcctctcctgggcccctgctcttcccgagagctgcccccaaatcagacatacctctgtggctctcctctggttcacgtttacagagcataaggctgtcttggatcccaacaggcacccagccctgcatggggggagcctgggcctaataggcaccccctgtacctcaggctgtggcgggagcagagtccccccctccggcccctcttcctttaccccttctcctccagcagtggcaaaggggtaggctctagagccagcacaggtcactgcctgacctggactaagaaccccacggccccactgtccacacactgcctccccaccgcccacctcggctgctaggcccctcgcctggactggactggggagggaaagcgccttttcctgcagctcttcagagccacagacctcagggtggagtgagcccatggtgggcagtgggcaaggcggtgggtggtgggcaaggtgggacctcctgcagcctggaaagaggagggaggccaaggccattccctaactccctcctgcccctggtytgaggaggagggactctggagtagcagaggggctgggaaagagggggcaggggctgctgggacactgagcaggagggaggcctgagcacactgctttggaaattattctaaacacaaaaaagggaaagaaaatgttatttctccctaagtcaggagcatgcagagctagcccacctcatgtccagctgtccactttccatcctggagaaagaacagtgtgcctcaaactcctgccctccccaggcctctggggcccrctggaaagggctctgaccccctggcccrgccgggctctctagtggtgatccggctcattctcctgcaagttggaagcacaattttccccccaagtggaggaaaaggaaagggccccagcctactgaagaggtgtttattttttaactaacagcctcccaccccattaagactcaccaggagaggtctgagggccattcagaacccactcctgagtgggtgggtgggtgggactcagtccagagacctaacattcagaatatagcattggttgcctattttgagatggatttaatctcccacagtattcatgagaccatctgatggaatcagatccctgagccaccttgcaggacgttttccccaacctcttacaccctggatgtcactttggaaaccaagcccttggaagcaagtggggtggcatgggagagaagggaggaggtgggcacaggtggtgagcttatgtgtgggcactctactgcctcacagaagccagccaagtgccaaggtcagcttggctggtctgaggccaccttcttagccaaaaacctagggttcattttcaggactttgataatgaacaacaaaatggggacttctttgggcagatgctaggtcagttgttttcacctaatatcctcttttagctgcatgtatatttatttataattataaccctggtggactgcagccttcatctttattgggaatgagtttgttataaatcagaaatgggtccatgatgaccactgttttccaaacccagtctgttccctgctccctcgctggcaagccccaccacacaggagtgaggccaggggctaggagttctaagaacagaggctggggtgagggtggcacccaggcagctgcatctggtctgttttaatttaactgtatttaatttgctttcaaaattaaaagtcaaatacagtttttaacagtcctaatcctcttc

SEQ ID NO: 6248 - DNA, 3854 bp, Homo sapiens
agccgcggcggcaccggcgcatccgccgccacctcggggactctgcgccggcccggtcggctcggctccggccgcgcgccccccctcgccctctcgccccggcgcccgctccccgctccccctccccgctccccctccccgccccccgccccccgcctccctgcccgcgccctccctcccgcgcgctcccagccttcggccgccgcctcgctgagcccagaacgagccgggccggggcggcggggccgggcggggcgggcgggcgcgcggaccccgcggctatgaagtggcccccgggggcccggagcccgacagtccccggggagggagccgcacgcggcccagggcagcggtctaggggcgccggggccggggcgtaggggccgttgcccgcgatggaccgcaccggagacgctccggactcgtcgccgcaggtgtccaccccccagggttcctgacccctgcccctggacagcgaccccttctcagactccagttgggccggactctccaaacctgcttccgcaatgggtgggttgtgagtgctggtaatgaggagccgtgggtgcagccagccttggagatgccgaagagacgggacatcctagcgatcgtcctcatcgtgctgccctggactctgctcatcactgtctggcaccagagcaccctcgcacccctgctcgcggtacataaggatgagggcagtgacccccgacgcgaaacgccgcccggcgccgaccccagggagtactgcacgtctgaccgcgacatcgtggaggtggtgcgcaccgagtacgtgtacacgcggcccccgccatggtccgacacgctgcccaccatccacgtggtgacgcccacctacagccgcccggtgcagaaggccgagctgacgcgcatggccaacacgctgctgcacgtgcccaacctccactggctggtggtggaggatgcgccgcgccggacgccgctgaccrcgcgcctgctgcgcgacaccggcctcaactacacgcacctgcacgtggagacgccccgcaactacaagctgcgcggagacgcccgcgacccacgcatcccgcggggcaccatgcagcgcaacctggccctgcgctggctgcgcgagaccttcccgcgcaactccagccagcctggcgtggtctacttcgccgacgacgacaacacctacagcctggagctcttcgaagagatgcgcagcaccaggagggtgtccgtgtggcccgtcgccttcgtgggtggcctgcggtacgaggccccacgggtgaacggggcagggaaggtggtcggctggaagacggtgtttgacccccaccggccatttgcaatagacatggctggatttgccgtcaacctgcggctcattctgcagcgaagccaggcctacttcaagctgcgaggtgtgaagggaggctaccaggaaagcagcctccttcgagaacttgtcaccctcaacgacctggagcccaaggcagccaactgcaccaagatcctggtgtggcacacacggacagagaagccagtgctggtgaatgagggcaagaagggcttcactgacccctcggtggagatctgagcctcaggatgcaggagcctcctcctcagaccctgttcttggccttccatcctctccccacggctgatggtccctccaaggccgactcctaaggaatcaccatcaccctcctttctattctgggggcttctgagagagcccagcctgatgccagaacaaaggacagagaatttaagcacagaaatcccagacctgttgttctctccatcyagcgtgaccagggcccgagagacctgatggccagggtggggtgtccagcaccagccaagctggtgctccagcgcacctccccagagctccccgcactgacggggctgcaggagcaggtgcagtgggcgcccacactggccctgcagtgatgcagggcgggagggagataagaagaccccgcagtcaagtggagcatggccctccctggctccctgtccctgggctcagcacgaccacacaggacacccagccagggaattctgaagaccagagagcagcccacgggcatcacgagcgctctgctcctctcctgggcccctgctcttcccgagagctgcccccaaatcagacatacctctgtggctctcctctggttcacgtttacagagcataaggctgtcttggatcccaacaggcacccagccctgcatggggggagcctgggcctaataggcaccccctgtacctcaggctgtggcgggagcagagtccccccctccggcccctcttcctttaccccttctcctccagcagtggcaaaggggtaggctctagagccagcacaggtcactgcctgacctggactaagaaccccacggccccactgtccacacactgcctccccaccgcccacctcggctgctaggcccctcgcctggactggactggggagggaaagcgccttttcctgcagctcttcagagccacagacctcagggtggagtgagcccatggtgggcagtgggcaaggcggtgggtggtgggcaaggtgggacctcctgcagcctggaaagaggagggaggccaaggccattccctaactccctcctgcccctggtytgaggaggagggactctggagtagcagaggggctgggaaagagggggcaggggctgctgggacactgagcaggagggaggcctgagcacactgctttggaaattattctaaacacaaaaaagggaaagaaaatgttatttctccctaagtcaggagcatgcagagctagcccacctcatgtccagctgtccactttccatcctggagaaagaacagtgtgcctcaaactcctgccctccccaggcctctggggcccrctggaaagggctctgaccccctggcccrgccgggctctctagtggtgatccggctcattctcctgcaagttggaagcacaattttccccccaagtggaggaaaaggaaagggccccagcctactgaagaggtgtttattttttaactaacagcctcccaccccattaagactcaccaggagaggtctgagggccattcagaacccactcctgagtgggtgggtgggtgggactcagtccagagacctaacattcagaatatagcattggttgcctattttgagatggatttaatctcccacagtattcatgagaccatctgatggaatcagatccctgagccaccttgcaggacgttttccccaacctcttacaccctggatgtcactttggaaaccaagcccttggaagcaagtggggtggcatgggagagaagggaggaggtgggcacaggtggtgagcttatgtgtgggcactctactgcctcacagaagccagccaagtgccaaggtcagcttggctggtctgaggccaccttcttagccaaaaacctagggttcattttcaggactttgataatgaacaacaaaatggggacttctttgggcagatgctaggtcagttgttttcacctaatatcctcttttagctgcatgtatatttatttataattataaccctggtggactgcagccttcatctttattgggaatgagtttgttataaatcagaaatgggtccatgatgaccactgttttccaaacccagtctgttccctgctccctcgctggcaagccccaccacacaggagtgaggccaggggctaggagttctaagaacagaggctggggtgagggtggcacccaggcagctgcatctggtctgttttaatttaactgtatttaatttgctttcaaaattaaaagtcaaatacagtttttaacagtcctaatcctcttc

SEQ ID NO: 6249 - DNA, 1969 bp, Homo sapiens
cttctacaaaactcagagggactcttcaggagccacatgctctcatcaagcagaaactttttaagaggtrgacaacaacccagagtggacacagagctggtgctcttccagtagagtagagacggggtttcaccatgttggccaagctgatctcgaactcctgacctcaagtgatccaccctcctyggcctcccaaagtgctggaatcacaggcgtgagccaccgtgcccaaccagtgaggccacgtttcgaaaagaagaaagaaacgacaaactaaaatacatgactgtgtagatgaggaaggacatgaaatgaaacaggaaaaaggactgtgaaggccttattgttcgctctgccaccaaggtgaccgctgatgtcatcaacgcagctgagaaactccaggtggtgggcagggctggcacaggtgtggacaatgtggatctggaggccgcaacaaggaagggcatcttggttatgaacacccccaatgggaacagcctcagtgccgcagaactcacttgtggaatgatcatgtgcctggccaggcagattccccaggcgacggcttcgatgaaggacggcaaatgggagcggaagaagttcatgggaacagagctgaatggaaagaccctgggaattcttggcctgggcaggattgggagagaggtagctacccggatgcagtcctttgggatgaagactatagggtatgaccccatcatttccccagaggtctcggcctcctttggtgttcagcagctgcccctggaggagatctggcctctctgtgatttcatcactgtgcacactcctctcctgccctccacgacaggcttgctgaatgacaacacctttgcccagtgcaagaagggggtgcgtgtggtgaactgtgcccgtggagggatcgtggacgaaggcgccctgctccgggccctgcagtctggccagtgtgccggggctgcactggacgtgtttacggaagagccgccacgggaccgggccttggtggaccatgagaatgtcatcagctgtccccacctgggtgccagcaccaaggaggctcagagccgctgtggggaggaaattgctgttcagttcgtggacatggtgaaggggaaatctctcacgggggttgtgaatgcccaggcccttaccagtgccttctctccacacaccaagccttggattggtctggcagaagctctggggacactgatgcgagcctgggctgggtcccccaaagggaccatccaggtgataacacagggaacatccctgaagaatgctgggaactgcctaagccccgcagtcattgtcggcctcctgaaagaggcttccaagcaggcggatgtgaacttggtgaacgctaagctgctggtgaaagaggctggcctcaatgtcaccacctcccacagccctgctgcaccaggggagcaaggcttcggggaatgcctcctggcyrtggccctggcaggcgccccttaccaggctgtgggcttggtccaaggcactacrcctgtactgcaggggctcaatggagctgtcttcaggccagaagtgcctctccgcagggacctgcccctgctcctattccggactcagacctctgaccctgcaatgctgcctaccatgattggcctcctggcagaggcaggcrtgcggctgctgtcctaccagacttcactggtgtcagatggggagaccwggcacgtcatgggcatctcctccttgctgcccagcctggaagcgtggaagcagcatgtgactgaagccttccagttccacttctaaccttggagctcactggtccctgcctctggggyttttctgaagmaacccacccactgtgatcaatagggagagaaaatccacattcttgggctgaacgcgggcctctgacactgcttacactgcactctgaccctgtagtacagcaataaccgtctaataaagagcctacccccaactc

SEQ ID NO: 6250 - DNA, 2270 bp, Homo sapiens
tgatagtcgaattcccttcaacgtctagcacagtgccttgcacatttacccactcaaaaaaaatttcgtaaggaattaataaatgaatccttaggaggaaaagtgaaaatgaagtttttctctcaggatgaggtgtatttctccgttcatttcagatatgcatcagctagtcagcgtaaattgtgctttttatatgctcaccaggtgtaggtaagagctttggctgagatggagaaattcatcgcgggaggataataaagcgggcagggatttggcaacctcagagccgcgaggaggaggcggagtcgcggagagtttgagtatttccgtccaatcaaaaggagactgtargaggaggaggaggaggagatgactggggarcgggagctsgagaatactgcccagttactctagcgcgccaggccgmaccgcagcttcttggcttaggtacttctactcacagcggccgattccgaggccaactccagcaatggcttttgcaaatctgcggaaagtgctcatcagtgacagcctggacccttgctgccggaagatcttgcaagatggagggctgcaggtggtggaaaagcagaaccttagcaaagaggagctgatagcggagctgcaggactgtgaaggccttattgttcgctctgccaccaaggtgaccgctgatgtcatcaacgcagctgagaaactccaggtggtgggcagggctggcacaggtgtggacaatgtggatctggaggccgcaacaaggaagggcatcttggttatgaacacccccaatgggaacagcctcagtgccgcagaactcacttgtggaatgatcatgtgcctggccaggcagattccccaggcgacggcttcgatgaaggacggcaaatgggagcggaagaagttcatgggaacagagctgaatggaaagaccctgggaattcttggcctgggcaggattgggagagaggtagctacccggatgcagtcctttgggatgaagactatagggtatgaccccatcatttccccagaggtctcggcctcctttggtgttcagcagctgcccctggaggagatctggcctctctgtgatttcatcactgtgcacactcctctcctgccctccacgacaggcttgctgaatgacaacacctttgcccagtgcaagaagggggtgcgtgtggtgaactgtgcccgtggagggatcgtggacgaaggcgccctgctccgggccctgcagtctggccagtgtgccggggctgcactggacgtgtttacggaagagccgccacgggaccgggccttggtggaccatgagaatgtcatcagctgtccccacctgggtgccagcaccaaggaggctcagagccgctgtggggaggaaattgctgttcagttcgtggacatggtgaaggggaaatctctcacgggggttgtgaatgcccaggcccttaccagtgccttctctccacacaccaagccttggattggtctggcagaagctctggggacactgatgcgagcctgggctgggtcccccaaagggaccatccaggtgataacacagggaacatccctgaagaatgctgggaactgcctaagccccgcagtcattgtcggcctcctgaaagaggcttccaagcaggcggatgtgaacttggtgaacgctaagctgctggtgaaagaggctggcctcaatgtcaccacctcccacagccctgctgcaccaggggagcaaggcttcggggaatgcctcctggcyrtggccctggcaggcgccccttaccaggctgtgggcttggtccaaggcactacrcctgtactgcaggggctcaatggagctgtcttcaggccagaagtgcctctccgcagggacctgcccctgctcctattccggactcagacctctgaccctgcaatgctgcctaccatgattggcctcctggcagaggcaggcrtgcggctgctgtcctaccagacttcactggtgtcagatggggagaccwggcacgtcatgggcatctcctccttgctgcccagcctggaagcgtggaagcagcatgtgactgaagccttccagttccacttctaaccttggagctcactggtccctgcctctggggyttttctgaagmaacccacccactgtgatcaatagggagagaaaatccacattcttgggctgaacgcgggcctctgacactgcttacactgcactctgaccctgtagtacagcaataaccgtctaataaagagcctacccccaactc

SEQ ID NO: 6251 - DNA, 1379 bp, Homo sapiens
ttggccatgacaggctggagctgccttgtgacaggagcaggagggtttctgggttagagtatcatcygcctcttggtggaggagaaggagctgaaggagatcagggccttggacaaggccttcagaccggaattgaggaaggaattttctgagctccagaacaagaccaagctgacggtgctggaaggagacattctggatgagtcatgcctgaagagagcctgccaggacatgtcggtcatcatccacaccacctccatcatagacatcatcggtgtcactcacagagagtccatcatgaacatcaatgtgaaacgtacccagcttctgttggaggcctgtgtccaagctacagtgccagtcttcatctacaccagtaccccagaggtagccgggcccaattcctacaaggaaatcatccagaacagtcacgaagaagagcctctggaaaacacatggtacgctccatacccacacagcaaaaagcttgctgagaaggctgtgctggcggctaatgggtggactctgaaaaacggtggcaccttgtacacttgtgccttaagaccaatgtttatctatggggaaggaagcccaatcctttctgccggtataaatgaggccctaaacaaccatgggatcctgtcaagtttcagcaagttctccagagtcaacccagtctatattggaaacatggcctgggcccacattctggccttgaggccctgcgggagcccaagaaggccccaagtgtccgaggacagttctactacatctcagatgacatgcctcaccaaagctatgataaccttaattacatcctgagcaaagagttcggcctctgccttgattctagatggagccttcctttatctctgatgtactggattggcttcctgctggaaatagtgagcttcctgctgaggccaatttacacctatcgacacccttcaaccaccacagagtgacattgtcaaatagcgtgttcaccttctcttacaagaaggctcagcaagatctggcatataagccactttacagctgggaggaagccaagaagaatgtacctgagtctgttagaaccgtggagtgggtttcccttgtggactggcacaaggagaccgtgaagtccaagactcagcgatttaaggatgacagagatgtgcatgtgggtattgttaggtgatgtcatcaagctccatcctcctggcttcatacagaaggtgacaatggcacaakcccaggtcctgttgtctccctttcacacaatgcccaacttattgtcttcctcatgtcatcaaaacctgcccattccctggctcaaccaggagctttctgtcctaatcatataccagaggaaatacaatgtgatttgctttttc

SEQ ID NO: 6252 - DNA, 1555 bp, Homo sapiens
gcccgtacacaccgtgtgctgggacaccccacagtcagccgcatggctcccctgtgccccagcccctggctccctctgttgatcccggcccctgctccaggcctcactgtgcaactgctgctgtcactgctgcttctgrtgcctgtccatccccagaggttgccccggatgcaggaggattcccccytgggaggaggctcttctggggaagatgacccactgggcgaggaggatctgcccagtgaagaggattcacccagagaggaggatccacccggagaggaggatctacctggagaggaggatctacctggagaggaggatctacctgaagttaagcctaaatcagaagaagagggctccctgaagttagaggatctacctactgttgaggctcctggagatcctcaagaaccccagaataatgcccacagggacaaagaaggggatgaccagagtcattggcgctatggaggcgacccgccctggccccgggtgtccccagcctgcgcgggccgcttccagtccccggtggatatccgcccccagctcgccgccttctgcccggcsctgcgccccctggaactcctgggcttccagctcccgccgctcccagaactgcgcctgcgcaacaatggccacagtgtgcaactgaccctgcctcctgggctagagatggctctgggtcccgggcgggagtaccgggctctgcagctgcatctgcactggggggctgcaggtcgtccgggctcggagcacactgtggaaggccaccgtttccctgccgagatccacgtggttcacctcagcaccgcctttgccagagttgacgaggccttggggcgcccgggaggcctggccgtgttggccgcctttctggaggagggcccggaagaaaacagtgcctatgagcagttgctgtctcgcttggaagaaatcgctgaggaaggctcagagactcaggtcccaggactggacatatctgcactcctgccctctgacttcagcygctacttccratatgaggggtctctgactacaccgccctgtgcccagggtgtcatctggactgtgtttaaccagacagtgatgctgagtgctaagcagctccacaccctctctgacaccctgtggggacctggtgactctcggctacagctgaacttccgagcgacgcagcctttgaatgggcgagtgattgaggcctccttccctgctggagtggacagcagtcctcgggctgctgagccagtccagctgaattcctgcctggctgctggtgacatcctagccctggtttttggcctcctttttgctgtcaccagcgtcgcgttccttgtgcagatgagaaggcagcacagaaggggaaccaaagggggtgtgagctaccgcccagcagaggtagccgagactggagcctagaggctggatcttggagaatgtgagaagccagccagaggcatctgagggggagccggtaactgtcctgtcctgctcattatgccacttccttttaactgcmaagaaattttttaaaataaatatttataataaa

SEQ ID NO: 6253 - DNA, 2187 bp, Homo sapiens
ggttcgggagacggaatgaagggccgggtgggctcgcgaggggccggggagtccgcggggagcgagggagtttccgaggggcgggtcgtgttcctggcagcgtccctccagggcaggcccgccccctttgtcccagttccccgctgcccgggctggggcggccggggttcattcattgccggcctgaggactcctagctcggccccgctccgcgctacagcccaaagcccagcctgagacccagccgccctcgtatgcccacggcctagctccccttccctccaacagacagactgggaaaaccgagtgggcgacggctgagcaaggactctccagtcctcagtcaccttggacaaagaagtgtggatcctcagattccatcttttccaactccaaggtgccatggcagagaaggtgctggtaacaggtggggctggctacattggcagccacacggtgctggagctgctggaggctggctacttgcctgtggtcatcgatarcttccataatgccttccgtggagggggctccctgcctgagagcctgcggcgggtccaggagctgacaggccgctctgtggagtttgaggagatggacattttggaccagggagccctacagcgtctcttcaaaaaggtgggtgcaggctgggcacggtggctcacgcctgtaattccagcactttggaaggccgaggtgaggagatcacttgagcccaggtgttcaagaccagcctgctcaacacagtgaaaccccatctctacagaaaaatacaaaaattagctgggcatggtagcccatacctgtggtcccagctactcgggaggctggcatgggaggatggcttgagcctgggaggtggaggttgcggtgagctgagatggcaccactgtactccagcctggacaacagagcgagactgtcaaaaaaaaaaaaaaaggtgagtgcaggcaggcaggctgagggcattgccaaggactaaaaccagtagagcaacctctggccatgtcacccctgcagtacagctttatggcggtcatccactttgcggggctcaaggccrtgggcgagtcggtgcagaagcctctggrttattacagagttaacctgaccgggaccatccagcttctggagatcatgaaggcccacggggtgaagaacctggtgttcagcagctcagccactgtgtacgggaacccccagtacctgccccttgatgaggcccaccccacgggtggttgtaccaacccttacggcaagtccaagttcttcatcgaggaaatgatccgggacctgtgccaggcagacaagacttggaacgcagtgctgcygcgctatttcaaccccacaggtgcccatgcctctggctgcattggtgaggatccccagggcatacccaacaacctcatgccttatgtctcccagktggcgatcgggcgacgkgaggccctgaatgtctttgscaatgactatkacacagaggatgscacaggtgtccgggattacatccatgtcgtggatctggccaagggccacattgcagccttaaggaagctgaaagaacagtgtggctgccggatctacaacctgggcacgggcacaggctattcaggttgttgggtatgccttgaggatcctcaccaaggcctcagaggcatggatcccgtacaaggtggtkgcmcggcgggaaggtgatgtggcagcctgttacgccaacccmagchtggcccaagaggagctkgggtggacagcagccttagggctggacaggatgtgtkaggatctctggcgctggcagaagcagaatccttcaggctttggcacgcaagcctgaggaccctcccctaccaaggaccaggaaaagcagcagctgcctgctctccagcctctggcaggaactcagggccctggagctgctggggccaagccaaggcctcccctacctcaaaccccagctgggcccgcttagcccaccaggcatgaggccaagggctccactgaccaggaggcckaggtctytaactcttatcttccacagggtccaagagttcatcaggacccccaagagtgagtgagggggcaaggctytggcacaaaacctcctcctcccaggcactcatttatattgctctgaaagagctttccaaagtatttaaaaataaaaacaagttttcttacactggg

SEQ ID NO: 6254 - DNA, 1561 bp, Homo sapiens
ggccgtcagcacttaaagggcccgcggctcgggcgtaggaggcggtgcctctgcagcaagcgtggggcgcgggaacccgagcaggactctccagtcctcagtcaccttggacaaagaagtgtggatcctcagattccatcttttccaactccaaggtgccatggcagagaaggtgctggtaacaggtggggctggctacattggcagccacacggtgctggagctgctggaggctggctacttgcctgtggtcatcgatarcttccataatgccttccgtggagggggctccctgcctgagagcctgcggcgggtccaggagctgacaggccgctctgtggagtttgaggagatggacattttggaccagggagccctacagcgtctcttcaaaaagtacagctttatggcggtcatccactttgcggggctcaaggccrtgggcgagtcggtgcagaagcctctggrttattacagagttaacctgaccgggaccatccagcttctggagatcatgaaggcccacggggtgaagaacctggtgttcagcagctcagccactgtgtacgggaacccccagtacctgccccttgatgaggcccaccccacgggtggttgtaccaacccttacggcaagtccaagttcttcatcgaggaaatgatccgggacctgtgccaggcagacaagacttggaacgcagtgctgcygcgctatttcaaccccacaggtgcccatgcctctggctgcattggtgaggatccccagggcatacccaacaacctcatgccttatgtctcccagktggcgatcgggcgacgkgaggccctgaatgtctttgscaatgactatkacacagaggatgscacaggtgtccgggattacatccatgtcgtggatctggccaagggccacattgcagccttaaggaagctgaaagaacagtgtggctgccggatctacaacctgggcacgggcacaggctattcaggttgttgggtatgccttgaggatcctcaccaaggcctcagaggcatggatcccgtacaaggtggtkgcmcggcgggaaggtgatgtggcagcctgttacgccaacccmagchtggcccaagaggagctkgggtggacagcagccttagggctggacaggatgtgtkaggatctctggcgctggcagaagcagaatccttcaggctttggcacgcaagcctgaggaccctcccctaccaaggaccaggaaaagcagcagctgcctgctctccagcctctggcaggaactcagggccctggagctgctggggccaagccaaggcctcccctacctcaaaccccagctgggcccgcttagcccaccaggcatgaggccaagggctccactgaccaggaggcckaggtctytaactcttatcttccacagggtccaagagttcatcaggacccccaagagtgagtgagggggcaaggctytggcacaaaacctcctcctcccaggcactcatttatattgctctgaaagagctttccaaagtatttaaaaataaaaacaagttttcttacactggg

SEQ ID NO: 6255 - DNA, 1477 bp, Homo sapiens
gactctccagtcctcagtcaccttggacaaagaagtgtggatcctcagattccatcttttccaactccaaggtgccatggcagagaaggtgctggtaacaggtggggctggctacattggcagccacacggtgctggagctgctggaggctggctacttgcctgtggtcatcgatarcttccataatgccttccgtggagggggctccctgcctgagagcctgcggcgggtccaggagctgacaggccgctctgtggagtttgaggagatggacattttggaccagggagccctacagcgtctcttcaaaaagtacagctttatggcggtcatccactttgcggggctcaaggccrtgggcgagtcggtgcagaagcctctggrttattacagagttaacctgaccgggaccatccagcttctggagatcatgaaggcccacggggtgaagaacctggtgttcagcagctcagccactgtgtacgggaacccccagtacctgccccttgatgaggcccaccccacgggtggttgtaccaacccttacggcaagtccaagttcttcatcgaggaaatgatccgggacctgtgccaggcagacaagacttggaacgcagtgctgcygcgctatttcaaccccacaggtgcccatgcctctggctgcattggtgaggatccccagggcatacccaacaacctcatgccttatgtctcccagktggcgatcgggcgacgkgaggccctgaatgtctttgscaatgactatkacacagaggatgscacaggtgtccgggattacatccatgtcgtggatctggccaagggccacattgcagccttaaggaagctgaaagaacagtgtggctgccggatctacaacctgggcacgggcacaggctattcaggttgttgggtatgccttgaggatcctcaccaaggcctcagaggcatggatcccgtacaaggtggtkgcmcggcgggaaggtgatgtggcagcctgttacgccaacccmagchtggcccaagaggagctkgggtggacagcagccttagggctggacaggatgtgtkaggatctctggcgctggcagaagcagaatccttcaggctttggcacgcaagcctgaggaccctcccctaccaaggaccaggaaaagcagcagctgcctgctctccagcctctggcaggaactcagggccctggagctgctggggccaagccaaggcctcccctacctcaaaccccagctgggcccgcttagcccaccaggcatgaggccaagggctccactgaccaggaggcckaggtctytaactcttatcttccacagggtccaagagttcatcaggacccccaagagtgagtgagggggcaaggctytggcacaaaacctcctcctcccaggcactcatttatattgctctgaaagagctttccaaagtatttaaaaataaaaacaagttttcttacactggg

SEQ ID NO: 6256 - DNA, 1803 bp, Homo sapiens
ggttcgggagacggaatgaagggccgggtgggctcgcgaggggccggggagtccgcggggagcgagggagtttccgaggggcgggtcgtgttcctggcagcgtccctccagggcaggcccgccccctttgtcccagttccccgctgcccgggctggggcggccggggttcattcattgccggcctgaggactcctagctcggccccgctccgcgctacagcccaaagcccagcctgagacccagccgccctcgtatgcccacggcctagctccccttccctccaacagacagactgggaaaaccgagtgggcgacggctgagcaaggactctccagtcctcagtcaccttggacaaagaagtgtggatcctcagattccatcttttccaactccaaggtgccatggcagagaaggtgctggtaacaggtggggctggctacattggcagccacacggtgctggagctgctggaggctggctacttgcctgtggtcatcgatarcttccataatgccttccgtggagggggctccctgcctgagagcctgcggcgggtccaggagctgacaggccgctctgtggagtttgaggagatggacattttggaccagggagccctacagcgtctcttcaaaaagtacagctttatggcggtcatccactttgcggggctcaaggccrtgggcgagtcggtgcagaagcctctggrttattacagagttaacctgaccgggaccatccagcttctggagatcatgaaggcccacggggtgaagaacctggtgttcagcagctcagccactgtgtacgggaacccccagtacctgccccttgatgaggcccaccccacgggtggttgtaccaacccttacggcaagtccaagttcttcatcgaggaaatgatccgggacctgtgccaggcagacaagacttggaacgcagtgctgcygcgctatttcaaccccacaggtgcccatgcctctggctgcattggtgaggatccccagggcatacccaacaacctcatgccttatgtctcccagktggcgatcgggcgacgkgaggccctgaatgtctttgscaatgactatkacacagaggatgscacaggtgtccgggattacatccatgtcgtggatctggccaagggccacattgcagccttaaggaagctgaaagaacagtgtggctgccggatctacaacctgggcacgggcacaggctattcaggttgttgggtatgccttgaggatcctcaccaaggcctcagaggcatggatcccgtacaaggtggtkgcmcggcgggaaggtgatgtggcagcctgttacgccaacccmagchtggcccaagaggagctkgggtggacagcagccttagggctggacaggatgtgtkaggatctctggcgctggcagaagcagaatccttcaggctttggcacgcaagcctgaggaccctcccctaccaaggaccaggaaaagcagcagctgcctgctctccagcctctggcaggaactcagggccctggagctgctggggccaagccaaggcctcccctacctcaaaccccagctgggcccgcttagcccaccaggcatgaggccaagggctccactgaccaggaggcckaggtctytaactcttatcttccacagggtccaagagttcatcaggacccccaagagtgagtgagggggcaaggctytggcacaaaacctcctcctcccaggcactcatttatattgctctgaaagagctttccaaagtatttaaaaataaaaacaagttttcttacactggg

SEQ ID NO: 6257 - DNA, 1678 bp, Homo sapiens
ggttcgggagacggaatgaagggccgggtgggctcgcgaggggccggggagtccgcggggagcgagggagtttccgaggggcgggtcgtgttcctggcagcgtccctccagggcaggcccgccccctttgtcccagttccccgctgcccgggctggggcggccggggttcattcattgccggcctgaggactcctagctcggccccgctccgcgctacagcccaaagcccagcctgagacccagccgccctcgtatgcccacggcctagctccccttccctccaacagacagactgggaaaaccgagtgggcgacggctgagcaaggactctccagtcctcagtcaccttggacaaagaagtgtggatcctcagattccatcttttccaactccaaggcaaggggctccctgcctgagagcctgcggcgggtccaggagctgacaggccgctctgtggagtttgaggagatggacattttggaccagggagccctacagcgtctcttcaaaaagtacagctttatggcggtcatccactttgcggggctcaaggccrtgggcgagtcggtgcagaagcctctggrttattacagagttaacctgaccgggaccatccagcttctggagatcatgaaggcccacggggtgaagaacctggtgttcagcagctcagccactgtgtacgggaacccccagtacctgccccttgatgaggcccaccccacgggtggttgtaccaacccttacggcaagtccaagttcttcatcgaggaaatgatccgggacctgtgccaggcagacaagacttggaacgcagtgctgcygcgctatttcaaccccacaggtgcccatgcctctggctgcattggtgaggatccccagggcatacccaacaacctcatgccttatgtctcccagktggcgatcgggcgacgkgaggccctgaatgtctttgscaatgactatkacacagaggatgscacaggtgtccgggattacatccatgtcgtggatctggccaagggccacattgcagccttaaggaagctgaaagaacagtgtggctgccggatctacaacctgggcacgggcacaggctattcaggttgttgggtatgccttgaggatcctcaccaaggcctcagaggcatggatcccgtacaaggtggtkgcmcggcgggaaggtgatgtggcagcctgttacgccaacccmagchtggcccaagaggagctkgggtggacagcagccttagggctggacaggatgtgtkaggatctctggcgctggcagaagcagaatccttcaggctttggcacgcaagcctgaggaccctcccctaccaaggaccaggaaaagcagcagctgcctgctctccagcctctggcaggaactcagggccctggagctgctggggccaagccaaggcctcccctacctcaaaccccagctgggcccgcttagcccaccaggcatgaggccaagggctccactgaccaggaggcckaggtctytaactcttatcttccacagggtccaagagttcatcaggacccccaagagtgagtgagggggcaaggctytggcacaaaacctcctcctcccaggcactcatttatattgctctgaaagagctttccaaagtatttaaaaataaaaacaagttttcttacactggg

SEQ ID NO: 6258 - DNA, 1436 bp, Homo sapiens
ggccgtcagcacttaaagggcccgcggctcgggcgtaggaggcggtgcctctgcagcaagcgtggggcgcgggaacccgagcaggactctccagtcctcagtcaccttggacaaagaagtgtggatcctcagattccatcttttccaactccaaggcaaggggctccctgcctgagagcctgcggcgggtccaggagctgacaggccgctctgtggagtttgaggagatggacattttggaccagggagccctacagcgtctcttcaaaaagtacagctttatggcggtcatccactttgcggggctcaaggccrtgggcgagtcggtgcagaagcctctggrttattacagagttaacctgaccgggaccatccagcttctggagatcatgaaggcccacggggtgaagaacctggtgttcagcagctcagccactgtgtacgggaacccccagtacctgccccttgatgaggcccaccccacgggtggttgtaccaacccttacggcaagtccaagttcttcatcgaggaaatgatccgggacctgtgccaggcagacaagacttggaacgcagtgctgcygcgctatttcaaccccacaggtgcccatgcctctggctgcattggtgaggatccccagggcatacccaacaacctcatgccttatgtctcccagktggcgatcgggcgacgkgaggccctgaatgtctttgscaatgactatkacacagaggatgscacaggtgtccgggattacatccatgtcgtggatctggccaagggccacattgcagccttaaggaagctgaaagaacagtgtggctgccggatctacaacctgggcacgggcacaggctattcaggttgttgggtatgccttgaggatcctcaccaaggcctcagaggcatggatcccgtacaaggtggtkgcmcggcgggaaggtgatgtggcagcctgttacgccaacccmagchtggcccaagaggagctkgggtggacagcagccttagggctggacaggatgtgtkaggatctctggcgctggcagaagcagaatccttcaggctttggcacgcaagcctgaggaccctcccctaccaaggaccaggaaaagcagcagctgcctgctctccagcctctggcaggaactcagggccctggagctgctggggccaagccaaggcctcccctacctcaaaccccagctgggcccgcttagcccaccaggcatgaggccaagggctccactgaccaggaggcckaggtctytaactcttatcttccacagggtccaagagttcatcaggacccccaagagtgagtgagggggcaaggctytggcacaaaacctcctcctcccaggcactcatttatattgctctgaaagagctttccaaagtatttaaaaataaaaacaagttttcttacactggg

SEQ ID NO: 6259 - DNA, 1736 bp, Homo sapiens
cgcggctcgggcgtaggaggcggtgcctctgcagcaagcgtggggcgcgggaacccgagcagtatctgtatctgtaaagtgccagtgataacacctgtctcaccgagatgctgggggaattcaggaaaatcatgcaaaagtgcctggtayggagcctggcacgcagagggctcttggtcaagtgggttggagctgcgtgagcccagaaggggatagaggcagcgtggaggaaggcggcagcgggcccggtcgctgggaatgaaaggcctcagtgtctggggcttcctccccgtactacccgcagagtttgttcagggtggaggactctccagtcctcagtcaccttggacaaagaagtgtggatcctcagattccatcttttccaactccaaggtgccatggcagagaaggtgctggtaacaggtggggctggctacattggcagccacacggtgctggagctgctggaggctggctacttgcctgtggtcatcgatarcttccataatgccttccgtggagggggctccctgcctgagagcctgcggcgggtccaggagctgacaggccgctctgtggagtttgaggagatggacattttggaccagggagccctacagcgtctcttcaaaaagtacagctttatggcggtcatccactttgcggggctcaaggccrtgggcgagtcggtgcagaagcctctggrttattacagagttaacctgaccgggaccatccagcttctggagatcatgaaggcccacggggtgaagaacctggtgttcagcagctcagccactgtgtacgggaacccccagtacctgccccttgatgaggcccaccccacgggtggttgtaccaacccttacggcaagtccaagttcttcatcgaggaaatgatccgggacctgtgccaggcagacaagacttggaacgcagtgctgcygcgctatttcaaccccacaggtgcccatgcctctggctgcattggtgaggatccccagggcatacccaacaacctcatgccttatgtctcccagktggcgatcgggcgacgkgaggccctgaatgtctttgscaatgactatkacacagaggatgscacaggtgtccgggattacatccatgtcgtggatctggccaagggccacattgcagccttaaggaagctgaaagaacagtgtggctgccggatctacaacctgggcacgggcacaggctattcagctaagctccaactacctcctgtcttgcagatcccgtacaaggtggtkgcmcggcgggaaggtgatgtggcagcctgttacgccaacccmagchtggcccaagaggagctkgggtggacagcagccttagggctggacaggatgtgtkaggatctctggcgctggcagaagcagaatccttcaggctttggcacgcaagcctgaggaccctcccctaccaaggaccaggaaaagcagcagctgcctgctctccagcctctggcaggaactcagggccctggagctgctggggccaagccaaggccgcatgaggccaagggctccactgaccaggaggcckaggtctytaactcttatcttccacagggtccaagagttcatcaggacccccaagagtgagtgagggggcaaggctytggcacaaaacctcctcctcccaggcactcatttatattgctctgaaagagctttccaaagtatttaaaaataaaaacaagttttcttacactg

SEQ ID NO: 6260 - DNA, 1799 bp, Homo sapiens
cgcggctcgggcgtaggaggcggtgcctctgcagcaagcgtggggcgcgggaacccgagcagtatctgtatctgtaaagtgccagtgataacacctgtctcaccgagatgctgggggaattcaggaaaatcatgcaaaagtgcctggtayggagcctggcacgcagagggctcttggtcaagtgggttggagctgcgtgagcccagaaggggatagaggcagcgtggaggaaggcggcagcgggcccggtcgctgggaatgaaaggcctcagtgtctggggcttcctccccgtactacccgcagagtttgttcagggtggaggactctccagtcctcagtcaccttggacaaagaagtgtggatcctcagattccatcttttccaactccaaggtgccatggcagagaaggtgctggtaacaggtggggctggctacattggcagccacacggtgctggagctgctggaggctggctacttgcctgtggtcatcgatarcttccataatgccttccgtggagggggctccctgcctgagagcctgcggcgggtccaggagctgacaggccgctctgtggagtttgaggagatggacattttggaccagggagccctacagcgtctcttcaaaaagtacagctttatggcggtcatccactttgcggggctcaaggccrtgggcgagtcggtgcagaagcctctggrttattacagagttaacctgaccgggaccatccagcttctggagatcatgaaggcccacggggtgaagaacctggtgttcagcagctcagccactgtgtacgggaacccccagtacctgccccttgatgaggcccaccccacgggtggttgtaccaacccttacggcaagtccaagttcttcatcgaggaaatgatccgggacctgtgccaggcagacaagacttggaacgcagtgctgcygcgctatttcaaccccacaggtgcccatgcctctggctgcattggtgaggatccccagggcatacccaacaacctcatgccttatgtctcccagktggcgatcgggcgacgkgaggccctgaatgtctttgscaatgactatkacacagaggatgscacaggtgtccgggattacatccatgtcgtggatctggccaagggccacattgcagccttaaggaagctgaaagaacagtgtggctgccggatctacaacctgggcacgggcacaggctattcaggttgttgggtatgccttgaggatcctcaccaaggcctcagaggcatggatcccgtacaaggtggtkgcmcggcgggaaggtgatgtggcagcctgttacgccaacccmagchtggcccaagaggagctkgggtggacagcagccttagggctggacaggatgtgtkaggatctctggcgctggcagaagcagaatccttcaggctttggcacgcaagcctgaggaccctcccctaccaaggaccaggaaaagcagcagctgcctgctctccagcctctggcaggaactcagggccctggagctgctggggccaagccaaggcctcccctacctcaaaccccagctgggcccgcttagcccaccaggcatgaggccaagggctccactgaccaggaggcckaggtctytaactcttatcttccacagggtccaagagttcatcaggacccccaagagtgagtgagggggcaaggctytggcacaaaacctcctcctcccaggcactcatttatattgctctgaaagagctttccaaagtatttaaaaataaaaacaagttttcttacactggg

SEQ ID NO: 6261 - DNA, 1573 bp, Homo sapiens
cggaggcattggacaagcctgggtctgagcagacagaacccyttcctgcgaccctggagtcccaatcgtgctgccattttccttctgcccaggactctccagtcctcagtcaccttggacaaagaagtgtggatcctcagattccatcttttccaactccaaggcaagtgccatggcagagaaggtgctggtaacaggtggggctggctacattggcagccacacggtgctggagctgctggaggctggctacttgcctgtggtcatcgatarcttccataatgccttccgtggagggggctccctgcctgagagcctgcggcgggtccaggagctgacaggccgctctgtggagtttgaggagatggacattttggaccagggagccctacagcgtctcttcaaaaagtacagctttatggcggtcatccactttgcggggctcaaggccrtgggcgagtcggtgcagaagcctctggrttattacagagttaacctgaccgggaccatccagcttctggagatcatgaaggcccacggggtgaagaacctggtgttcagcagctcagccactgtgtacgggaacccccagtacctgccccttgatgaggcccaccccacgggtggttgtaccaacccttacggcaagtccaagttcttcatcgaggaaatgatccgggacctgtgccaggcagacaagacttggaacgcagtgctgcygcgctatttcaaccccacaggtgcccatgcctctggctgcattggtgaggatccccagggcatacccaacaacctcatgccttatgtctcccagktggcgatcgggcgacgkgaggccctgaatgtctttgscaatgactatkacacagaggatgscacaggtgtccgggattacatccatgtcgtggatctggccaagggccacattgcagccttaaggaagctgaaagaacagtgtggctgccggatctacaacctgggcacgggcacaggctattcaggttgttgggtatgccttgaggatcctcaccaaggcctcagaggcatggatcccgtacaaggtggtkgcmcggcgggaaggtgatgtggcagcctgttacgccaacccmagchtggcccaagaggagctkgggtggacagcagccttagggctggacaggatgtgtkaggatctctggcgctggcagaagcagaatccttcaggctttggcacgcaagcctgaggaccctcccctaccaaggaccaggaaaagcagcagctgcctgctctccagcctctggcaggaactcagggccctggagctgctggggccaagccaaggcctcccctacctcaaaccccagctgggcccgcttagcccaccaggcatgaggccaagggctccactgaccaggaggcckaggtctytaactcttatcttccacagggtccaagagttcatcaggacccccaagagtgagtgagggggcaaggctytggcacaaaacctcctcctcccaggcactcatttatattgctctgaaagagctttccaaagtatttaaaaataaaaacaagttttcttacactggg

SEQ ID NO: 6262 - DNA, 1611 bp, Homo sapiens
attagtcactgcgcccaggagccagtttacacctagcgaaggcggaggcattggacaagcctgggtctgagcagacagaacccyttcctgcgaccctggagtcccaatcgtgctgccattttccttctgcccaggactctccagtcctcagtcaccttggacaaagaagtgtggatcctcagattccatcttttccaactccaaggtgccatggcagagaaggtgctggtaacaggtggggctggctacattggcagccacacggtgctggagctgctggaggctggctacttgcctgtggtcatcgatarcttccataatgccttccgtggagggggctccctgcctgagagcctgcggcgggtccaggagctgacaggccgctctgtggagtttgaggagatggacattttggaccagggagccctacagcgtctcttcaaaaagtacagctttatggcggtcatccactttgcggggctcaaggccrtgggcgagtcggtgcagaagcctctggrttattacagagttaacctgaccgggaccatccagcttctggagatcatgaaggcccacggggtgaagaacctggtgttcagcagctcagccactgtgtacgggaacccccagtacctgccccttgatgaggcccaccccacgggtggttgtaccaacccttacggcaagtccaagttcttcatcgaggaaatgatccgggacctgtgccaggcagacaagacttggaacgcagtgctgcygcgctatttcaaccccacaggtgcccatgcctctggctgcattggtgaggatccccagggcatacccaacaacctcatgccttatgtctcccagktggcgatcgggcgacgkgaggccctgaatgtctttgscaatgactatkacacagaggatgscacaggtgtccgggattacatccatgtcgtggatctggccaagggccacattgcagccttaaggaagctgaaagaacagtgtggctgccggatctacaacctgggcacgggcacaggctattcaggttgttgggtatgccttgaggatcctcaccaaggcctcagaggcatggatcccgtacaaggtggtkgcmcggcgggaaggtgatgtggcagcctgttacgccaacccmagchtggcccaagaggagctkgggtggacagcagccttagggctggacaggatgtgtkaggatctctggcgctggcagaagcagaatccttcaggctttggcacgcaagcctgaggaccctcccctaccaaggaccaggaaaagcagcagctgcctgctctccagcctctggcaggaactcagggccctggagctgctggggccaagccaaggcctcccctacctcaaaccccagctgggcccgcttagcccaccaggcatgaggccaagggctccactgaccaggaggcckaggtctytaactcttatcttccacagggtccaagagttcatcaggacccccaagagtgagtgagggggcaaggctytggcacaaaacctcctcctcccaggcactcatttatattgctctgaaagagctttccaaagtatttaaaaataaaaacaagttttcttacactggg

SEQ ID NO: 6263 - DNA, 1565 bp, Homo sapiens
ggccgtcagcacttaaagggcccgcggctcgggcgtaggaggcggtgcctctgcagcaagcgtggggcgcgggaacccgagcaggactctccagtcctcagtcaccttggacaaagaagtgtggatcctcagattccatcttttccaactccaaggcaagtgccatggcagagaaggtgctggtaacaggtggggctggctacattggcagccacacggtgctggagctgctggaggctggctacttgcctgtggtcatcgatarcttccataatgccttccgtggagggggctccctgcctgagagcctgcggcgggtccaggagctgacaggccgctctgtggagtttgaggagatggacattttggaccagggagccctacagcgtctcttcaaaaagtacagctttatggcggtcatccactttgcggggctcaaggccrtgggcgagtcggtgcagaagcctctggrttattacagagttaacctgaccgggaccatccagcttctggagatcatgaaggcccacggggtgaagaacctggtgttcagcagctcagccactgtgtacgggaacccccagtacctgccccttgatgaggcccaccccacgggtggttgtaccaacccttacggcaagtccaagttcttcatcgaggaaatgatccgggacctgtgccaggcagacaagacttggaacgcagtgctgcygcgctatttcaaccccacaggtgcccatgcctctggctgcattggtgaggatccccagggcatacccaacaacctcatgccttatgtctcccagktggcgatcgggcgacgkgaggccctgaatgtctttgscaatgactatkacacagaggatgscacaggtgtccgggattacatccatgtcgtggatctggccaagggccacattgcagccttaaggaagctgaaagaacagtgtggctgccggatctacaacctgggcacgggcacaggctattcaggttgttgggtatgccttgaggatcctcaccaaggcctcagaggcatggatcccgtacaaggtggtkgcmcggcgggaaggtgatgtggcagcctgttacgccaacccmagchtggcccaagaggagctkgggtggacagcagccttagggctggacaggatgtgtkaggatctctggcgctggcagaagcagaatccttcaggctttggcacgcaagcctgaggaccctcccctaccaaggaccaggaaaagcagcagctgcctgctctccagcctctggcaggaactcagggccctggagctgctggggccaagccaaggcctcccctacctcaaaccccagctgggcccgcttagcccaccaggcatgaggccaagggctccactgaccaggaggcckaggtctytaactcttatcttccacagggtccaagagttcatcaggacccccaagagtgagtgagggggcaaggctytggcacaaaacctcctcctcccaggcactcatttatattgctctgaaagagctttccaaagtatttaaaaataaaaacaagttttcttacactggg

SEQ ID NO: 6264 - DNA, 1807 bp, Homo sapiens
ggttcgggagacggaatgaagggccgggtgggctcgcgaggggccggggagtccgcggggagcgagggagtttccgaggggcgggtcgtgttcctggcagcgtccctccagggcaggcccgccccctttgtcccagttccccgctgcccgggctggggcggccggggttcattcattgccggcctgaggactcctagctcggccccgctccgcgctacagcccaaagcccagcctgagacccagccgccctcgtatgcccacggcctagctccccttccctccaacagacagactgggaaaaccgagtgggcgacggctgagcaaggactctccagtcctcagtcaccttggacaaagaagtgtggatcctcagattccatcttttccaactccaaggcaagtgccatggcagagaaggtgctggtaacaggtggggctggctacattggcagccacacggtgctggagctgctggaggctggctacttgcctgtggtcatcgatarcttccataatgccttccgtggagggggctccctgcctgagagcctgcggcgggtccaggagctgacaggccgctctgtggagtttgaggagatggacattttggaccagggagccctacagcgtctcttcaaaaagtacagctttatggcggtcatccactttgcggggctcaaggccrtgggcgagtcggtgcagaagcctctggrttattacagagttaacctgaccgggaccatccagcttctggagatcatgaaggcccacggggtgaagaacctggtgttcagcagctcagccactgtgtacgggaacccccagtacctgccccttgatgaggcccaccccacgggtggttgtaccaacccttacggcaagtccaagttcttcatcgaggaaatgatccgggacctgtgccaggcagacaagacttggaacgcagtgctgcygcgctatttcaaccccacaggtgcccatgcctctggctgcattggtgaggatccccagggcatacccaacaacctcatgccttatgtctcccagktggcgatcgggcgacgkgaggccctgaatgtctttgscaatgactatkacacagaggatgscacaggtgtccgggattacatccatgtcgtggatctggccaagggccacattgcagccttaaggaagctgaaagaacagtgtggctgccggatctacaacctgggcacgggcacaggctattcaggttgttgggtatgccttgaggatcctcaccaaggcctcagaggcatggatcccgtacaaggtggtkgcmcggcgggaaggtgatgtggcagcctgttacgccaacccmagchtggcccaagaggagctkgggtggacagcagccttagggctggacaggatgtgtkaggatctctggcgctggcagaagcagaatccttcaggctttggcacgcaagcctgaggaccctcccctaccaaggaccaggaaaagcagcagctgcctgctctccagcctctggcaggaactcagggccctggagctgctggggccaagccaaggcctcccctacctcaaaccccagctgggcccgcttagcccaccaggcatgaggccaagggctccactgaccaggaggcckaggtctytaactcttatcttccacagggtccaagagttcatcaggacccccaagagtgagtgagggggcaaggctytggcacaaaacctcctcctcccaggcactcatttatattgctctgaaagagctttccaaagtatttaaaaataaaaacaagttttcttacactggg

SEQ ID NO: 6265 - DNA, 671 bp, Homo sapiens
cgttctgctggtcagcggcctgctggcgtgccagtgcctgctgatgtgctcctctggacgtccagccgcctgtgtgttcctccactgatgtgctcctctccatgtccggctacctgtcagcacctcatctatgggcactttaccaaagcgggtgaaaattgtggaagttggtccccrasrkggactacaaaatgaaaagaatatcgtatctactccagtgaaaatcaagctgatagacatgctttctgaagcaggactctctsttatagaaaccaccagctttgtgtctcctaagtgggttccccagatgggtgaccacactgaagtcttgaagggcattcagaagtttcctggcatcaactacccagtcctgaccccaaatttgaaaggcttcgaggcagcggttgctgctggagccaaggaagtagtcatctttggagctgcctcrgagctctccaccctgccatggccgtggggcccttgctctctgacttctcaggacacaggtcatggaggttcttcccaagctggcagaggccatttgtggaaagtggaragctacgtggtggccrtctgccaactccagcatctyyggaaaatctccacgctgaatgtgatttttgaaaacagcttatgtaattaaaggttgaatggcacatcataattccagc

SEQ ID NO: 6266 - DNA, 1592 bp, Homo sapiens
tggactgccgcgggggattctgggccaagatggcagcaatgaggaaggcgcttccgcggcgactggtgggcttggcgtccctccgggctgtcagcacctcatctatgggcactttaccaaagcgggtgaaaattgtggaagttggtccccrasrkggactacaaaatgaaaagaatatcgtatctactccagtgaaaatcaagctgatagacatgctttctgaagcaggactctctsttatagaaaccaccagctttgtgtctcctaagtgggttccccagatgggtgaccacactgaagtcttgaagggcattcagaagtttcctggcatcaactacccagtcctgaccccaaatttgaaaggcttcgaggcagcggttgctgctggagccaaggaagtagtcatctttggagctgcctcrgagctcttcaccaagaagaacatcaattgttccatagaggagagttttcagaggtttgacgcaatcctgaaggcagcgcagtcagccaatatttctgtgcgggggtacgtctcctgtgctcttggctgcccttatgaagggaagatctccccagcwaaagtagctgaggtcaccaagaagttctactcaatgggctgctacgagatctccctgggggacaccattggtgtgggcaccccagggatcatgaaagacatgctrtctgctgtcatgcaggaagtgcctctggctgccctggctgtccactgccatgacacctatggtcaagccctggccaacaccttgatggccctgcagatgggagtgagtgtcgtggactcttctgtggcaggacttggaggctgtccctacgcacagggggcatcaggaaacttggccacaraagacctggtctacatgctagagggcttgggcattcacacgggtgtgaatctccagaagcttctggaagctggaaactttatctgtyaagccctgaacagaaaaactagctccaaagtggctcaggctacctgtaaactctgagccccttgcccacctgaagccctggggatgatgtggaaataggggcacacacagatgattcatggatggggacatggaaatgagaataggttaaatggtgcaggtacctcatagccagctctacacagaggtctctcctggcagaaagcaggcgaagggcaggaggagctgcttggcagaaggacctcctgcccagacctgaggagtgagaggctttgagggctgaagtctccctttgttacggaccctggcccaggagttgaatgcctgaggacgtgtgggaaccccgttccctacttagcatgatccttgagtctcctctctggatggaatccgcgagctggccacctggccaccctytacacggctccaccctgccatggccgtggggcccttgctctctgacttctcaggacacaggtcatggaggttcttcccaagctggcagaggccatttgtggaaagtggaragctacgtggtggccrtctgccaactccagcatctyyggaaaatctccacgctgaatgtgatttttgaaaacagcttatgtaattaaaggttgaatggcacatcataattccagc

SEQ ID NO: 6267 - DNA, 1720 bp, Homo sapiens
tggactgccgcgggggattctgggccaagatggcagcaatgaggaaggcgcttccgcggcgactggtgggcttggcgtccctccgggctgtcagcacctcatctatgggcactttaccaaagcgggtgaaaattgtggaagttggtccccrasrkggactacaaaatgaaaagaatatcgtatctactccagtgaaaatcaagctgatagacatgctttctgaagcaggactctctsttatagaaaccaccagctttgtgtctcctaagtgggttccccagatgggtgaccacactgaagtcttgaagggcattcagaagtttcctggcatcaactacccagtcctgaccccaaatttgaaaggcttcgaggcagcggttgctgctggagccaaggaagtagtcatctttggagctgcctcrgagctcttcaccaagaagaacatcaattgttccatagaggagagttttcagaggtttgacgcaatcctgaaggcagcgcagtcagccaatatttctgtgcgggggtacgtctcctgtgctcttggctgcccttatgaagggaagatctccccagcwaaagtagctgaggtgtgtgcatgtgtcagggcggggggtttggtgagggttggccaccttgtctgcccctgagcgcataggttcctctccccaccctttctggcaggttcctgacttcattcattcacccagctccttcattaagctcctgctgtgagcacagccctgcacttgctccctagaggcccccctcctagccgaacatgtagtccttgaagcccctggcctctatccagcctgaaaacctccaattcagtttccagtctggtcgttgaggtgattctctgaggaggggctccttacccaggagttcccatagttccttgtagtgattgaaaggccacaaccctgatgtcctctgaacagtcaccaggtcaacactgagaagaacatggcatgggaattgagtttgaccagcccaagaacttatgtcatttagtcctcaaaaccactgtgcaaatttggtattattattcccttttacagttgagaaaactgacactaaataacttgccacacaggttacaaatggtgaaatcaggtatcaaaccccattttttctctctccaaagcccacttcttcccaggatactttgtggcatccagataggtggaatggtaacagtagcaactgtttcttgagagcagctgccctgctccaggtcttagcctcagttgccacaatccttgccrtatgaccaaagggtcatcaccatttttcagaagcagaaattgaagctcagaaaagtgaagttgcttgccaaggcccacagctagtgaacagcagaactaggactttaacccagcatctcgtgacttcaaaggcctgctccttcccctgcaccctgctgccccctaaaggccagccactgccgccccacactctgcagggccactggggaagcgacgtcaccatttcatttatttagcagatcactggtgtcttctggtcccctttccctgccacatccctctgcaccttgtccagcagccccgtgtgggcagcagctccttgggtgaggccatctttttttaagttcaccagtcgtatgggattaggggcccaccctattccagtatggcttattccaattggacccatattggacctattccaatatggacccattttgcagtggttt

SEQ ID NO: 6268 - DNA, 1584 bp, Homo sapiens
aattgcaccatgccaaactacaaactcacttattttaatatgagggggagagcagaaattattcgttacatatttgcttatttggacatacagtatgaagaccacagaatagaacaagctgactggcctgaaatcaaatcaactctcccatttggaaaaatccccattttggaagttgatggacttactcttcaccagagcctagcaatagcaagatatttgaccaaaaacacagatttggctggaaacacagaaatggaacaatgtcatgttgatgctrttgtggacactctggatgatttcatgtcatgttttccttgggcagagaaaaagcaagatgtgaaagagcagatgttcaatgagctgctcacgtataatgcgcctcatcttaygcaagacttggacacatatttaggggggagagaatggcttattggtaactctgtaacttgggcagacttctactgggagatttgcagtaccacacttttggtctttaagcctgacctgttagacaaccatccaaggctggtgactttacggaagaaagtccaagccattcctgccgtcgctaactggataaaacgaaggccccaaaccaaactctagctgatccatgttgccttcaagtttgtttttctcgggggcatctctctcatcagataagacagctacatcagcctgccagataatccacatgctccctccccagctccactaagattttcactttagccatattctgatttttaaaaaggaaaataaaaacaaatctttcttcagtatctttttctttcagaatagcttctcatcatttacaattacagaaaaatagtatgtaatacaggcagaccttgctttgcacaggttctaacatgcacgaattgcagtcataatggtttagcaacaccattcttcccctcccccaaaatgttttggacttcagctaccacaattacctgtaattgcataaaacacaaactttgctagtagctctccagttcacatatcgctgtgtaaataacctatgtacatcatgaccaatgaccagtcacttctatcaaagactgccagaggtcactgcacatctgttattcctgcatagatagcaaagtgtgtagttgtattgctattgcctgcttgtggcccagtgataaatccctttgacattttacaaaaatgaatcaaaagagggaactccccaacaaagatgaaagtgcagcaaaggaacaaaaactgataatcctggaatgaaattcaaactgaatataaagagttatcgagaaaagagctgactgtgggaatctgacacggctcaaaaggctctagatatgcagccagagaaacttgtaaagatgaatttactgacatgaataaagttgttgtgatgagaaaaatgtagataccccagagatcaagagaaggagaagacaagccacagacttggagaaaatacttgyaaaacatgtrtctgacaaaagactattattcaaaattatatagaactcataaaactcggctgactctcttttcggactcagcccacctgcacccaggtgaaataaacagccacgttgctcacac

SEQ ID NO: 6269 - DNA, 1647 bp, Homo sapiens
ccaaggcacagtcacatacccagggatacaagacactgcagactcccgagagacataacacagaattgcaccatgccaaactacaaactcacttattttaatatgagggggagagcagaaattattcgttacatatttgcttatttggacatacagtatgaagaccacagaatagaacaagctgactggcctgaaatcaaatcaactctcccatttggaaaaatccccattttggaagttgatggacttactcttcaccagagcctagcaatagcaagatatttgaccaaaaacacagatttggctggaaacacagaaatggaacaatgtcatgttgatgctrttgtggacactctggatgatttcatgtcatgttttccttgggcagagaaaaagcaagatgtgaaagagcagatgttcaatgagctgctcacgtataatgcgcctcatcttaygcaagacttggacacatatttaggggggagagaatggcttattggtaactctgtaacttgggcagacttctactgggagatttgcagtaccacacttttggtctttaagcctgacctgttagacaaccatccaaggctggtgactttacggaagaaagtccaagccattcctgccgtcgctaactggataaaacgaaggccccaaaccaaactctagctgatccatgttgccttcaagtttgtttttctcgggggcatctctctcatcagataagacagctacatcagcctgccagataatccacatgctccctccccagctccactaagattttcactttagccatattctgatttttaaaaaggaaaataaaaacaaatctttcttcagtatctttttctttcagaatagcttctcatcatttacaattacagaaaaatagtatgtaatacaggcagaccttgctttgcacaggttctaacatgcacgaattgcagtcataatggtttagcaacaccattcttcccctcccccaaaatgttttggacttcagctaccacaattacctgtaattgcataaaacacaaactttgctagtagctctccagttcacatatcgctgtgtaaataacctatgtacatcatgaccaatgaccagtcacttctatcaaagactgccagaggtcactgcacatctgttattcctgcatagatagcaaagtgtgtagttgtattgctattgcctgcttgtggcccagtgataaatccctttgacattttacaaaaatgaatcaaaagagggaactccccaacaaagatgaaagtgcagcaaaggaacaaaaactgataatcctggaatgaaattcaaactgaatataaagagttatcgagaaaagagctgactgtgggaatctgacacggctcaaaaggctctagatatgcagccagagaaacttgtaaagatgaatttactgacatgaataaagttgttgtgatgagaaaaatgtagataccccagagatcaagagaaggagaagacaagccacagacttggagaaaatacttgyaaaacatgtrtctgacaaaagactattattcaaaattatatagaactcataaaactcggctgactctcttttcggactcagcccacctgcacccaggtgaaataaacagccacgttgctcacac

SEQ ID NO: 6270 - DNA, 782 bp, Homo sapiens
gaggctcctctcctagaccctgcatcctgaaagctgcgtacctgagagcctgckgtctggctgcagggacacacccargggraggagctgcaatcgtgtctggggccccagcccaggctggccggagctcctgtttccgctgctctgctgcctgcccggggtaccaacatggcccagaagcgtcctgcctgcaccctgaagcctgagtgtgtccagcagctgctggtttgctcccaggaggccaagmagtcagcctactgcccctacagtcactttcctgtgggggctgccctgctcacccaggaggggagaatcttcaaagggtgcaacatagaaaatgcctgctacccrctgggcatctgtgctgaacggaccgctatccagaaggccgtctcagaagggtacaaggatttcagggcaattgctatcgccagtttggcaccaactggcccgtgtacatgaccaagccggatggtacgtatattgtcatgacggtccaggagctgctgccctcctcctttgggcctgaggacctgcagaagacycagtgacagccagagaatgcccactgcctgtaacagccacctggagaayttcataaagatgtctcacagccctggggacacctgcccagtgsgccccagcccyacagggactgggcaaagatgatgtttccagattacactccagcctgagtcagcacccctcctagcaacctgccttgggacttagaacaccgccgccccctgccccacctttcctttccttcctgtgggccctct

SEQ ID NO: 6271 - DNA, 951 bp, Homo sapiens
gaggctcctctcctagaccctgcatcctgaaagctgcgtacctgagagcctgckgtctggctgcagggacacacccargggraggagctgcaatcgtgtctggggccccagcccaggctggccggagctcctgtttccgctgctctgctgcctgcccggggtaccaacatggcccagaagcgtcctgcctgcaccctgaagcctgagtgtgtccagcagctgctggtttgctcccaggaggccaagmagtcagcctactgcccctacagtcactttcctgtgggggctgccctgctcacccaggaggggagaatcttcaaagggtgcaacatagaaaatgcctgctacccrctgggcatctgtgctgaacggaccgctatccagaaggccgtctcagaagggtacaaggatttcagggcaattgctatcgccagtgacatgcaagatgattttatctctccatgtggggcctgcaggcaagtcatgagagagtttggcaccaactggcccgtgtacatgaccaagccggatggtacgtatattgtcatgacggtccaggagctgctgccctcctcctttgggcctgaggacctgcagaagacycagtgacagccagagaatgcccactgcctgtaacagccacctggagaayttcataaagatgtctcacagccctggggacacctgcccagtgsgccccagcccyacagggactgggcaaagatgatgtttccagattacactccagcctgagtcagcacccctcctagcaacctgccttgggacttagaacaccgccgccccctgccccacctttcctttccttcctgtgggccctctttcaaagtccagcctagtctggactgcttccccatcagccttcccaaggttctatcctgttccgagcaacttttctaattataaacatcacagaacatcctggatcaaagc

SEQ ID NO: 6272 - DNA, 1555 bp, Homo sapiens
atgtctgctgcctcagcctccagggccttgcaggaactcagcccgtcagtgttgctactccaagctcaggtcttgccatgggccactctggcagcaatccaatctaccaggaaatatgggcacaaacatcacctttgctgaagacaggcaccaccactgggtgtattgtggtggtcattgatgcagtagtggatatccagtttgatgacggactaccatctattttaaatgcccagcaagtacaaggcagggagaccaggctggtttttgtggtgacccagcatttgggtgagagcacagtaaggattatgctatgaatggtacagaaggcttgtttagaggccagaaagtcctggattctggtgcaccaatcgaaagtcctgttggtcctgagactttgagcagaatcatgaacatcattggagagcctattgatgaaagcggtcccatcaaaatgaaacagtttgctcccatttatgttgaggctcctgagttcatggaaattagcgttgagcaagaaattctggtggctagtatcaaagttgtggatttcctcactccctagccaagagtggcaaaattgggctttttagtggtgttggagttgacaagattgtacccatcatggwgttaatcaataatgttgccaaagcccatggtgcttaatctgggtttgctggtgtttttgagaggacctgtaagggcaatgacttatattatgaaatgactgagtctggtgttgtcaacttaaaaaatgttacctccaaggtaatgctgatgtaaggtcagatgaatgaaccacatgctactcatgcccaggtagctctgactggactgactgtggctgaatacttcagagaccaagaagttcaagatgtactcctgtttattgataatatctttcacttcacccatgctggctcaagggtgtctgccttattgggcagaatcccttctgctgtgggctatcagcctaccctggccactgacatggtgggtatgatgtggggaaagaattgccactaccaagaggagatctatcacctctgtacaggctatgtacctgctgatgactcgactgcctctgctacttcctttgctcatttggatgccaccactgtgctgccccatgctgtcactgagctgggcatctatctacatgtggatcctctggactccatctctcacatcatggatcccaacattgttggcaatgagcataatgatgttgcccgtggggtgcaaaagattctgcatggctacaaatccctccatacgttattgtcataatccatattgggtatggattaactttctgaggaagacaagttgactgtgtcttgaatgtggataatacaacgtttcttgtctcagccattccaggctgctgaggtcatcacaggtcatatggggaagtcagtactcctgaaggagaccattaaaggatttcagcagattttgataggtgaacatgaccatctctcagaacgggccttcagtgatggaacccattgaagaaggtttggcagaagctgatacrctggctgaagagcac

SEQ ID NO: 6273 - DNA, 1771 bp, Homo sapiens
cttggggtgtggcctgcggcggggcgtcggggaaaggcggggtctcggccggcgctgacgcagccatggcggaggcggctttggaagccgtgcggagcgagttacgagaattcccggccgctgcaagggagctctgcgtgcctcttgctgtgccctacctggacaaacccccaactccgctccacttctaccgggactgggtctgccccaacaggccgtgcattatccgcaacgctctgcagcactggccrgccctccagaagtggtccctcccctatttcaggtgggagcygccctggggtcaggtgtgagcagtgattactggcatctgggcatgggctgagtgtccattcctctagagccacagtgggctccacagaggtgagtgtggccgtgaccccagatggttacgcggatgccgtgagaggggatcgcttcatgatgccagctgagcgccgcctgcccctgagcttcgtgctggatgtgctggagggccgggcccagcaccctggagtcctctatgtgcagaagcagtgctccaacctgcccagcgagctgccccagctgctgcctgatctggaatcccatgtgccctgggcctccgaagccctgggaaagatgcccgatgctgtgaacttctggctgggggaggcggctgcagtgacttcttgtaggtgtaaggggaatacaaagtgcacaaggaccactatgagaacctctactgcgtggtctcaggagagaagcatttcctgttccatccgcccagcgaccggcccttcatcccctatgagctgtacacgccggcaacctaccrgctaactgaagagggcacctttaaggtggtggatgaagaggccatggagaaggtgccctggatcccactggaccccttggcgccagacctagcacggtaccctagttacagtcaggcccaggcccttcgctgcacggtgcgggccggtgagatgctctatctgccggctctgtggttccaccacgtccagcagtcccagggctgcatcgcagtgaatttctggtatgacatggaatacgacctcaagtatagttacttccagctgctcgactccctcaccaaggcttcaggccttgactgatggagcactggtgaacaccaccaagcacgcctcgggggacggagccagcccctccctggccaggtcaattctcgagagagcctggagtgtgcatgctggctgctggccccgggtccagcatggcttgagatcagctttggaggatcttggaatgtggtcataaggactcaaggtgccaggcaggtctgggtgagggttctcaggaagttgccacacaggtgagcagagtggggatcaggtgcagcggcacctctccccagcgctgtgatgttgggcgagtcactgcgtctcgggcattggtgtcctgtcagtaaagagataataatggctgtacctcgcggggctgttgtgggcttggagatgatgtctatgaggaccagcatggagctggcacacaggacatgttgaataaaaggtagctgtgagtcgtatgtccttttttttttttttttaagatggggtctcgctctgtcacccaggctggagtgcagtggtgtgatgtcagctcactgcaagctccgcctcccaggttcacactattctgcctcagcctcccaagtagctgggactacaggtgcgtgccaccatgcccggctaatttttttgtatttttagtagagacggggtttcaccgtgttagccagtatggtcttgat

SEQ ID NO: 6274 - DNA, 3338 bp, Homo sapiens
cttggggtgtggcctgcggcggggcgtcggggaaaggcggggtctcggccggcgctgacgcagccatggcggaggcggctttggaagccgtgcggagcgagttacgagaattcccggccgctgcaagggagctctgcgtgcctcttgctgtgccctacctggacaaacccccaactccgctccacttctaccgggactgggtctgccccaacaggccgtgcattatccgcaacgctctgcagcactggccrgccctccagaagtggtccctcccctatttcagagccacagtgggctccacagaggtgagtgtggccgtgaccccagatggttacgcggatgccgtgagaggggatcgcttcatgatgccagctgagcgccgcctgcccctgagcttcgtgctggatgtgctggagggccgggcccagcaccctggagtcctctatgtgcagaagcagtgctccaacctgcccagcgagctgccccagctgctgcctgatctggaatcccatgtgccctgggcctccgaagccctggtgcacaaggaccactatgagaacctctactgcgtggtctcaggagagaagcatttcctgttccatccgcccagcgaccggcccttcatcccctatgagctgtacacgccggcaacctaccrgctaactgaagagggcacctttaaggtggtggatgaagaggccatggagaaggcagaggtgtccaggacctgcctgctcacggttcgtgtcctgcaggcccatcgcctaccctctaaggacctagtgaccccctctgactgctacgtgactctctggctgcccacggcctgcagccacaggctccagacacgcacggtcaagaacagcagtagccctgtctggaaccagagctttcacttcaggatccacaggcagctcaagaatgtcatggaactgaaagtctttgaccaggacctggtgaccggagatgaccctgtgttgtcagtactgtttgatgcggggactctgcgggctggggagttccggcgcgagagcttctcactgagccctcargcaaggcgggtgaggggcgcctggaagttgaatttcgcctgcagagtctggctgaccgtggcgagtggctcgtcagcaatggcgttctggtggcccgggagctctcctgcttgcacgttcaactggaggagacaggagaccagaagtcctcagagcacagagttcagcttgtggttcctgggtcctgtgagggtccgcaggaggcctctgtgggcactggcaccttcygcttccactgcccagcctgctgggagcaggagctgagtattcgcctgcaggatgccccygaggagcaactaaaggcgccactgagtgccctgccctctggtcaagtggtgaggcttgtcttccccacgtcccaggagcccctgatragagtggagctgaaaaaagaagcaggactgagggagctggccgtgcgactgggcttcgggccctgtgcagaggagcaggccttcctgagcaggaggaagcaggtggtggccgcggccttgaggcaggccctgcagctggayggagacctgcaggaggatgagatcccagtggtagctattatggccactggtggtgggatccgggcaatgacttccctgtatgggcagctggctggcctgaaggagctgggcctcttggattgcrtctcctacatcaccggggcctcgggctccacctgggccttggccaacctttatgaggacccagagtggtctcagaaggacctggcagggcccactgagttgctgaagacccaggtgaccaagaacaagctgggtgtgctggcccccagccagctgcagcggtaccggcaggagctggccgagcgtgcccrcttgggctacccaagctgcttcaccaacctgtgggccctcatcaacgaggcgytgctgcatgatgagccccatgatcacaagctctcagatcaacgggaggccctgagtcatggccagaaccctctgcccatctactgtgccctcaacaccaaagggcagagcctgaccacttttgaatttggggagtggtgcgagttctctccctacgaggtcggcttccccaagtacggggccttcatcccctctgagctctttggstccgagttctttatggggcagctgatgaagaggcttcctgagtcccgcatctgcttcttagaaggtatctggagcaacctgtatgcagccaacctccaggacagcttatactgggcctcagagcccagccagttctgggaccgctgggtcaggaaccaggccaacctggacaaggagcaggtcccccttctgaagatagaagaaccaccctcaacagccggcagratagctgagtttttcaccgatcttctgacgtggcgtccactggcccaggccacacataatttcctgcgtggcctccatttccacaaagactactttcagcatcctcacttctccaymtggaaagctaccactctggatgggctccccaaccagctgacaccctcggagccccacctgtgcctgctggatgttggctacctcatcaataccagctgcctgcccctcctgcagcccactcgggacgtggacctcatcctgtcattggactacaacctccacggagccttccagcagttgcagctcctgggccggttctgccaggagcaggggatcccgttcccacccatctcgcccagccccgaagagcagctccagcctcgggagtgccacaccttctcygaccccacctgccccggagcccctgcggtgctgcactttcctctggtcagcgactccttccgggagtactcggcccctggggtccggcggacacccgaggaggcggcrgctggggaggtgaacctgtcttcatcggactctccctaccactacacgaaggtgacctacagccaggaggacgtggacaagctgctgcacctgacacattacaatgtctgcaacaaccaggagcagctgctggaggctctgcgccaggcagtgcagcggaggcggcagcgcaggccccactgatggccggggcccctgccacccctaactctcattcattccctggctgctgagttgcaggtgggaactgtcatcacgcagtgcttcagagcctcgggctcaggtggcackgtcccagggtccaggctgagggctgggagctcccttgcgcctcagcagtttgcagtggggtaaggaggccaagcccatttgtgtaatcacccaaaaccccccggcctgtgcctgttttcccttctgcgctaccttgagtagttggagcacttgatacatcacagactcatacaaa

SEQ ID NO: 6275 - DNA, 3387 bp, Homo sapiens
cttggggtgtggcctgcggcggggcgtcggggaaaggcggggtctcggccggcgctgacgcagccatggcggaggcggctttggaagccgtgcggagcgagttacgagaattcccggccgctgcaagggagctctgcgtgcctcttgctgtgccctacctggacaaacccccaactccgctccacttctaccgggactgggtctgccccaacaggccgtgcattatccgcaacgctctgcagcactggccrgccctccagaagtggtccctcccctatttcagagccacagtgggctccacagaggtgagtgtggccgtgaccccagatggttacgcggatgccgtgagaggggatcgcttcatgatgccagctgagcgccgcctgcccctgagcttcgtgctggatgtgctggagggccgggcccagcaccctggagtcctctatgtgcagaagcagtgctccaacctgcccagcgagctgccccagctgctgcctgatctggaatcccatgtgccctgggcctccgaagccctgggaaagatgcccgatgctgtgaacttctggctgggggaggcggctgcagtgacttctttgcacaaggaccactatgagaacctctactgcgtggtctcaggagagaagcatttcctgttccatccgcccagcgaccggcccttcatcccctatgagctgtacacgccggcaacctaccrgctaactgaagagggcacctttaaggtggtggatgaagaggccatggagaaggcagaggtgtccaggacctgcctgctcacggttcgtgtcctgcaggcccatcgcctaccctctaaggacctagtgaccccctctgactgctacgtgactctctggctgcccacggcctgcagccacaggctccagacacgcacggtcaagaacagcagtagccctgtctggaaccagagctttcacttcaggatccacaggcagctcaagaatgtcatggaactgaaagtctttgaccaggacctggtgaccggagatgaccctgtgttgtcagtactgtttgatgcggggactctgcgggctggggagttccggcgcgagagcttctcactgagccctcarggtgaggggcgcctggaagttgaatttcgcctgcagagtctggctgaccgtggcgagtggctcgtcagcaatggcgttctggtggcccgggagctctcctgcttgcacgttcaactggaggagacaggagaccagaagtcctcagagcacagagttcagcttgtggttcctgggtcctgtgagggtccgcaggaggcctctgtgggcactggcaccttcygcttccactgcccagcctgctgggagcaggagctgagtattcgcctgcaggatgccccygaggagcaactaaaggcgccactgagtgccctgccctctggtcaagtggtgaggcttgtcttccccacgtcccaggagcccctgatragagtggagctgaaaaaagaagcaggactgagggagctggccgtgcgactgggcttcgggccctgtgcagaggagcaggccttcctgagcaggaggaagcaggtggtggccgcggccttgaggcaggccctgcagctggayggagacctgcaggaggatgagatcccagtggtagctattatggccactggtggtgggatccgggcaatgacttccctgtatgggcagctggctggcctgaaggagctgggcctcttggattgcrtctcctacatcaccggggcctcgggctccacctgggccttggccaacctttatgaggacccagagtggtctcagaaggacctggcagggcccactgagttgctgaagacccaggtgaccaagaacaagctgggtgtgctggcccccagccagctgcagcggtaccggcaggagctggccgagcgtgcccrcttgggctacccaagctgcttcaccaacctgtgggccctcatcaacgaggcgytgctgcatgatgagccccatgatcacaagctctcagatcaacgggaggccctgagtcatggccagaaccctctgcccatctactgtgccctcaacaccaaagggcagagcctgaccacttttgaatttggggagtggtgcgagttctctccctacgaggtcggcttccccaagtacggggccttcatcccctctgagctctttggstccgagttctttatggggcagctgatgaagaggcttcctgagtcccgcatctgcttcttagaaggtatctggagcaacctgtatgcagccaacctccaggacagcttatactgggcctcagagcccagccagttctgggaccgctgggtcaggaaccaggccaacctggacaaggagcaggtcccccttctgaagatagaagaaccaccctcaacagccggcagratagctgagtttttcaccgatcttctgacgtggcgtccactggcccaggccacacataatttcctgcgtggcctccatttccacaaagactactttcagcatcctcacttctccaymtggaaagctaccactctggatgggctccccaaccagctgacaccctcggagccccacctgtgcctgctggatgttggctacctcatcaataccagctgcctgcccctcctgcagcccactcgggacgtggacctcatcctgtcattggactacaacctccacggagccttccagcagttgcagctcctgggccggttctgccaggagcaggggatcccgttcccacccatctcgcccagccccgaagagcagctccagcctcgggagtgccacaccttctcygaccccacctgccccggagcccctgcggtgctgcactttcctctggtcagcgactccttccgggagtactcggcccctggggtccggcggacacccgaggaggcggcrgctggggaggtgaacctgtcttcatcggactctccctaccactacacgaaggtgacctacagccaggaggacgtggacaagctgctgcacctgacacattacaatgtctgcaacaaccaggagcagctgctggaggctctgcgccaggcagtgcagcggaggcggcagcgcaggccccactgatggccggggcccctgccacccctaactctcattcattccctggctgctgagttgcaggtgggaactgtcatcacgcagtgcttcagagcctcgggctcaggtggcackgtcccagggtccaggctgagggctgggagctcccttgcgcctcagcagtttgcagtggggtaaggaggccaagcccatttgtgtaatcacccaaaaccccccggcctgtgcctgttttcccttctgcgctaccttgagtagttggagcacttgatacatcacagactcatacaaa

SEQ ID NO: 6276 - DNA, 3099 bp, Homo sapiens
accgggcgggcggccggcgctggggcccgggacggggtcggggcccgggmccgggccgaagcggcggcggcggcggcgctggcagtcctctccggcgggagtccgccgcccgcaccgggccagccagcgagcccggcggcggcggcggcggcggcggtggtgtagggtctcacactgttgcccaggctgaagtgctcacggctcactgcagtttcaagttcctgggctcaagtctgtgccgcctccttccggtctcggtggcgcggcacgcgcggctctctaggcctccttcagctctgtggtgacggtggccgaggtggagggccggtctgaagagtggcgggactggcttcacttcctccgyggttcctcggagccgcctcgctcctcttcagggactttgctgagaagggctctcgggcgtccagaccccaccgcaaaggtgtttggcgatccgccgagaagttgttggccccaggagcatccctcggggccgaatgcgcagtggacgatgccccttctgacccaacagatccaagacgaggatgatcagtacagccttgtggccagccttgacaacgttaggaatctctccactatcttgaaagstattcatttccgagaacatgccacgtgtttcgcaactaaaaatggtatcaaagtaacagtggaaaatgcaaagtgtgtgcaagcaaatgcttttattcagggastttaactgcacttygaatgtgttaccaagrttatggttaccctttgatgctgttcctggaagaaggaggagtggtgacagtctgcaaaatcaatacacaggaacctgaggagaccctggactttgatttctgcagcaccaatgttattaataaaattattctgcagtcagaggggctccgtgaagcattttctgaattggatatgacgagtgaagtcctacaaattaccatgtctcctgacaagccttatttcaggttatctacttttggaaatgcaggaagttcccaccttgactatcccaaagattctgatttgatggaagcatttcattgtaatcagacccaagtcaacagatayaagatttccttactgaaaccctctacaaaggcattagtcctatcttgtaaggtatctattcsgacagataacagaggcttcctttcattacagtatatgattagaaatgaagatggacaaatatgttttgtggaatattactgctgccctgatgaagaagttcctgaatctgrgtcttgagtatgacaattcactgatatttatgtgtacatttatgatagatgaagttcttattctgagtacagtactctttgtcatttcatattggattttctatagagaagaagcacaayggggaagataggagcaaggtcatgtaccctaatagttactatgttttgtaaatccattttgtagagggcatgtaaataaatgttttcctgtagtcatagattattcaggactgtcctttagttctgtcttttgaactcatgggaataattgtgagtcagcgtaacatttcaagagtctaaaggtggccgggtgtggtggctttaatcccagcactttgggaagccgaggtgggcggatcacctgrggtcaggagttcgagaccagcctgaccaacgtggagaaaccccatctctactaaaaatacaaaaaattagccggacgtggtggcacatgcctgtaatgccagctactcgggaggctgaggcaggagaattgcttgaacccgggaggyggaggttgtrgtgagctgagatgacgccattgcactccagcctaggcaataagagcaaaactctgcctcaaaaaaaaaaaaaaaaaaagtctaaaggcttaaagtttgatgcagctacctgaaatgatcttttatttatttattattagaaaaagcaaaggcatatgggcattgcttattagtttgaattctagagactagatcttaaagtagtggttctcaaagtgttgtgcccgcaccaacatcagaatggcctgcaaacttgtagcaaactctggggaggaggscagcattctgtattttaacaagcttccctcaggagattctgatgcctgctaaattttgggaaccactgttttaaaggaaactttttttttctttaatagcatttaattgtatgagatgattgcttttacatgtgatttccttgcaaatgttctgaagttgaggcatcaccaaacaagtctgaacaattctttatgtgatttatttttaaagtagaccttttgaagagatctatgaatgggatataaagcaattttcagtgttacaggttttcttcttcttctcaaaactgtttgctgtaagtaactgcaatcagtacttactactttccatttgcttatgagtttcttgacaaatcaaggtgtagaaaaccagttattaagtgattttgtactttcctggtagttgtcactaaaataatttttgtggcatataaatatatttaataaaatgcaaaaattatcttcctgtctagtagaaaaaattacatgagtaaagtgaagcttctgtctttgttactgtaccaggtgacaacagctgagtgtccctccatggacagtcactattggccttttgagtgagacagttctttaggataaaaacctgtcatcccattgcaggattcatttagcctttctggcccttacccactgatgctagtcattgtgaccaccccacctcccccaaataaaagtgtgccaaactattcattgttgagaaccattcaattgtattcaccaaaattggaggatatattggaatgccctaccttaatataggtcacatagcattagagaaaattggtttggagagtattacagcaaagtgtgctgcaaggaggctactccagcacaatggcaggcactgcttcccaggcatatggacaattctgggaggtggccagggtcagyacctgataactagtaagtgtctcaatctcagcatacaaaatttagcagtgactacaaaagaagttggaattttctaaaatgtttgtattcaagaaggaaacaaatgaatttactaaatgttgtcagagtattttttgtttagataac

SEQ ID NO: 6277 - DNA, 3114 bp, Homo sapiens
gcccaggctgaagtgctcacggctcactgcagtttcaagttcctgggctcaaagatgggagtctccctatgttgcccaggctggtctccaacacctgggctcaagtggcttggcctcccaaagcgctgggattataggtctgtgccgcctccttccggtctcggtggcgcggcacgcgcggctctctaggcctccttcagctctgtggtgacggtggccgaggtggagggccggtctgaagagtggcgggactggcttcacttcctccgyggttcctcggagccgcctcgctcctcttcagggactttgctgagaagggctctcgggcgtccagaccccaccgcaaaggtgtttggcgatccgccgagaagttgttggccccaggagcatccctcggggccgaatgcgcagtggacgatgccccttctgacccaacagatccaagacgaggatgatcagtacagccttgtggccagccttgacaacgttaggaatctctccactatcttgaaagstattcatttccgagaacatgccacgtgtttcgcaactaaaaatggtatcaaagtaacagtggaaaatgcaaagtgtgtgcaagcaaatgcttttattcaggctggaatatttcaggagtttaaagttcaggaagagtctgttacttttcgaattaatttaactgtccttttagactgtttatctatttttggatcaagtcctatgccagggastttaactgcacttygaatgtgttaccaagrttatggttaccctttgatgctgttcctggaagaaggaggagtggtgacagtctgcaaaatcaatacacaggaacctgaggagaccctggactttgatttctgcagcaccaatgttattaataaaattattctgcagtcagaggggctccgtgaagcattttctgaattggatatgacgagtgaagtcctacaaattaccatgtctcctgacaagccttatttcaggttatctacttttggaaatgcaggaagttcccaccttgactatcccaaagattctgatttgatggaagcatttcattgtaatcagacccaagtcaacagatayaagatttccttactgaaaccctctacaaaggcattagtcctatcttgtaaggtatctattcsgacagataacagaggcttcctttcattacagtatatgattagaaatgaagatggacaaatatgttttgtggaatattactgctgccctgatgaagaagttcctgaatctgrgtcttgagtatgacaattcactgatatttatgtgtacatttatgatagatgaagttcttattctgagtacagtactctttgtcatttcatattggattttctatagagaagaagcacaayggggaagataggagcaaggtcatgtaccctaatagttactatgttttgtaaatccattttgtagagggcatgtaaataaatgttttcctgtagtcatagattattcaggactgtcctttagttctgtcttttgaactcatgggaataattgtgagtcagcgtaacatttcaagagtctaaaggtggccgggtgtggtggctttaatcccagcactttgggaagccgaggtgggcggatcacctgrggtcaggagttcgagaccagcctgaccaacgtggagaaaccccatctctactaaaaatacaaaaaattagccggacgtggtggcacatgcctgtaatgccagctactcgggaggctgaggcaggagaattgcttgaacccgggaggyggaggttgtrgtgagctgagatgacgccattgcactccagcctaggcaataagagcaaaactctgcctcaaaaaaaaaaaaaaaaaaagtctaaaggcttaaagtttgatgcagctacctgaaatgatcttttatttatttattattagaaaaagcaaaggcatatgggcattgcttattagtttgaattctagagactagatcttaaagtagtggttctcaaagtgttgtgcccgcaccaacatcagaatggcctgcaaacttgtagcaaactctggggaggaggscagcattctgtattttaacaagcttccctcaggagattctgatgcctgctaaattttgggaaccactgttttaaaggaaactttttttttctttaatagcatttaattgtatgagatgattgcttttacatgtgatttccttgcaaatgttctgaagttgaggcatcaccaaacaagtctgaacaattctttatgtgatttatttttaaagtagaccttttgaagagatctatgaatgggatataaagcaattttcagtgttacaggttttcttcttcttctcaaaactgtttgctgtaagtaactgcaatcagtacttactactttccatttgcttatgagtttcttgacaaatcaaggtgtagaaaaccagttattaagtgattttgtactttcctggtagttgtcactaaaataatttttgtggcatataaatatatttaataaaatgcaaaaattatcttcctgtctagtagaaaaaattacatgagtaaagtgaagcttctgtctttgttactgtaccaggtgacaacagctgagtgtccctccatggacagtcactattggccttttgagtgagacagttctttaggataaaaacctgtcatcccattgcaggattcatttagcctttctggcccttacccactgatgctagtcattgtgaccaccccacctcccccaaataaaagtgtgccaaactattcattgttgagaaccattcaattgtattcaccaaaattggaggatatattggaatgccctaccttaatataggtcacatagcattagagaaaattggtttggagagtattacagcaaagtgtgctgcaaggaggctactccagcacaatggcaggcactgcttcccaggcatatggacaattctgggaggtggccagggtcagyacctgataactagtaagtgtctcaatctcagcatacaaaatttagcagtgactacaaaagaagttggaattttctaaaatgtttgtattcaagaaggaaacaaatgaatttactaaatgttgtcagagtattttttgtttagataac

SEQ ID NO: 6278 - DNA, 2060 bp, Homo sapiens
ggcgggcggccggcgctggggcccgggacggggtcggggcccgggmccgggccgaagcggcggcggcggcggcgctggcagtcctctccggcgggagtccgccgcccgcaccgggccagccagcgagcccggcggcggcggcggcggcggcggtggtgtaggtgtttggcgatccgccgagaagttgttggccccaggagcatccctcggggccgaatgcgcagtggacgatgccccttctgacccaacagatccaagacgaggatgatcagtacagccttgtggccagccttgacaacgttaggaatctctccactatcttgaaagstattcatttccgagaacatgccacgtgtttcgcaactaaaaatggtatcaaagtaacagtggaaaatgcaaagtgtgtgcaagcaaatgcttttattcaggggcatggtatggtggctcacacctgtatttccagctgctcaggagaccgaggctgaagcacgaagatcgcttgagctcaggcattaaagaccagcctgggctggaatatttcaggagtttaaagttcaggaagagtctgttacttttcgaattaatttaactgtccttttagactgtttatctatttttggatcaagtcctatgccagggastttaactgcacttygaatgtgttaccaagrttatggttaccctttgatgctgttcctggaagaaggaggagtggtgacagtctgcaaaatcaatacacaggaacctgaggagaccctggactttgatttctgcagcaccaatgttattaataaaattattctgcagtcagaggggctccgtgaagcattttctgaattggatatgacgagtgaagtcctacaaattaccatgtctcctgacaagccttatttcaggttatctacttttggaaatgcaggaagttcccaccttgactatcccaaagattctgatttgatggaagcatttcattgtaatcagacccaagtcaacagatayaagatttccttactgaaaccctctacaaaggcattagtcctatcttgtaaggtatctattcsgacagataacagaggcttcctttcattacagtatatgattagaaatgaagatggacaaatatgttttgtggaatattactgctgccctgatgaagaagttcctgaatctgrgtcttgagagacagtcttgctctgttgcccaggctgtagtgcagtggcacaatctcggctcactgcaacctccacctcccaggtcaagcaattctcctgcctcagcctcccgagtaactgggactacaggcgcatgctaccacgcccggctaattttttgtattttagtagagactgggtttcactgtgtttcccaggctggtctcgaactcctgagctcagacaatccacctgcctcagcctctgaaagtgctaggattacagcatgagctacagcacccagccgaaggttttgtatattaaaagtcctgagaagcccttcagaaaagtaacctgtgtcactttgtttaaacctgttttttttgtttttttttttccttaaatgatttttgtctttctgctacagagcctttcttcctcccccagagaactggcacacatcccttggaatcagcatttcttgcagcccctttcaggacatgctgccctgtacaacagctgtaaagtacttaccattcctccatacactgccctctgtcatgcttctgtgcctttgtatgtagagttccttcttccaggaatggcttctcttctccatctggatgaactgctacttgtcctttaagaaatggctcaaatgtcaccctctctatgaagtgttttccaattctcatagattgtctctcctttcattgcactgagaatgctattccagaacttaaatttcatgttattatttcttcatgttttctcttacactagaatgttgtcccyttaagattaatgaccatgttttatttatctttattaccacctgcagctctaactgcacctggcacttagtaggtgctcaaaaaatgtttgttaaaggaatgaatgaagatgaag

SEQ ID NO: 6279 - DNA, 2819 bp, Homo sapiens
accgggcgggcggccggcgctggggcccgggacggggtcggggcccgggmccgggccgaagcggcggcggcggcggcgctggcagtcctctccggcgggagtccgccgcccgcaccgggccagccagcgagcccggcggcggcggcggcggcggcggtggtgtagggtctcacactgttgcccaggctgaagtgctcacggctcactgcagtttcaagttcctgggctcaagtctgtgccgcctccttccggtctcggtggcgcggcacgcgcggctctctaggcctccttcagctctgtggtgacggtggccgaggtggagggccggtctgaagagtggcgggactggcttcacttcctccgyggttcctcggagccgcctcgctcctcttcagggactttgctgagaagggctctcgggcgtccagaccccaccgcaaaggtgtttggcgatccgccgagaagttgttggccccaggagcatccctcggggccgaatgcgcatggtgacagtctgcaaaatcaatacacaggaacctgaggagaccctggactttgatttctgcagcaccaatgttattaataaaattattctgcagtcagaggggctccgtgaagcattttctgaattggatatgacgagtgaagtcctacaaattaccatgtctcctgacaagccttatttcaggttatctacttttggaaatgcaggaagttcccaccttgactatcccaaagattctgatttgatggaagcatttcattgtaatcagacccaagtcaacagatayaagatttccttactgaaaccctctacaaaggcattagtcctatcttgtaaggtatctattcsgacagataacagaggcttcctttcattacagtatatgattagaaatgaagatggacaaatatgttttgtggaatattactgctgccctgatgaagaagttcctgaatctgrgtcttgagtatgacaattcactgatatttatgtgtacatttatgatagatgaagttcttattctgagtacagtactctttgtcatttcatattggattttctatagagaagaagcacaayggggaagataggagcaaggtcatgtaccctaatagttactatgttttgtaaatccattttgtagagggcatgtaaataaatgttttcctgtagtcatagattattcaggactgtcctttagttctgtcttttgaactcatgggaataattgtgagtcagcgtaacatttcaagagtctaaaggtggccgggtgtggtggctttaatcccagcactttgggaagccgaggtgggcggatcacctgrggtcaggagttcgagaccagcctgaccaacgtggagaaaccccatctctactaaaaatacaaaaaattagccggacgtggtggcacatgcctgtaatgccagctactcgggaggctgaggcaggagaattgcttgaacccgggaggyggaggttgtrgtgagctgagatgacgccattgcactccagcctaggcaataagagcaaaactctgcctcaaaaaaaaaaaaaaaaaaagtctaaaggcttaaagtttgatgcagctacctgaaatgatcttttatttatttattattagaaaaagcaaaggcatatgggcattgcttattagtttgaattctagagactagatcttaaagtagtggttctcaaagtgttgtgcccgcaccaacatcagaatggcctgcaaacttgtagcaaactctggggaggaggscagcattctgtattttaacaagcttccctcaggagattctgatgcctgctaaattttgggaaccactgttttaaaggaaactttttttttctttaatagcatttaattgtatgagatgattgcttttacatgtgatttccttgcaaatgttctgaagttgaggcatcaccaaacaagtctgaacaattctttatgtgatttatttttaaagtagaccttttgaagagatctatgaatgggatataaagcaattttcagtgttacaggttttcttcttcttctcaaaactgtttgctgtaagtaactgcaatcagtacttactactttccatttgcttatgagtttcttgacaaatcaaggtgtagaaaaccagttattaagtgattttgtactttcctggtagttgtcactaaaataatttttgtggcatataaatatatttaataaaatgcaaaaattatcttcctgtctagtagaaaaaattacatgagtaaagtgaagcttctgtctttgttactgtaccaggtgacaacagctgagtgtccctccatggacagtcactattggccttttgagtgagacagttctttaggataaaaacctgtcatcccattgcaggattcatttagcctttctggcccttacccactgatgctagtcattgtgaccaccccacctcccccaaataaaagtgtgccaaactattcattgttgagaaccattcaattgtattcaccaaaattggaggatatattggaatgccctaccttaatataggtcacatagcattagagaaaattggtttggagagtattacagcaaagtgtgctgcaaggaggctactccagcacaatggcaggcactgcttcccaggcatatggacaattctgggaggtggccagggtcagyacctgataactagtaagtgtctcaatctcagcatacaaaatttagcagtgactacaaaagaagttggaattttctaaaatgtttgtattcaagaaggaaacaaatgaatttactaaatgttgtcagagtattttttgtttagataac

SEQ ID NO: 6280 - DNA, 1960 bp, Homo sapiens
ggcgggcggccggcgctggggcccgggacggggtcggggcccgggmccgggccgaagcggcggcggcggcggcgctggcagtcctctccggcgggagtccgccgcccgcaccgggccagccagcgagcccggcggcggcggcggcggcggcggtggtgtaggtgtttggcgatccgccgagaagttgttggccccaggagcatccctcggggccgaatgcgcagtggacgatgccccttctgacccaacagatccaagacgaggatgatcagtacagccttgtggccagccttgacaacgttaggaatctctccactatcttgaaagstattcatttccgagaacatgccacgtgtttcgcaactaaaaatggtatcaaagtaacagtggaaaatgcaaagtgtgtgcaagcaaatgcttttattcaggctggaatatttcaggagtttaaagttcaggaagagtctgttacttttcgaattaatttaactgtccttttagactgtttatctatttttggatcaagtcctatgccagggastttaactgcacttygaatgtgttaccaagrttatggttaccctttgatgctgttcctggaagaaggaggagtggtgacagtctgcaaaatcaatacacaggaacctgaggagaccctggactttgatttctgcagcaccaatgttattaataaaattattctgcagtcagaggggctccgtgaagcattttctgaattggatatgacgagtgaagtcctacaaattaccatgtctcctgacaagccttatttcaggttatctacttttggaaatgcaggaagttcccaccttgactatcccaaagattctgatttgatggaagcatttcattgtaatcagacccaagtcaacagatayaagatttccttactgaaaccctctacaaaggcattagtcctatcttgtaaggtatctattcsgacagataacagaggcttcctttcattacagtatatgattagaaatgaagatggacaaatatgttttgtggaatattactgctgccctgatgaagaagttcctgaatctgrgtcttgagagacagtcttgctctgttgcccaggctgtagtgcagtggcacaatctcggctcactgcaacctccacctcccaggtcaagcaattctcctgcctcagcctcccgagtaactgggactacaggcgcatgctaccacgcccggctaattttttgtattttagtagagactgggtttcactgtgtttcccaggctggtctcgaactcctgagctcagacaatccacctgcctcagcctctgaaagtgctaggattacagcatgagctacagcacccagccgaaggttttgtatattaaaagtcctgagaagcccttcagaaaagtaacctgtgtcactttgtttaaacctgttttttttgtttttttttttccttaaatgatttttgtctttctgctacagagcctttcttcctcccccagagaactggcacacatcccttggaatcagcatttcttgcagcccctttcaggacatgctgccctgtacaacagctgtaaagtacttaccattcctccatacactgccctctgtcatgcttctgtgcctttgtatgtagagttccttcttccaggaatggcttctcttctccatctggatgaactgctacttgtcctttaagaaatggctcaaatgtcaccctctctatgaagtgttttccaattctcatagattgtctctcctttcattgcactgagaatgctattccagaacttaaatttcatgttattatttcttcatgttttctcttacactagaatgttgtcccyttaagattaatgaccatgttttatttatctttattaccacctgcagctctaactgcacctggcacttagtaggtgctcaaaaaatgtttgttaaaggaatgaatgaagatgaag

SEQ ID NO: 6281 - DNA, 3030 bp, Homo sapiens
cgatctctatggttcggcggctctaagcgctcagcyycgcggtcgtcctccaggtctgtgccgcctccttccggtctcggtggcgcggcacgcgcggctctctaggcctccttcagctctgtggtgacggtggccgaggtggagggccggtctgaagagtggcgggactggcttcacttcctccgyggttcctcggagccgcctcgctcctcttcagggactttgctgagaagggctctcgggcgtccagaccccaccgcaaaggtgtttggcgatccgccgagaagttgttggccccaggagcatccctcggggccgaatgcgcagtggacgatgccccttctgacccaacagatccaagacgaggatgatcagtacagccttgtggccagccttgacaacgttaggaatctctccactatcttgaaagstattcatttccgagaacatgccacgtgtttcgcaactaaaaatggtatcaaagtaacagtggaaaatgcaaagtgtgtgcaagcaaatgcttttattcaggctggaatatttcaggagtttaaagttcaggaagagtctgttacttttcgaattaatttaactgtccttttagactgtttatctatttttggatcaagtcctatgccagggastttaactgcacttygaatgtgttaccaagrttatggttaccctttgatgctgttcctggaagaaggaggagtggtgacagtctgcaaaatcaatacacaggaacctgaggagaccctggactttgatttctgcagcaccaatgttattaataaaattattctgcagtcagaggggctccgtgaagcattttctgaattggatatgacgagtgaagtcctacaaattaccatgtctcctgacaagccttatttcaggttatctacttttggaaatgcaggaagttcccaccttgactatcccaaagattctgatttgatggaagcatttcattgtaatcagacccaagtcaacagatayaagatttccttactgaaaccctctacaaaggcattagtcctatcttgtaaggtatctattcsgacagataacagaggcttcctttcattacagtatatgattagaaatgaagatggacaaatatgttttgtggaatattactgctgccctgatgaagaagttcctgaatctgrgtcttgagtatgacaattcactgatatttatgtgtacatttatgatagatgaagttcttattctgagtacagtactctttgtcatttcatattggattttctatagagaagaagcacaayggggaagataggagcaaggtcatgtaccctaatagttactatgttttgtaaatccattttgtagagggcatgtaaataaatgttttcctgtagtcatagattattcaggactgtcctttagttctgtcttttgaactcatgggaataattgtgagtcagcgtaacatttcaagagtctaaaggtggccgggtgtggtggctttaatcccagcactttgggaagccgaggtgggcggatcacctgrggtcaggagttcgagaccagcctgaccaacgtggagaaaccccatctctactaaaaatacaaaaaattagccggacgtggtggcacatgcctgtaatgccagctactcgggaggctgaggcaggagaattgcttgaacccgggaggyggaggttgtrgtgagctgagatgacgccattgcactccagcctaggcaataagagcaaaactctgcctcaaaaaaaaaaaaaaaaaaagtctaaaggcttaaagtttgatgcagctacctgaaatgatcttttatttatttattattagaaaaagcaaaggcatatgggcattgcttattagtttgaattctagagactagatcttaaagtagtggttctcaaagtgttgtgcccgcaccaacatcagaatggcctgcaaacttgtagcaaactctggggaggaggscagcattctgtattttaacaagcttccctcaggagattctgatgcctgctaaattttgggaaccactgttttaaaggaaactttttttttctttaatagcatttaattgtatgagatgattgcttttacatgtgatttccttgcaaatgttctgaagttgaggcatcaccaaacaagtctgaacaattctttatgtgatttatttttaaagtagaccttttgaagagatctatgaatgggatataaagcaattttcagtgttacaggttttcttcttcttctcaaaactgtttgctgtaagtaactgcaatcagtacttactactttccatttgcttatgagtttcttgacaaatcaaggtgtagaaaaccagttattaagtgattttgtactttcctggtagttgtcactaaaataatttttgtggcatataaatatatttaataaaatgcaaaaattatcttcctgtctagtagaaaaaattacatgagtaaagtgaagcttctgtctttgttactgtaccaggtgacaacagctgagtgtccctccatggacagtcactattggccttttgagtgagacagttctttaggataaaaacctgtcatcccattgcaggattcatttagcctttctggcccttacccactgatgctagtcattgtgaccaccccacctcccccaaataaaagtgtgccaaactattcattgttgagaaccattcaattgtattcaccaaaattggaggatatattggaatgccctaccttaatataggtcacatagcattagagaaaattggtttggagagtattacagcaaagtgtgctgcaaggaggctactccagcacaatggcaggcactgcttcccaggcatatggacaattctgggaggtggccagggtcagyacctgataactagtaagtgtctcaatctcagcatacaaaatttagcagtgactacaaaagaagttggaattttctaaaatgtttgtattcaagaaggaaacaaatgaatttactaaatgttgtcagagtattttttgtttagataac

SEQ ID NO: 6282 - DNA, 3208 bp, Homo sapiens
accgggcgggcggccggcgctggggcccgggacggggtcggggcccgggmccgggccgaagcggcggcggcggcggcgctggcagtcctctccggcgggagtccgccgcccgcaccgggccagccagcgagcccggcggcggcggcggcggcggcggtggtgtagggtctcacactgttgcccaggctgaagtgctcacggctcactgcagtttcaagttcctgggctcaagtctgtgccgcctccttccggtctcggtggcgcggcacgcgcggctctctaggcctccttcagctctgtggtgacggtggccgaggtggagggccggtctgaagagtggcgggactggcttcacttcctccgyggttcctcggagccgcctcgctcctcttcagggactttgctgagaagggctctcgggcgtccagaccccaccgcaaaggtgtttggcgatccgccgagaagttgttggccccaggagcatccctcggggccgaatgcgcagtggacgatgccccttctgacccaacagatccaagacgaggatgatcagtacagccttgtggccagccttgacaacgttaggaatctctccactatcttgaaagstattcatttccgagaacatgccacgtgtttcgcaactaaaaatggtatcaaagtaacagtggaaaatgcaaagtgtgtgcaagcaaatgcttttattcaggctggaatatttcaggagtttaaagttcaggaagagtctgttacttttcgaattaatttaactgtccttttagactgtttatctatttttggatcaagtcctatgccagggastttaactgcacttygaatgtgttaccaagrttatggttaccctttgatgctgttcctggaagaaggaggagtggtgacagtctgcaaaatcaatacacaggaacctgaggagaccctggactttgatttctgcagcaccaatgttattaataaaattattctgcagtcagaggggctccgtgaagcattttctgaattggatatgacgagtgaagtcctacaaattaccatgtctcctgacaagccttatttcaggttatctacttttggaaatgcaggaagttcccaccttgactatcccaaagattctgatttgatggaagcatttcattgtaatcagacccaagtcaacagatayaagatttccttactgaaaccctctacaaaggcattagtcctatcttgtaaggtatctattcsgacagataacagaggcttcctttcattacagtatatgattagaaatgaagatggacaaatatgttttgtggaatattactgctgccctgatgaagaagttcctgaatctgrgtcttgagtatgacaattcactgatatttatgtgtacatttatgatagatgaagttcttattctgagtacagtactctttgtcatttcatattggattttctatagagaagaagcacaayggggaagataggagcaaggtcatgtaccctaatagttactatgttttgtaaatccattttgtagagggcatgtaaataaatgttttcctgtagtcatagattattcaggactgtcctttagttctgtcttttgaactcatgggaataattgtgagtcagcgtaacatttcaagagtctaaaggtggccgggtgtggtggctttaatcccagcactttgggaagccgaggtgggcggatcacctgrggtcaggagttcgagaccagcctgaccaacgtggagaaaccccatctctactaaaaatacaaaaaattagccggacgtggtggcacatgcctgtaatgccagctactcgggaggctgaggcaggagaattgcttgaacccgggaggyggaggttgtrgtgagctgagatgacgccattgcactccagcctaggcaataagagcaaaactctgcctcaaaaaaaaaaaaaaaaaaagtctaaaggcttaaagtttgatgcagctacctgaaatgatcttttatttatttattattagaaaaagcaaaggcatatgggcattgcttattagtttgaattctagagactagatcttaaagtagtggttctcaaagtgttgtgcccgcaccaacatcagaatggcctgcaaacttgtagcaaactctggggaggaggscagcattctgtattttaacaagcttccctcaggagattctgatgcctgctaaattttgggaaccactgttttaaaggaaactttttttttctttaatagcatttaattgtatgagatgattgcttttacatgtgatttccttgcaaatgttctgaagttgaggcatcaccaaacaagtctgaacaattctttatgtgatttatttttaaagtagaccttttgaagagatctatgaatgggatataaagcaattttcagtgttacaggttttcttcttcttctcaaaactgtttgctgtaagtaactgcaatcagtacttactactttccatttgcttatgagtttcttgacaaatcaaggtgtagaaaaccagttattaagtgattttgtactttcctggtagttgtcactaaaataatttttgtggcatataaatatatttaataaaatgcaaaaattatcttcctgtctagtagaaaaaattacatgagtaaagtgaagcttctgtctttgttactgtaccaggtgacaacagctgagtgtccctccatggacagtcactattggccttttgagtgagacagttctttaggataaaaacctgtcatcccattgcaggattcatttagcctttctggcccttacccactgatgctagtcattgtgaccaccccacctcccccaaataaaagtgtgccaaactattcattgttgagaaccattcaattgtattcaccaaaattggaggatatattggaatgccctaccttaatataggtcacatagcattagagaaaattggtttggagagtattacagcaaagtgtgctgcaaggaggctactccagcacaatggcaggcactgcttcccaggcatatggacaattctgggaggtggccagggtcagyacctgataactagtaagtgtctcaatctcagcatacaaaatttagcagtgactacaaaagaagttggaattttctaaaatgtttgtattcaagaaggaaacaaatgaatttactaaatgttgtcagagtattttttgtttagataac

SEQ ID NO: 6283 - DNA, 2868 bp, Homo sapiens
gtctgtgccgcctccttccggtctcggtggcgcggcacgcgcggctctctaggcctccttcagctctgtggtgacggtggccgaggtggagggccggtctgaagagtggcgggactggcttcacttcctccgyggttcctcggagccgcctcgctcctcttcagggactttgctgagaagggctctcgggcgtccagaccccaccgcaaaggtgtttggcgatccgccgagaagttgttggccccaggagcatccctcggggccgaatgcgcagtggacgatgccccttctgacccaacagatccaagacgaggatgatcagtacagccttgtggccagccttgacaacgttaggaatctctccactatcttgaaagstattcatttccgagaacatgccacgtgtttcgcaactaaaaatggtatcaaagtaacagtggaaaatgcaaagtgtgtgcaagcaaatgcttttattcagggastttaactgcacttygaatgtgttaccaagrttatggttaccctttgatgctgttcctggaagaaggaggagtggtgacagtctgcaaaatcaatacacaggaacctgaggagaccctggactttgatttctgcagcaccaatgttattaataaaattattctgcagtcagaggggctccgtgaagcattttctgaattggatatgacgagtgaagtcctacaaattaccatgtctcctgacaagccttatttcaggttatctacttttggaaatgcaggaagttcccaccttgactatcccaaagattctgatttgatggaagcatttcattgtaatcagacccaagtcaacagatayaagatttccttactgaaaccctctacaaaggcattagtcctatcttgtaaggtatctattcsgacagataacagaggcttcctttcattacagtatatgattagaaatgaagatggacaaatatgttttgtggaatattactgctgccctgatgaagaagttcctgaatctgrgtcttgagtatgacaattcactgatatttatgtgtacatttatgatagatgaagttcttattctgagtacagtactctttgtcatttcatattggattttctatagagaagaagcacaayggggaagataggagcaaggtcatgtaccctaatagttactatgttttgtaaatccattttgtagagggcatgtaaataaatgttttcctgtagtcatagattattcaggactgtcctttagttctgtcttttgaactcatgggaataattgtgagtcagcgtaacatttcaagagtctaaaggtggccgggtgtggtggctttaatcccagcactttgggaagccgaggtgggcggatcacctgrggtcaggagttcgagaccagcctgaccaacgtggagaaaccccatctctactaaaaatacaaaaaattagccggacgtggtggcacatgcctgtaatgccagctactcgggaggctgaggcaggagaattgcttgaacccgggaggyggaggttgtrgtgagctgagatgacgccattgcactccagcctaggcaataagagcaaaactctgcctcaaaaaaaaaaaaaaaaaaagtctaaaggcttaaagtttgatgcagctacctgaaatgatcttttatttatttattattagaaaaagcaaaggcatatgggcattgcttattagtttgaattctagagactagatcttaaagtagtggttctcaaagtgttgtgcccgcaccaacatcagaatggcctgcaaacttgtagcaaactctggggaggaggscagcattctgtattttaacaagcttccctcaggagattctgatgcctgctaaattttgggaaccactgttttaaaggaaactttttttttctttaatagcatttaattgtatgagatgattgcttttacatgtgatttccttgcaaatgttctgaagttgaggcatcaccaaacaagtctgaacaattctttatgtgatttatttttaaagtagaccttttgaagagatctatgaatgggatataaagcaattttcagtgttacaggttttcttcttcttctcaaaactgtttgctgtaagtaactgcaatcagtacttactactttccatttgcttatgagtttcttgacaaatcaaggtgtagaaaaccagttattaagtgattttgtactttcctggtagttgtcactaaaataatttttgtggcatataaatatatttaataaaatgcaaaaattatcttcctgtctagtagaaaaaattacatgagtaaagtgaagcttctgtctttgttactgtaccaggtgacaacagctgagtgtccctccatggacagtcactattggccttttgagtgagacagttctttaggataaaaacctgtcatcccattgcaggattcatttagcctttctggcccttacccactgatgctagtcattgtgaccaccccacctcccccaaataaaagtgtgccaaactattcattgttgagaaccattcaattgtattcaccaaaattggaggatatattggaatgccctaccttaatataggtcacatagcattagagaaaattggtttggagagtattacagcaaagtgtgctgcaaggaggctactccagcacaatggcaggcactgcttcccaggcatatggacaattctgggaggtggccagggtcagyacctgataactagtaagtgtctcaatctcagcatacaaaatttagcagtgactacaaaagaagttggaattttctaaaatgtttgtattcaagaaggaaacaaatgaatttactaaatgttgtcagagtattttttgtttagataac

SEQ ID NO: 6284 - DNA, 4525 bp, Homo sapiens
gcggccgcctctccgccgccggggacgccaaggtgcggctggtggcactgacatcggcggccctgcctctcctccctcgcccccggccttccccatgtgatcggtcttaatcctggccgtgtgtgcgcgcgtggggctccattccgcggtgctgggtctccgtgccggggtgggtgctcgtgtgtgcgcttctcctccccatcccccttcccccaagaataaaagaagaaccgggaggcgtgctcagaaaataaataaataaccaccacacacgcgcagcccggagcgagtcggcggggctggcggcagcggcggaggaggagtgaaggcggcggcggcggaggagggacgcgcggaaaaggcagcaactttaaagccagctcagagcctagacctccagccgagcggtttgcagcgcggcggcggcggcggcggcggcggcgttgagtgtctggcccgccggtccggtcggggtgtgcagtcggacggacgagcagcgcgtcgctgtcctccggcagctggagatgtccgagcccaaggcaattgatcccaagttgtcgacgaccgacagggtggtgaaagctgttccatttcctccaagtcaccggcttacagcaaaagaagtgtttgataatgatggaaaacctcgtgtggatatcttaaaggcgcatcttatgaaggagggaaggctggaagagagtgttgcattgagaataataacagagggtgcatcaattcttcgacaggaaaaaaatttgctggatattgatgcrccagtcactgtttgtggggacattcatggacaattctttgatttgatgaagctctttgaagtcgggggatctcctgccaacactcgctacctcttcttaggggactatgttgacagagggtacttcagtattgaatgtgtgctgtatttgtgggccttgaaaattctctaccccaaaacactgtttttacttcgtggaaatcatgaatgtagacatctaacagagtatttcacatttaaacaagaatgtaaaataaagtattcagaacgcgtatatgatgcctgtatggatgcctttgactgccttcccctggctgccctgatgaaccaacagttcctgtgtgtgcatggtggtttgtctccagagattaacactttagatgatatcagaaaattagaccgattcaaagaaccacctgcatatggacctatgtgtgatatcctgtggtcagaccccctggaagattttggaaatgagaagactcaggaacatttcactcacaacacagtcagggggtgttcatacttctacagttacccggctgtatgtgaattcttacagcacaataacttgttatctatactccgagcccacgaagcccaagatgcagggtaccgcatgtacaggaaaagccaaacaacaggcttcccttctctaattacaattttttcagcaccaaattacttagatgtatacaataacaaagctgcagtattgaagtatgagaacaatgttatgaatatcaggcaattcaactgttctcctcatccatactggcttccaaatttcatggatgtttttacttggtcccttccatttgttggggaaaaagtgactgagatgctggtaaatgtcctcaacatctgctcagatgatgaactagggtcagaagaagatggatttgatggtgcaacagctgcagcccggaaagaggtgataaggaacaagatccgagcaataggcaaaatggccagagtgttctcagtgctcagagaagagagtgagagtgtgctgacgctgaaaggcttgaccccaactggcatgctccccagcggagtactttctggagggaagcaaaccctgcaaagcgctactgttgaggctattgaggctgatgaagctatcaaaggattttcaccacaacataagatcactagcttcgaggaagccaagggcttagaccgaattaatgagaggatgccgcctcgcagagatgccatgccctctgacgccaaccttaactccatcaacaaggctctcacctcagagactaacggcacggacagcaatggcagtaatagcagcaatattcagtgaccacttcctgttcactttttttttttttttttttttttttttttgagctgcggggcatgatggggattgytgcrtatcagcagttggatgttcttgcctctgacagtagcttatttgctctgggggccaggaattggattcagtttacactatcattaaaaaagagggagagagataataaactatattttggtggggatggtgattaaacacctcttttgggtatgccttttaaaaatgcttatagagaaaaaaaattttaaaaagaaagctaatgctagtatatactgcaatgttaggggaatgaacatgttttcctactgcattggggacttctagataggttaatgaaaggccttttattctgttactggacatgaaaactttgtctaatttcttactctattgtacgtttacagtcgcagcactaaaaatggatgacatcaaacatttttaacaaaatgatgtacaaactaaggactatttattgataatgttttgctactcttgtcagacaatggctataaactgaattaggcagtcttaaaaaaaaaaaaaaacagaaaaagaaaaaaaagaacgttgcaaatttgttaaaatgccaaaaaggacagtttaattttgtacagattatgcttacctcaggtttctttagtgtgcttgaatgcccttctttccatataacacttatcttcttcttaattcggcaatggaatatcttttaagttttaaaaaaactggaataattatatctatcttttttgccgtttatatttaggggtttttgttgataaaatcaagtcttggttgtggcttgctgaattaaatatttatgagtggtgcatttttaagtatagtgaacaagacaccatattaagtacagtgataaagcatctatattctgtaaaaaaaaaaaaaatctgcctatgcatgttttttaagaaaaaaaaaatggctgtatcggcctgtatgggactgtaatgcgcttagtggtctgacatatactggaaatgtatgtatactggcgtactttatattctctaaaatgcttaatgcctttgaaattttgtaatcaaaaaaaagctttgaaaaaatctaaaggggagagtattctttaaagtttttaacataagcttgtcaatgcacatgtagatggttagcatgtttagcaaaccttgtgaaattataataagtttgtagttacatgtgaaactctaaatgcatggcaactgttaatgtcataacagtttagttattttgttctgttctgtcatgtgccacaaaatatgtacttttttcacttttttccctttgtatatcagttacgggttacaactggttcattctgaaaacaacaacaacaaaagtccattcatattttttaacaattgtataagtgcccaagtaattcactacagcctaaagccttgcctttgtaatttgacttctgacatgttggcaatcaaagcatgcacttgtaacaatgaaaaagaaaaagcattttatattactactcaataaaatgtgcatgaacttacagaattctcatccttccactgagtccgctgaagggatttatgtgcacaaccaccatgtgtcttctaggtgstggcccaccaccacacatcacaggctgatttccacaggcttcttcctaggggcctcgtgatctgaggggtggtgcctacttccactgtaaraaagaatcttggtggatttgtgtctcaaatcagataagagaagcctgtttaaagagcagatgccatcttctggcttcctcaaggagccagttaaaaaaccagagcattcctttttattgaaaaataaaattaatttgttatcaggttgtttcagttgtattggatgccctatctatctgctaaagcaaaaagtactaggctactaagtgcattttcatcacagaaaagagttgcatttgtattaacaagaaatttgtatacccacgcttcagctactatctaatcatcacccgaagatttaagatacaccaaatttcagtttgtttgtaacattgttcatctttagtgcactttgttttatataataaagtatgcctgttatattaaataataagaatatggcaattagcgatatagcatacccaaacaaagatgttctcgatacagtctggcaaagactatcccaaggttattttaatgaattcagacattttttcctgtggatatttctccatcctaaaaaaagtggcaaccaaggaaaatatttagatgcaacttactagagtgatgatgtgaaagaaatggtgattctggtatcatggtgtttattttctttcttataactgcagagaaaatatcctgactaaaaaaawttcatttttttggattcctttcttttacaaattgtgctgaggcaactatggcatagaaataaacatttgacattaaaataag

SEQ ID NO: 6285 - DNA, 4495 bp, Homo sapiens
gcggccgcctctccgccgccggggacgccaaggtgcggctggtggcactgacatcggcggccctgcctctcctccctcgcccccggccttccccatgtgatcggtcttaatcctggccgtgtgtgcgcgcgtggggctccattccgcggtgctgggtctccgtgccggggtgggtgctcgtgtgtgcgcttctcctccccatcccccttcccccaagaataaaagaagaaccgggaggcgtgctcagaaaataaataaataaccaccacacacgcgcagcccggagcgagtcggcggggctggcggcagcggcggaggaggagtgaaggcggcggcggcggaggagggacgcgcggaaaaggcagcaactttaaagccagctcagagcctagacctccagccgagcggtttgcagcgcggcggcggcggcggcggcggcggcgttgagtgtctggcccgccggtccggtcggggtgtgcagtcggacggacgagcagcgcgtcgctgtcctccggcagctggagatgtccgagcccaaggcaattgatcccaagttgtcgacgaccgacagggtggtgaaagctgttccatttcctccaagtcaccggcttacagcaaaagaagtgtttgataatgatggaaaacctcgtgtggatatcttaaaggcgcatcttatgaaggagggaaggctggaagagagtgttgcattgagaataataacagagggtgcatcaattcttcgacaggaaaaaaatttgctggatattgatgcrccagtcactgtttgtggggacattcatggacaattctttgatttgatgaagctctttgaagtcgggggatctcctgccaacactcgctacctcttcttaggggactatgttgacagagggtacttcagtattgaatgtgtgctgtatttgtgggccttgaaaattctctaccccaaaacactgtttttacttcgtggaaatcatgaatgtagacatctaacagagtatttcacatttaaacaagaatgtaaaataaagtattcagaacgcgtatatgatgcctgtatggatgcctttgactgccttcccctggctgccctgatgaaccaacagttcctgtgtgtgcatggtggtttgtctccagagattaacactttagatgatatcagaaaattagaccgattcaaagaaccacctgcatatggacctatgtgtgatatcctgtggtcagaccccctggaagattttggaaatgagaagactcaggaacatttcactcacaacacagtcagggggtgttcatacttctacagttacccggctgtatgtgaattcttacagcacaataacttgttatctatactccgagcccacgaagcccaagatgcagggtaccgcatgtacaggaaaagccaaacaacaggcttcccttctctaattacaattttttcagcaccaaattacttagatgtatacaataacaaagctgcagtattgaagtatgagaacaatgttatgaatatcaggcaattcaactgttctcctcatccatactggcttccaaatttcatggatgtttttacttggtcccttccatttgttggggaaaaagtgactgagatgctggtaaatgtcctcaacatctgctcagatgatgaactagggtcagaagaagatggatttgatggtgcaacagctgcagcccggaaagaggtgataaggaacaagatccgagcaataggcaaaatggccagagtgttctcagtgctcagagaagagagtgagagtgtgctgacgctgaaaggcttgaccccaactggcatgctccccagcggagtactttctggagggaagcaaaccctgcaaagcgctatcaaaggattttcaccacaacataagatcactagcttcgaggaagccaagggcttagaccgaattaatgagaggatgccgcctcgcagagatgccatgccctctgacgccaaccttaactccatcaacaaggctctcacctcagagactaacggcacggacagcaatggcagtaatagcagcaatattcagtgaccacttcctgttcactttttttttttttttttttttttttttttgagctgcggggcatgatggggattgytgcrtatcagcagttggatgttcttgcctctgacagtagcttatttgctctgggggccaggaattggattcagtttacactatcattaaaaaagagggagagagataataaactatattttggtggggatggtgattaaacacctcttttgggtatgccttttaaaaatgcttatagagaaaaaaaattttaaaaagaaagctaatgctagtatatactgcaatgttaggggaatgaacatgttttcctactgcattggggacttctagataggttaatgaaaggccttttattctgttactggacatgaaaactttgtctaatttcttactctattgtacgtttacagtcgcagcactaaaaatggatgacatcaaacatttttaacaaaatgatgtacaaactaaggactatttattgataatgttttgctactcttgtcagacaatggctataaactgaattaggcagtcttaaaaaaaaaaaaaaacagaaaaagaaaaaaaagaacgttgcaaatttgttaaaatgccaaaaaggacagtttaattttgtacagattatgcttacctcaggtttctttagtgtgcttgaatgcccttctttccatataacacttatcttcttcttaattcggcaatggaatatcttttaagttttaaaaaaactggaataattatatctatcttttttgccgtttatatttaggggtttttgttgataaaatcaagtcttggttgtggcttgctgaattaaatatttatgagtggtgcatttttaagtatagtgaacaagacaccatattaagtacagtgataaagcatctatattctgtaaaaaaaaaaaaaatctgcctatgcatgttttttaagaaaaaaaaaatggctgtatcggcctgtatgggactgtaatgcgcttagtggtctgacatatactggaaatgtatgtatactggcgtactttatattctctaaaatgcttaatgcctttgaaattttgtaatcaaaaaaaagctttgaaaaaatctaaaggggagagtattctttaaagtttttaacataagcttgtcaatgcacatgtagatggttagcatgtttagcaaaccttgtgaaattataataagtttgtagttacatgtgaaactctaaatgcatggcaactgttaatgtcataacagtttagttattttgttctgttctgtcatgtgccacaaaatatgtacttttttcacttttttccctttgtatatcagttacgggttacaactggttcattctgaaaacaacaacaacaaaagtccattcatattttttaacaattgtataagtgcccaagtaattcactacagcctaaagccttgcctttgtaatttgacttctgacatgttggcaatcaaagcatgcacttgtaacaatgaaaaagaaaaagcattttatattactactcaataaaatgtgcatgaacttacagaattctcatccttccactgagtccgctgaagggatttatgtgcacaaccaccatgtgtcttctaggtgstggcccaccaccacacatcacaggctgatttccacaggcttcttcctaggggcctcgtgatctgaggggtggtgcctacttccactgtaaraaagaatcttggtggatttgtgtctcaaatcagataagagaagcctgtttaaagagcagatgccatcttctggcttcctcaaggagccagttaaaaaaccagagcattcctttttattgaaaaataaaattaatttgttatcaggttgtttcagttgtattggatgccctatctatctgctaaagcaaaaagtactaggctactaagtgcattttcatcacagaaaagagttgcatttgtattaacaagaaatttgtatacccacgcttcagctactatctaatcatcacccgaagatttaagatacaccaaatttcagtttgtttgtaacattgttcatctttagtgcactttgttttatataataaagtatgcctgttatattaaataataagaatatggcaattagcgatatagcatacccaaacaaagatgttctcgatacagtctggcaaagactatcccaaggttattttaatgaattcagacattttttcctgtggatatttctccatcctaaaaaaagtggcaaccaaggaaaatatttagatgcaacttactagagtgatgatgtgaaagaaatggtgattctggtatcatggtgtttattttctttcttataactgcagagaaaatatcctgactaaaaaaawttcatttttttggattcctttcttttacaaattgtgctgaggcaactatggcatagaaataaacatttgacattaaaataag

SEQ ID NO: 6286 - DNA, 1772 bp, Homo sapiens
gcggccgcctctccgccgccggggacgccaaggtgcggctggtggcactgacatcggcggccctgcctctcctccctcgcccccggccttccccatgtgatcggtcttaatcctggccgtgtgtgcgcgcgtggggctccattccgcggtgctgggtctccgtgccggggtgggtgctcgtgtgtgcgcttctcctccccatcccccttcccccaagaataaaagaagaaccgggaggcgtgctcagaaaataaataaataaccaccacacacgcgcagcccggagcgagtcggcggggctggcggcagcggcggaggaggagtgaaggcggcggcggcggaggagggacgcgcggaaaaggcagcaactttaaagccagctcagagcctagacctccagccgagcggtttgcagcgcggcggcggcggcggcggcggcggcgttgagtgtctggcccgccggtccggtcggggtgtgcagtcggacggacgagcagcgcgtcgctgtcctccggcagctggagatgtccgagcccaaggcaattgatcccaagttgtcgacgaccgacagggtggtgaaagctgttccatttcctccaagtcaccggcttacagcaaaagaagtgtttgataatgatggaaaacctcgtgtggatatcttaaaggcgcatcttatgaaggagggaaggctggaagagagtgttgcattgagaataataacagagggtgcatcaattcttcgacaggaaaaaaatttgctggatattgatgcrccagtcactgtttgtggggacattcatggacaattctttgatttgatgaagctctttgaagtcgggggatctcctgccaacactcgctacctcttcttaggggactatgttgacagagggtacttcagtattgaatgtgtgctgtatttgtgggccttgaaaattctctaccccaaaacactgtttttacttcgtggaaatcatgaatgtagacatctaacagagtatttcacatttaaacaagaatgtaaaataaagtattcagaacgcgtatatgatgcctgtatggatgcctttgactgccttcccctggctgccctgatgaaccaacagttcctgtgtgtgcatggtggtttgtctccagagattaacactttagatgatatcagaaaattagaccgattcaaagaaccacctgcatatggacctatgtgtgatatcctgtggtcagaccccctggaagattttggaaatgagaagactcaggaacatttcactcacaacacagtcagggggtgttcatacttctacagttacccggctgtatgtgaattcttacagcacaataacttgttatctatactccgagcccacgaagcccaagatgcagggtaccgcatgtacaggaaaagccaaacaacaggcttcccttctctaattacaattttttcagcaccaaattacttagatgtatacaataacaaagctgcagtattgaagtatgagaacaatgttatgaatatcaggcaattcaactgttctcctcatccatactggcttccaaatttcatggatgtttttacttggtcccttccatttgttggggaaaaagtgactgagatgctggtaaatgtcctcaacatctgctcagatgatgaactagggtcagaagaagatggatttgatggtgcaacagctgcagcccggaaagaggtgataaggaacaagatccgagcaataggcaactatggcatagaaataaacatttgacattaaaat

SEQ ID NO: 6287 - DNA, 2093 bp, Homo sapiens
gccgcaggcgtagcgctctcgccctggccatggagcggccggcgcccggcgaggtggtcatgagccaagccatccagccggcgcacgccactgcgcgcggcgagctgagcgcggggcagctgctcaagtggatcgacaccaccgcctgcctggcggctgagaaacatgctggagtttcctgcgttacagcctcagtggatgacatacagtttgaggagacagctagagttggacaagttataaccatcaaagcaaaagttactagagcattcagcacaagcatggagatcagtatcaaggtcatggtacaggatatgctcactggcattgagaagcttgttagtgtggctttctccacatttgtagccaaaccagttggaaaagaaaagattcatttaaaaccagtcacacttctaactgaacaagatcatgtggaacataatctggctgctgagagaaggaaagttcgattacaacatgaagatacctttaacaatttaatgaaggaaagtagcaaatttgatgatctcatttttgatgaagaggaaggagcggtttccacaaggggcacctccgttcagagcattgaactggtcctcccaccccatgcaaaccatcacggaaatacatttggtggccagattatggcgtggatggagacagtggctactatttctgcaagccgcctgtgttgggctcatccctttctgaagtccrtagatatgtttaagttccggggaccatctacagttggagatcgtcttgtcttcactgccattgtcaacaatacatttcagacctgtgttgaagttggagttcgcgtggaggcctttgactgtcaggaatgggccgagggccgagggcgtcacatcaacagtgcttttstcatttacaatgctgctgatgataaggaaaatctcatcacgtttcccagaatccaacccatttcaaaggatgatttcagacgctatcggggagctattgcacgcaagcgaattcgcctaggcagaaaatatgttatttcccacaaagaagaggttccactttgcatacactgggatatcagcaagcaggcatccctgagtgacagcaatgtggaggccctcaaaaaactggcagccaaaaggggttgggaggttaccagcactgtggaaaagataaaaatatatactctggaagagcatgatgttttatctgtttgggttgaaaagcacgtgggaagtccagcacatttgrcttatcgtctcttgtctgactttacaaagcgacctttgtgggacccccattttgtgtcctgtgaagtcatagactgggtgagtgaagatgatcagctgtatcacatcacctgtcctatactgaatgatgacaaacccaaagacttggtagtactcgtatcacgaagaaaacccctcaaagatggtaacacttacacagtggcagtgaagtcggtcattttgccatcggtccccccgtctccacagtacatcagaagtgaaatcatatgtgccggatttctcatccatgctattgacagcaattcatgcatcgtatcttactttaaccatatgtctgctagcatccttccttactttgctggaaatcttggtggctggtcaaaatccattgaagaaacagcagcctcttgtatacagttcttagagaatcctcctgatgatgggtttgtaagcacattttaaaggtcaactttcaattactggtaatttaatttcccacttttaattccaagcacccttagccctgacatctgtcaagctttggggccacaaaataatttaatataaccctaagcaaaatgcagtgacggagttaaaaaacaaaatgcatcttaagtcaaataccagtgatttggattagcattaaaagagctttagaattctgttgtaagtcatctgtggctctgcctcttccaggggcacagatagtggaaaattgcctgtatgcartactatgtgttctataaaatggcatgaatttagtttaaattatcgtaaacatttttaggttacagaggtgaaacatgcattctgtgtgaaattccaaaaaaaaaattataaaatctaaaatgatttgct

SEQ ID NO: 6288 - DNA, 1958 bp, Homo sapiens
ggcgtagcgctctcgccctggccatggagcggccggcgcccggcgaggtggtcatgagccaagccatccagccggcgcacgccactgcgcgcggcgagctgagcgcggggcagctgctcaagtggatcgacaccaccgcctgcctggcggagatcagtatcaaggtcatggtacaggatatgctcactggcattgagaagcttgttagtgtggctttctccacatttgtagccaaaccagttggaaaagaaaagattcatttaaaaccagtcacacttctaactgaacaagatcatgtggaacataatctggctgctgagagaaggaaagttcgattacaacatgaagatacctttaacaatttaatgaaggaaagtagcaaatttgatgatctcatttttgatgaagaggaaggagcggtttccacaaggggcacctccgttcagagcattgaactggtcctcccaccccatgcaaaccatcacggaaatacatttggtggccagattatggcgtggatggagacagtggctactatttctgcaagccgcctgtgttgggctcatccctttctgaagtccrtagatatgtttaagttccggggaccatctacagttggagatcgtcttgtcttcactgccattgtcaacaatacatttcagacctgtgttgaagttggagttcgcgtggaggcctttgactgtcaggaatgggccgagggccgagggcgtcacatcaacagtgcttttstcatttacaatgctgctgatgataaggaaaatctcatcacgtttcccagaatccaacccatttcaaaggatgatttcagacgctatcggggagctattgcacgcaagcgaattcgcctaggcagaaaatatgttatttcccacaaagaagaggttccactttgcatacactgggatatcagcaagcaggcatccctgagtgacagcaatgtggaggccctcaaaaaactggcagccaaaaggggttgggaggttaccagcactgtggaaaagataaaaatatatactctggaagagcatgatgttttatctgtttgggttgaaaagcacgtgggaagtccagcacatttgrcttatcgtctcttgtctgactttacaaagcgacctttgtgggacccccattttgtgtcctgtgaagtcatagactgggtgagtgaagatgatcagctgtatcacatcacctgtcctatactgaatgatgacaaacccaaagacttggtagtactcgtatcacgaagaaaacccctcaaagatggtaacacttacacagtggcagtgaagtcggtcattttgccatcggtccccccgtctccacagtacatcagaagtgaaatcatatgtgccggatttctcatccatgctattgacagcaattcatgcatcgtatcttactttaaccatatgtctgctagcatccttccttactttgctggaaatcttggtggctggtcaaaatccattgaagaaacagcagcctcttgtatacagttcttagagaatcctcctgatgatgggtttgtaagcacattttaaaggtcaactttcaattactggtaatttaatttcccacttttaattccaagcacccttagccctgacatctgtcaagctttggggccacaaaataatttaatataaccctaagcaaaatgcagtgacggagttaaaaaacaaaatgcatcttaagtcaaataccagtgatttggattagcattaaaagagctttagaattctgttgtaagtcatctgtggctctgcctcttccaggggcacagatagtggaaaattgcctgtatgcartactatgtgttctataaaatggcatgaatttagtttaaattatcgtaaacatttttaggttacagaggtgaaacatgcattctgtgtgaaattccaaaaaaaaaattataaaatctaaaatgatttgct

SEQ ID NO: 6289 - DNA, 3109 bp, Homo sapiens
atgctccgtcccggcgcgcagctgctgcggggcctcctgctgcggagctgcccgctgcagggctcccccgggcgcccgcgctctgtctgcggccgggaaggagaggaaaaaccacccttatctgcagaaacacaatggaaagacagagcagaaacagtgataattggaggtggctgtgttggtgtgagtctggcttatcacctggccaaagcagggatgaaagatgtggtcctgctggagaaatcagagctcacggctggatctacctggcacgcagcaggtttaacaacttactttcatcctggaataaacttgaagaaaatacrttatgatagcatcaaactttatgagaaactggaagaagaaactggkcaggtggtgggattccatcagccaggtagtatcagacttgctaccacccctgtaagggtagatgaatttaaatatcaaatgactcggactggctggcatgcaacagaacagtatctcattgaacctgaaaaaattcaagagatgttccctttactcaacatgaataaggttttagctggattgtataatcctggagatggtcacattgatccttattctctaactatggcactggctgctggggctaggaaatgtggtgcccttttaaaatatcctgcaccagtaacttctctgaaagccaggtcagatggaacatgggacgttgaaacaccacaggggtctatgagagcaaatagaattgtgaatgctgcaggattttgggctcgtgaagtaggtaaaatgattggactagaacatcctctcattccggttcaacatcaatatgttgttacatcgactatayctgaagtgaaagctttgaaacgagaactscctgtgctccgtgacctggaaggatcatattatctccgacaggaaagggatgggcttttgtttggtccatatgaaagtcaagagaaaatgaaagttcaggactcctgggtcaccaatggagttcctccaggttttggaaaggaactctttgagtctgatctagatcgaatcatggaacacatcaaagctgccatggaaatggttcctgtcttgaaaaaggctgacatcatcaatgttgtcaatggtcctatcacgtattctcctgacattctgcctatggtggggccccatcagggggtcagaaactactgggtggctataggctttggatatggcataatccacgctggtggggtagggaaatatctcagtgactggatcctgcatggagaacctccttttgatctgatagaattggatcctaatcgctatggcaaatggacaacaacccagtacactgaggccaaagcaagagaatcatatggattcaacaatattgttggttatcctaaagaagaacggtttgctgggaggccgactcaacgagtcagtgggctctatcaaaggctggagtctaagtgttccatggggttccatgctggytgggagcagccgcactggttctacaaaccaggccaggacactcagtacaggccaagttttcgccgcacaaactggtttgagcctgtgggctcggagtataaacaggttatgcaaagagtagsggtaactgacctatcaccatttggcaagtttaacatcaaaggccaagattccattagactactggaccatctctttgcaaatgtcattccaaaggtgggttttacaaatataagtcacatgttaacacccaagggtcgagtgtatgctgagctgactgtttctcaccaatctcctggggagtttcttttaattactggctctggatcagaacttcatgatcttagatggattgaagaagaagcagtcaaaggtggatatgatgttgaaattaaaaacataactgatgagcttggagttcttggagttgctgggccacaggcaagaaaggtccttcagaaactgaccyctgaagatcttagtgatgatgttttcaagtttcttcaaaccaagtccttaaaggtttccaacattcctgtcactgctattaggatatcttatactggtgagctgggttgggagctgtatcacagaagagaagattctgtggcgctgtatgacgctatcatgaatgcaggccaggaggagggaatcgacaattttggaacctatgccatgaatgccttacgcctggagaaagccttcagagcctgggggttagagatgaactgtgatacaaatcctttggaagctggactggaatattttgtgaagttaaataagccagcagacttcataggaaagcaagcactgaaacagattaaagccaaggggctgaaacgaagactggtctgcctcaccttggcaacggatgatgttgatccagagggaaatgaaagcatctggtacaatggcaaggtggttggcaacacgacatctggaagctatagctacagcatccagaagagtctggctttcgcatatgtccctgtacaactaagtgaagtgggacagcaagtggaagttgaactattaggcaaaaattacccagcagtcatcatacaagarcctttggtattgaccgaaccaaccagaaaccggcttcagaaaaaaggtggaaaggacaaaacttgaaaaaagaccttcagcagtcaactgaattagagttgctaatgactgtccttgaaattattataactggctcccaggggaatagaggaaaccaggaattcatttcaaaatcatcaaagtctaaatttagaatcttaatgaaacctttctgttaagtgttttctaagcaagacagaataatagataaatgatttacattgttcttttaaatgaagaaatttgaaatgaatgtttttttatttaccccacattacccaatcagtaaaacatttaggtgtttgctaatatacacaatcattactataacctaattaagggacattttataattttagtaacaaatgcattcggttcttgacagctgaaaacaaattaataaattatcttttacataaaaacatgtacaatattgtttatggatttacttctttgagaaatctttccttagatgaataaatgaaagttttaatttttcatgatatatctgtgatgaaaatagtaaaacttaaca

SEQ ID NO: 6290 - DNA, 2322 bp, Homo sapiens
atgctccgtcccggcgcgcagctgctgcggggcctcctgctgcggagctgcccgctgcagggctcccccgggcgcccgcgctctgtctgcggccgggaaggagaggaaaaaccacccttatctgcagaaacacaatggaaagacagagcagaaacagtgataattggaggtggctgtgttggtgtgagtctggcttatcacctggccaaagcagggatgaaagatgtggtcctgctggagaaatcagagctcacggctggatctacctggcacgcagcaggtttaacaacttactttcatcctggaataaacttgaagaaaatacrttatgatagcatcaaactttatgagaaactggaagaagaaactggkcaggtggtgggattccatcagccaggtagtatcagacttgctaccacccctgtaagggtagatgaatttaaatatcaaatgactcggactggctggcatgcaacagaacagtatctcattgaacctgaaaaaattcaagagatgttccctttactcaacatgaataaggttttagctggattgtataatcctggagatggtcacattgatccttattctctaactatggcactggctgctggggctaggaaatgtggtgcccttttaaaatatcctgcaccagtaacttctctgaaagccaggtcagatggaacatgggacgttgaaacaccacaggggtctatgagagcaaatagaattgtgaatgctgcaggattttgggctcgtgaagtaggtaaaatgattggactagaacatcctctcattccggttcaacatcaatatgttgttacatcgactatayctgaagtgaaagctttgaaacgagaactscctgtgctccgtgacctggaaggatcatattatctccgacaggaaagggatgggcttttgtttggtccatatgaaagtcaagagaaaatgaaagttcaggactcctgggtcaccaatggagttcctccaggttttggaaaggaactctttgagtctgatctagatcgaatcatggaacacatcaaagctgccatggaaatggttcctgtcttgaaaaaggctgacatcatcaatgttgtcaatggtcctatcacgtattctcctgacattctgcctatggtggggccccatcagggggtcagaaactactgggtggctataggctttggatatggcataatccacgctggtggggtagggaaatatctcagtgactggatcctgcatggagaacctccttttgatctgatagaattggatcctaatcgctatggcaaatggacaacaacccagtacactgaggccaaagcaagagaatcatatggattcaacaatattgttggttatcctaaagaagaacggtttgctgggaggccgactcaacgagtcagtgggctctatcaaaggctggagtctaagtgttccatggggttccatgctggytgggagcagccgcactggttctacaaaccaggccaggacactcagtacaggccaagttttcgccgcacaaactggtttgagcctgtgggctcggagtataaacaggttatgcaaagagtagsggtaactgacctatcaccatttggcaagtttaacatcaaaggccaagattccattagactactggaccatctctttgcaaatgtcattccaaaggtgggttttacaaatataagtcacatgttaacacccaagggtcgagtgtatgctgagctgactgtttctcaccaatctcctggggagtttcttttaattactggctctggatcagaacttcatgatcttagatggattgaagaagaagcagtcaaaggtggatatgatgttgaaattaaaaacataactgatgagcttggagttcttggagttgctgggccacaggcaagaaaggtccttcagaaactgaccyctgaagatcttagtgatgatgttttcaagtttcttcaaaccaagtccttaaaggtttccaacattcctgtcactgctattaggatatcttatactggtgagctgggttgggagctgtatcacagaagagaagattctgtggcgctgtatgacgctatcatgaatgcaggccaggaggagggaatcgacaattttggaacctatgccatgaatgccttacgcctggagaaagccttcagagcctgggggttagagatgaactgtgatacaaatcctttggaagctggactggaatattttgtgaagttaaataaggatcagaatagctgctttgcccattttaaggaggaaaatggctgggtgagcagatgggccatcaggccttat

SEQ ID NO: 6291 - DNA, 2784 bp, Homo sapiens
cttgaaagtaaccgcaccttccaaagggcaccgtgcaatcagactgaaaccacrgtgcaaatttaattgccggggaagataacgggccttggtgccctccaagcgtcagctgagtttccaagaagccgggcagcgggcgcccgcgggttcgtctctggctcctcctccgccacagcagccgggggcccgggtcggaggcggcgggggccgagcgcccggcctcgcaagcccacggcccgctgggggtgccgtcccgcgccggggcggagcaggccccggcagcccagttcctcattctatcagcggtacaaggggctggtggcgccacaggcgctgggaccgcgggcggacaaggatgggtccgcgcggcgcggcgagcttgccccgaggccccggacctcggcggctgctcctccccgtcgtcctcccgctgctgctgctgctgttgttggcgccgccgggctcgggcgccggggccagccggccgccccacctggtcttcttgctggcagacgacctaggctggaacgacgtcggcttccacggstyccgcatccgcacgccgcaccwggacgcgctggcggccggcggggtgctcctggacaactactacacgcagccgctgtgcacgccgtcgcggagccagctgctcactggccgctaccagatccgtacaggtttacagcaccaaataatctggccctgtcagcccagctgtgttcctctggatgaaaaactcctgccccagctcctaaaagaagcagkttatactacccatatsgtcggaaaatkrcacctgggaatgtacyggaaagaatgccttccaacccgcyraggatttgatacctactttggatatctcctgggtagtgaagattattattcccatgaacgctgtacattaattgacgctctgaatgtcacacgaygtgctcttgattttcgagatggcgaagaagttgcaacaggatataaaaatatgtrttcaacaaacatattcaccaaaagggctatagccctcataactaaccatccaccagagaagcctctgtttctctaccttgctctccagtctgtgcatgagccccttcaggtccctgaggaatacttgaagccatatgactttatccaagacaagaacaggcatcactatgcaggaatggtgtcccttatggatgaagcagtaggaaatgtcactgcagctttaaaaagcagtgggctctggaacaacacggtgttcatcttttctacagataacggagggcagactttggcagggggtaataactggccccttyraggaagaaaatggagscygtgggaaggaggcgtccgaggggtgggctttgtggcaagccccttgctgaagcagaagggcgtgaagaaccgggagctcatccacatctctgactggctgccaacactcrtgaagcyggccaggggacacaccaatggcacaaagcctctggatggcttcgacgtgtggaaaaccatcagtgaaggaarcccatcccccagaattgagctgctgcataatattgacccraacttcgtggactcttcaccgtgtcccaggaacagcatggctccagcaaaggatgactcttctcttccakaatattcagcctttaacacatctgtccatgctgcaattagacatggaaattggaaactcctcacgggctacccaggctgtggttactggttccctccaccrtctcaatacaatgtttctgagataccctcatcagacccaccaaccaagaccctctggctctttgatattgatcgggaccctgargaaagacatgacctgtccagagaatatcctcacatcgtcacaaagcycctgtcccgcctayagttctaccataaacactcagtccccgtgtasttccctgcacaggacccccgctrtgatcccaaggccactggggtgtggggccsttggatgyaggatttcagggaggctagaaaacctttcaattggaagttggacctcaggccttttctcacractcttgtctcatttgttatcccaacctgggttcacttggcccttctcttgctcttaaaccacaccgaggtgtctaatttcaacccctaatgcatttaagaagctgataaaatctgcaacactcctgctgttggctggagcatgtgtctagaggtgggggtggctgggtttatccccctttcctaagccttgggacagctgggaacttaacttgaaataggaagttctcactgaatcctggaggctggaacagctggctcttttagactcacaagtcagacgttcgattcccctctgccaatagccagttttattggagtgaatcacatttcttacgcaaatgaagggagcagacagtgattaatggttctgttggccaaggcttctccctgtcggtgaaggatcatgttcaggcactccaagtgaaccacccctyttggttcaccccttactcacttatctcatcacagagcataaggcccattttgttgttcaggtcaacagcaaaatgcctgcaccatgactgtggcttttaaaataaagaaatgtgtttttatcgtaatttatttccccccagccattgctcactctgtctagacttcctgccacttccaattcttctgtggcttttcctgcctttccttttgacctcagtagtcctatccctgggaaggccactttgcttctctacctgagcacccctgatttctggaacgctgctgagccctgccttacttttgcccctagggctgaagctagaggcctcc

SEQ ID NO: 6292 - DNA, 3715 bp, Homo sapiens
aagtgaatacatgattttatttaactcattaataaggaaattggtaaggtgttaaaaccaattcaaaggacaatccaaagaacagatcaggaatactaaaataaatrtgcaagcggaggtgaaactgttttccttggtagtggtggaggggaaggattgctactccgctggataaagttcatttgtgtatatataaataagaattattttccattgttatttatctataacttataaagttgtaaacaacttccacggaatcagactcaacctggaagggtatggtctctaggcaatgcaaaaattttcccctacacctgttaacaactataatatctccagacagagtagacagaaagtctggatggcaacgggaatctactggtcatacggctaacttcctaattcaataagcacgtgactaaaggattttttccttccactcacagatatttcaggctaactagatactgtgtgcttcttagtgtcactgcttagtgggggagccagctctgagtggggtcatatccggacaagcgaatgagctatttattcaatgaccacgcaacactccaaatcctcccagggcaacttgaaagtaaccgcaccttccaaagggcaccgtgcaatcagactgtgtgtttggcctcctgtttgctagtggggaggaagcggcttcatgggtgtacactacgcataaatgaatgtgaaaggctatttagacctctgccttttcaccgtcctcccacctgccacaggctgggctcttgtgctagaaatgacttgctagctagacatcatggttcaggatctgagtcagaggtttaaccatttataagcttttttcttatgaaaaattggcactaattataatgtctaactgtcagagttgttgcaggctttacaggagacgcgggctgtgaagatgctttgtaaattgtgaagcgttattaaagaacacatcttttttttttaggaaaccacrgtgcaaatttaattgccggggaagataacgggccttggtgccctccaagcgtcagctgagtttccaagaagccgggcagcgggcgcccgcgggttcgtctctggctcctcctccgccacagcagccgggggcccgggtcggaggcggcgggggccgagcgcccggcctcgcaagcccacggcccgctgggggtgccgtcccgcgccggggcggagcaggccccggcagcccagttcctcattctatcagcggtacaaggggctggtggcgccacaggcgctgggaccgcgggcggacaaggatgggtccgcgcggcgcggcgagcttgccccgaggccccggacctcggcggctgctcctccccgtcgtcctcccgctgctgctgctgctgttgttggcgccgccgggctcgggcgccggggccagccggccgccccacctggtcttcttgctggcagacgacctaggctggaacgacgtcggcttccacggstyccgcatccgcacgccgcaccwggacgcgctggcggccggcggggtgctcctggacaactactacacgcagccgctgtgcacgccgtcgcggagccagctgctcactggccgctaccagatccgtacaggtttacagcaccaaataatctggccctgtcagcccagctgtgttcctctggatgaaaaactcctgccccagctcctaaaagaagcagkttatactacccatatsgtcggaaaatkrcacctgggaatgtacyggaaagaatgccttccaacccgcyraggatttgatacctactttggatatctcctgggtagtgaagattattattcccatgaacgctgtacattaattgacgctctgaatgtcacacgaygtgctcttgattttcgagatggcgaagaagttgcaacaggatataaaaatatgtrttcaacaaacatattcaccaaaagggctatagccctcataactaaccatccaccagagaagcctctgtttctctaccttgctctccagtctgtgcatgagccccttcaggtccctgaggaatacttgaagccatatgactttatccaagacaagaacaggcatcactatgcaggaatggtgtcccttatggatgaagcagtaggaaatgtcactgcagctttaaaaagcagtgggctctggaacaacacggtgttcatcttttctacagataacggagggcagactttggcagggggtaataactggccccttyraggaagaaaatggagscygtgggaaggaggcgtccgaggggtgggctttgtggcaagccccttgctgaagcagaagggcgtgaagaaccgggagctcatccacatctctgactggctgccaacactcrtgaagcyggccaggggacacaccaatggcacaaagcctctggatggcttcgacgtgtggaaaaccatcagtgaaggaarcccatcccccagaattgagctgctgcataatattgacccraacttcgtggactcttcaccgtgtcccaggaacagcatggctccagcaaaggatgactcttctcttccakaatattcagcctttaacacatctgtccatgctgcaattagacatggaaattggaaactcctcacgggctacccaggctgtggttactggttccctccaccrtctcaatacaatgtttctgagataccctcatcagacccaccaaccaagaccctctggctctttgatattgatcgggaccctgargaaagacatgacctgtccagagaatatcctcacatcgtcacaaagcycctgtcccgcctayagttctaccataaacactcagtccccgtgtasttccctgcacaggacccccgctrtgatcccaaggccactggggtgtggggccsttggatgyaggatttcagggaggctagaaaacctttcaattggaagttggacctcaggccttttctcacractcttgtctcatttgttatcccaacctgggttcacttggcccttctcttgctcttaaaccacaccgaggtgtctaatttcaacccctaatgcatttaagaagctgataaaatctgcaacactcctgctgttggctggagcatgtgtctagaggtgggggtggctgggtttatccccctttcctaagccttgggacagctgggaacttaacttgaaataggaagttctcactgaatcctggaggctggaacagctggctcttttagactcacaagtcagacgttcgattcccctctgccaatagccagttttattggagtgaatcacatttcttacgcaaatgaagggagcagacagtgattaatggttctgttggccaaggcttctccctgtcggtgaaggatcatgttcaggcactccaagtgaaccacccctyttggttcaccccttactcacttatctcatcacagagcataaggcccattttgttgttcaggtcaacagcaaaatgcctgcaccatgactgtggcttttaaaataaagaaatgtgtttttatcgtaatttatttccccccagccattgctcactctgtctagacttcctgccacttccaattcttctgtggcttttcctgcctttccttttgacctcagtagtcctatccctgggaaggccactttgcttctctacctgagcacccctgatttctggaacgctgctgagccctgccttacttttgcccctagggctgaagctagaggcctcc

SEQ ID NO: 6293 - DNA, 2587 bp, Homo sapiens
aattcctcggctcctggcgggagtgccggtggcgccccssagtccgcttgtccgtccttccctctctgactctcctaccccgggcctgtctctgcagaggtcaggggaggcgggggcccagcacacgtccccagtggcagcgggagcggcagctacgggttcgcggagcccccgaccccccaagggctagaggagcgctcggcggaccaaagaaagcccgcgagcggctgcgcgcccaccaataggtgcggggctcggagccgcgcagcctgcgccgtccctccctccgcccccgccccgccgccgccgccgccgccgcctccccctcctcctgctcctgccttggctcctccgccgcgcgtctcgcactccgagagccgcagcggcagcggcgcgtcctgcctgcagagagccaggccggagaagccgagcggcgcagaggacgccagggcgcgcgccgcagccacccaccctccggaccgcggcagctgctgacccgccatcgccatggcccgcgggaaagccaaggaggagggcagctggaagaaattcatctggaactcagagaagaaggagtttctgggcaggaccggtggcagttggtttaagatccttctattctacgtaatattttatggctgcctggctggcatcttcatcggaaccatccaagtgatgctgctcaccatcagtgaatttaagcccacatatcaggaccgagtggccccgccaggattaacacagattcctcagatccagaagactgaaatttcctttcgtcctaatgatcccaagagctatgaggcatatgtactgaacatagttagrttcctggaaaagtacaaagattcagcccagagggatgacatgatttttgaagattgtggcgatgtgcccagtgaaccgaaagaacgaggagactttaatcatgaacgaggagagcgaaaggtctgcagattcaagcttgaatggctgggaaattgctctggattaaatgatgaaacttatggctacaaagagggcaaaccgtgcattattataaagctcaaccgagttctaggcttcaaacctaagcctcccaagaatgagtccttggagacttacccagtgatgaagtataacccaaatgtccttcccgttcagtgcactggcaagcgagatgaagataaggataaagttggaaatgtggagtattttggactgggcaactcccctggttttcctctgcagtattatccgtactatggcaaactcctgcagcccaaatacctgcagcccctgctggccgtacagttcaccaatcttaccatggacactgaaattcgcatagagtgtaaggcgtacggtgagaacattgggtacagtgagaaagaccgttttcagggacgttttgatgtaaaaattgaagttaagagctgatcacaagcacaaatctttccmactagccatttaataagttaaaaaaagatacaaaaacaaaaacctactagtcttgaacaaactgtcatacgtatgggacctacacttaatctatatgctttacactagctttctgcatttaataggttagaatgtaaattaaagtgtagcaatagcaacaaaatatttattctactgtaaatgacaaaagaaaaagaaaaattgagccttgggacgtgcccatttttactgtaaattatgattccrtaactgacttgtagtaagcagtgtttctggcccctaagtattgctgccttgtgtattttatttagtgtacagtactacaggtgcatactctggtcatttttcaagccatgttttattgtatctgttttctactttatgtgagcaaggtttgctgtccaaggtgtaaatattcaacgggaataaaactggcatggtaattttttttttttttktkttttttgttttttggctctttcaaaggtaatggcccatcgatgagcatttttaacatactccatagtcttttcctgtggtgttaggtctttwtttttwtttttttcctgggggctggggtgggggtttgtcatgggggaactgccctttaaattttaagtgacactacagaaaaacacaaaaaggtgatgggttgtgttatgcttgtattgaatgctgtcttgacatctcttgccttgtcctccggtatgttytaaagctgtgtctgagatctggatctgcccatcactttggctagtgacagggctaattaatttgctttatacattttcttttactttccttttttcctttctggaggcatcacatgctggtgctgtgtctttatgaatgttttaaccattttcatggtggaagaattttatatttatgcagttgtacaattttatttttttctgcaagaaaaagtgtaatgtatgaaataaaccaaagtcacttgtttgaaaataaatctttattttgaactttataaaaagcaatgcagtaccccatagactggtgttaaatgttgtctacagtgcaaaatccatgttctaacatatgtaataattgccakgagtacagtgctcttgttgatcttgtattcagtcaggttaaaacaayggacaataaaagaatgaacmcattc

SEQ ID NO: 6294 - DNA, 2081 bp, Homo sapiens
aattcctcggctcctggcgggagtgccggtggcgccccssagtccgcttgtccgtccttccctctctgactctcctaccccgggcctgtctctgcagaggtcaggggaggcgggggcccagcacacgtccccagtggcagcgggagcggcagctacgggttcgcggagcccccgaccccccaagggctagaggagcgctcggcggaccaaagaaagcccgcgagcggctgcgcgcccaccaataggtgcggggctcggagccgcgcagcctgcgccgtccctccctccgcccccgccccgccgccgccgccgccgccgcctccccctcctcctgctcctgccttggctcctccgccgcgcgtctcgcactccgagagccgcagcggcagcggcgcgtcctgcctgcagagagccaggccggagaagccgagcggcgcagaggacgccagggcgcgcgccgcagccacccaccctccggaccgcggcagctgctgacccgccatcgccatggcccgcgggaaagccaaggaggagggcagctggaagaaattcatctggaactcagagaagaaggagtttctgggcaggaccggtggcagttggtttaagatccttctattctacgtaatattttatggctgcctggctggcatcttcatcggaaccatccaagtgatgctgctcaccatcagtgaatttaagcccacatatcaggaccgagtggccccgccaggattaacacagattcctcagatccagaagactgaaatttcctttcgtcctaatgatcccaagagctatgaggcatatgtactgaacatagttagrttcctggaaaagtacaaagattcagcccagagggatgacatgatttttgaagattgtggcgatgtgcccagtgaaccgaaagaacgaggagactttaatcatgaacgaggagagcgaaaggtctgcagattcaagcttgaatggctgggaaattgctctggattaaatgatgaaacttatggctacaaagagggcaaaccgtgcattattataaagctcaaccgagttctaggcttcaaacctaaggcaacctcccaagaatgagtccttggagacttacccagtgatgaagtataacccaaatgtccttcccgttcagtgcactggcaagcgagatgaagataaggataaagttggaaatgtggagtattttggactgggcaactcccctggttttcctctgcagtattatccgtactatggcaaactcctgcagcccaaatacctgcagcccctgctggccgtacagttcaccaatcttaccatggacactgaaattcgcatagagtgtaaggcgtacggtgagaacattgggtacagtgagaaagaccgttttcagggacgttttgatgtaaaaattgaagttaagagctgatcacaagcacaaatctttccmactagccatttaataagttaaaaaaagatacaaaaacaaaaacctactagtcttgaacaaactgtcatacgtatgggacctacacttaatctatatgctttacactagctttctgcatttaataggttagaatgtaaattaaagtgtagcaatagcaacaaaatatttattctactgtaaatgacaaaagaaaaagaaaaattgagccttgggacgtgcccatttttactgtaaattatgattccrtaactgacttgtagtaagcagtgtttctggcccctaagtattgctgccttgtgtattttatttagtgtacagtactacaggtgcatactctggtcatttttcaagccatgttttattgtatctgttttctactttatgtgagcaaggtttgctgtccaaggtgtaaatattcaacgggaataaaactggcatggtaattttttttttttttktkttttttgttttttggaactgccctttaaattttaagtgacactacagaaaaacacaaaaaggtgatgggttgtgttatgcttgtattgaatgctgtcttgacatctcttgccttgtcctccggtatgttytaaagctgtgtctgagatctggatctgcccatcactttggctagtga

SEQ ID NO: 6295 - DNA, 1427 bp, Homo sapiens
aaccgtatgatggtggtggtggtggtgtcttcctgtctcaacgatacctattttctagtgctgagatcctgagacagaatcatagtgaaagattcgttttcattgcagagtggtatgatccaaatgcttcacttcttcgacgttatgagcttttattttacccaggggatggatctgttgaaatgcatgatgtaaagaatcatcgcacctttttaaagcggaccaaatatgataacctgcacttggaagatttatttataggcaacaaagtgaatgtcttttctcgacaactggtattaattgactatggggatcaatatacagctcgccagctgggcagtaggaaagaaaaaacgctagccctaattaaaccagatgcaatatcaaaggctggagaaataattgaaataataaacaaagctggatttactataaccaaactcaaaatgatgatgctttcaaggaaagaagcattggattttcatgtagatcaccagtcaagaccctttttcaatgagctgatccagtttattacaactggtcctattattgccatggagattttaagagatgatgctatatgtgaatggaaaagactgctgggacctgcaaactctggagtggcacgcacagatgcttctgaaagcattagagccctctttggaacagatggcataagaaatgcagcgcatggccctgattcttttgcttctgcggccagagaaatggagttgttttttccttcaagtggaggttgtgggccggcaaacactgctaaatttactaattgtacctgttgcattgttaaaccccatgctgtcagtgaaggactgttgggaaagatcctgatggctatccgagatgcaggttttgaaatctcagctatgcagatgttcaatatggatcgggttaatgttgaggaattctatgaagtttataaaggagtagtgaccgaatatcatgacatggtgacagaaatgtattctggcccttgtgtagcaatggagattcaacagaataatgctacaaagacatttcgagaattttgtggacctgctgatcctgaaattgcccggcatttacgccctggaactctcagagcaatctttggtaaaactaagatccagaatgctgttcactgtactgatctgccagaggatggcctattagaggttcaatacttcttcaagatcttggataattagtggtgtggaaagtaaagaagtcacaggttgggacatttagacaagagtgaatcacacacgaggaatgkgttcattcttttattcctgactgaatacaagatcaacaagagcactgtactcmtggcaattattacatatgttagaacatggattttgcactaccagtctatggggtactgcattgctttttataaagttcaaaataaagatttattttcaaac

SEQ ID NO: 6296 - DNA, 2118 bp, Homo sapiens
gaagtaaaactgccggaaacagaataatggcgtctcgtagccccaggcgacagcgtggaggggcgggtctgtcgattggatgaacgcagctgagattactcccagccactaaggacgaagaggtggggcggtggcgtcccaygcctcgtgcgacagtgggcggggctttgttgcctgagtaaccgtatgatggtggtggtggtggtgtcttcctgtctcaacgatacctattttctagtgctgagatcctgagacaatgaatcatagtgaaagattcgttttcattgcagagtggtatgatccaaatgcttcacttcttcgacgttatgagcttttattttacccaggggatggatctgttgaaatgcatgatgtaaagaatcatcgcacctttttaaagcggaccaaatatgataacctgcacttggaagatttatttataggcaacaaagtgaatgtcttttctcgacaactggtattaattgactatggggatcaatatacagctcgccagctgggcagtaggaaagaaaaaacgctagccctaattaaaccagatgcaatatcaaaggctggagaaataattgaaataataaacaaagctggatttactataaccaaactcaaaatgatgatgctttcaaggaaagaagcattggattttcatgtagatcaccagtcaagaccctttttcaatgagctgatccagtttattacaactggtcctattattgccatggagattttaagagatgatgctatatgtgaatggaaaagactgctgggacctgcaaactctggagtggcacgcacagatgcttctgaaagcattagagccctctttggaacagatggcataagaaatgcagcgcatggccctgattcttttgcttctgcggccagagaaatggagttgttttttccttcaagtggaggttgtgggccggcaaacactgctaaatttactaattgtacctgttgcattgttaaaccccatgctgtcagtgaaggactgttgggaaagatcctgatggctatccgagatgcaggttttgaaatctcagctatgcagatgttcaatatggatcgggttaatgttgaggaattctatgaagtttataaaggagtagtgaccgaatatcatgacatggtgacagaaatgtattctggcccttgtgtagcaatggagattcaacagaataatgctacaaagacatttcgagaattttgtggacctgctgatcctgaaattgcccggcatttacgccctggaactctcagagcaatctttggtaaaactaagatccagaatgctgttcactgtactgatctgccagaggatggcctattagaggttcaatacttcttcaagatcttggataattagtggtgtggaaagtaaagaagtcacaggttgggacatttagacaagagtgaatcacacacgaggaatgkgttcattcttttattgtccrttgttttaacctgactgaatacaagatcaacaagagcactgtactcmtggcaattattacatatgttagaacatggattttgcactgtagacaacatttaacaccagtctatggggtactgcattgctttttataaagttcaaaataaagatttattttcaaacaagtgactttggtttatttcatacattacactttttcttgcagaaaaaaataaaattgtacaactgcataaatataaaattcttccaccatgaaaatggttaaaacattcataaagacacagcaccagcatgtgatgcctccagaaaggaaaaaaggaaagtaaaagaaaatgtataaagcaaattaattagccctgtcactagccaaagtgatgggcagatccagatctcagacacagctttaraacataccggaggacaaggcaagagatgtcaagacagcattcaatacaagcataacacaacccatcacctttttgtgtttttctgtagtgtcacttaaaatttaaagggcagttcccccatgacaaacccccaccccagcccccaggaaaaaaawaaaaawaaagacctaacaccacaggaaaagactatggagtatgttaaaaatgctcatcgatgggccattacctttgaaa

SEQ ID NO: 6297 - DNA, 1458 bp, Homo sapiens
agtaaactgagttgatttgactttatctcagtactactcttgacctttcacaactttcgtaggttcacagtctctctttttctaggaacttggctgtgttgtcctgcctcagagacaaattcatctattgtaggcctagcccctgcctttgaaaacaaggaaaggttggtagaacatcaacacagcatggaatttccagggaggtctcatttcaaaacttcataaagaacaagaaccacctggacttctgtgagggcgatgattaaactggcctgagtttgaatgaarggataatgtatgctcaacctgtgactaacaccaaggaggtcaagtggcagaaggtcttgtatgagcgacagccctttcctgataactatgtggaccggcgattcctggaagagctccggaaaaacatccatgctcggaaataccaatattgggctgtggtatttgagtccagtgtggtgatccagcagctgtgcagtgtttgtgtttttgtggttatctggtggtatatggatgagggtcttctggccccccattggcttttagggactggyctggcttcttcactgattgggtatgttttgtttgatctcattgatggaggtgaagggcggaagaagagtgggcagacccggtgggctgacctgaagagtgccctagtcttcattactttcacttatgggttttcaccagtgctgaagacccttacagagtctgtcagcactgacaccatctatgccatgtcagtcttcatgctgttaggccatctcatcttttttgactatggtgccaatgctgccattgtatccagcacactatccttgaacatggccatctttgcttctgtatgcttggcatcacgtcttccccggtccctgcatgccttcatcatggtgacatttgccattcagatttttgccctgtggcccatgttgcagaagaaactaaaggcatgtactcccyggagctatgtgggggtcacactgctttttgcattttcagccgtgggaggcctactgtccattagtgctgtgggagccgtactctttgcccttctgctgatgtctatctcatgtctgtgtycattctacctcattcgcttgcagctttttaaagaaaacattcatgggccttgggatgaagctgaaatcaaggaagacttgtccaggttcctcagttaaattaggacatccattacattattaaagcaagctgatagattagcctyctaactagtatagaacttaaagacagagttccattctggaagcagcatgtcattgtggtaagagaatagagatcaaaaccaaaaaawatgaaccaaaggcttgggtggtgagggtgcttatcctttctgttattttgtagatgaaaaaactttctggggacctcttgaattacatgctgtaacatatgaagtgatgtggtttctattaaaaaaataacacatcc

SEQ ID NO: 6298 - DNA, 1561 bp, Homo sapiens
ggcggacccggaagtgcttggccacagtcgcagccccggcgccccgaagcgggaaaaaggctgggtgccgccgtcccccagctgcgcaaccctaggaactctcggtaaactgagttgatttgactttatctcagtactactcttgacctttcacaactttcgtaggttcacagtctctctttttctaggaacttggctgtgttgtcctgcctcagagacaaattcatctattgtaggcctagcccctgcctttgaaaacaaggaaaggttggtagaacatcaacacagcatggaatttccagggaggtctcatttcaaaacttcataaagaacaagaaccacctggacttctgtgagggcgatgattaaactggcctgagtttgaatgaarggataatgtatgctcaacctgtgactaacaccaaggaggtcaagtggcagaaggtcttgtatgagcgacagccctttcctgataactatgtggaccggcgattcctggaagagctccggaaaaacatccatgctcggaaataccaatattgggctgtggtatttgagtccagtgtggtgatccagcagctgtgcagtgtttgtgtttttgtggttatctggtggtatatggatgagggtcttctggccccccattggcttttagggactggyctggcttcttcactgattgggtatgttttgtttgatctcattgatggaggtgaagggcggaagaagagtgggcagacccggtgggctgacctgaagagtgccctagtcttcattactttcacttatgggttttcaccagtgctgaagacccttacagagtctgtcagcactgacaccatctatgccatgtcagtcttcatgctgttaggccatctcatcttttttgactatggtgccaatgctgccattgtatccagcacactatccttgaacatggccatctttgcttctgtatgcttggcatcacgtcttccccggtccctgcatgccttcatcatggtgacatttgccattcagatttttgccctgtggcccatgttgcagaagaaactaaaggcatgtactcccyggagctatgtgggggtcacactgctttttgcattttcagccgtgggaggcctactgtccattagtgctgtgggagccgtactctttgcccttctgctgatgtctatctcatgtctgtgtycattctacctcattcgcttgcagctttttaaagaaaacattcatgggccttgggatgaagctgaaatcaaggaagacttgtccaggttcctcagttaaattaggacatccattacattattaaagcaagctgatagattagcctyctaactagtatagaacttaaagacagagttccattctggaagcagcatgtcattgtggtaagagaatagagatcaaaaccaaaaaawatgaaccaaaggcttgggtggtgagggtgcttatcctttctgttattttgtagatgaaaaaactttctggggacctcttgaattacatgctgtaacatatgaagtgatgtggtttctattaaaaaaataacacatcc

SEQ ID NO: 6299 - DNA, 3383 bp, Homo sapiens
gagttaaggttcaaacktggcaaagcaagcctccaccagcagaggtggtgagaaagcccgagcacttcacatatcaagaggaaaactattgcccagagaaagaattgacaatctcatagacccagggtctccatttctgsaattatcccagtttgcaggttaccagttatatgacaatgaggaggtgccaggaggtggcattattacaggcattggaagagtatcaggagtagaatgcatgattattgccaatgatgccaccgtcaaaggaggtgcctactacccagtgactgtgaaaaaacaattacrggcccaagaaattgccatgcaaaacaggctccccygcatctacttagttgattygggaggagcatacttacctcgacaagcagatgtgtttccagatcgagaccactttggcygtacattctataatcaggcaattatgtcttctaaaaatattgcacagatcgcagtggtcatggsctcctgcaccgcaggaggagcctatgtgcctgccatggctgatgaaaacatcattgtacgcaagcagggtaccattttcttggcaggaccccccttggttaaagcggcaacyggggaagaagtatctgctgaggatcttggaggtgctgatcttcattgcagaaagtctggagtaagtgaccactgggctttggatgatcatcatgcccttcacttaactaggaaggttgtgaggaatctaaattatcagaagaaattggatgtcaccattgaaccttctgaagagcctttatttcctgctgatgaattgtatggaatagttggtgctaaccttaagaggagctttgatgtccgagaggtcattgctagaatcgtggatggaagcagattcactgagttcaaagccttttatggagacacattagttacaggatttgctcgaatatttgggtacccagtaggtatcgttggaaacaacggagttctcttttctgaatctgcaaaaaagggtactcactttgtccagttatgctgccaaagaaatattcctctgctgttccttcaaaacattactggatttatggttggtagagagtatgaagctgaaggaattgccaaggatggtgccaagatggtggccgctgtggcctgtgcccaagtgcctaagataaccctcatcattgggggctcctatggagccggaaactatgggatgtgtggcagagcrtatagcccaagatttctctacatttggccaaatgctcgtatctcagtgatgggaggagagcaggsagccaatgtgttggccacgataacaaaggaccaaagagcccgggaaggaaagcagttctccagtgctgatgaagcggctttaaaagagcccatcattaagaagtttgaagaggaaggaaacccttactattccagcgcaagggtatgggatgatgggatcattgatccagcagacaccagactggtcttgggtctcagttttagtgcagccctcaacgcaccaatagagaagactgacttcggtatcttcaggatgtaactggaataaaggatgttttctgttggacatgtactgaaaattaacacatgtagtagccttaaaattttagacttctcgaacatgaggctgttacagtaatttttttaacactgtgcattgtacttttctaccttaaaaaaatcagtgaggatatttatttaatgaacatcaattccttttaaattttcttagagaaatttctctgtggctcagttttaccacccataaagcggagacagtaatttayggttatcctttctgacccacaaagtatgaaaagttctgtaatctgtaaactcagttctgtaatctgtattattgagatgattaatataaagttgtattttcactgaaatgattgttttgctggttatgcttggtgatattttagcgggcttatttttgaaaggcatctgttacttcagtggcataaagtgccctcacactgctgtgcagccatcaccaccattcatctccagaatttgttctcagtcccaaactgaaactataccattcaaacaacagcgctccccatttccccctcccccgagcccatgacatctccttattattattttttttttgagacagggtgtttctctgttgcccaggctggagtgcggtggtgtgatctcggctcactgcagcttccacctcccgggttcaagcgattcttgtgcctcagcctcccaagcagctgggactataggcacgcaccaccacacccagctaagttctgtatttttagcagagacgggatttcactaggttgcccaggctggtctcaaactactgacctcaagtgatccacccgcctcggcctcccaaagtgctgggattacaggtgtgagccaccgcgcctgaccacatctccttattcttaaatgtatgtgtttctcatggtttgatttattcttgctgggccatttcagcccctgtcatggcttcactcgccatctaaatgcagatgattactgccttgacggttcttaacccagctctcccctgagctgcaggcctgcatatccagtaggtctactggacatctgtactggttgttgtggaggaacctctggcttgctcattaagtcctactgattttcactatcccctgaatttccccacttatttttgtctttcactatcgcaggccttagaagaggtctacctgcctccagtcttacctagtccagtctaycccctggagttagaatggccatcctgaagtgaaaagtaatgtcacattactcccttcagtgatttcttgtagaagtgccaatccctgaatgccaccaagatcttaatcttcacatctttaatcttatctctttgactcctctttacaccggagaacggctccagctgttctagctctctttcagttctttgaaccttcccaccttagggtctataaggttccctctgcccaaattgttctactctcccttcttcttcaacacatccttcagtttaagcacttgcttctctcagtttaaactccacttccttagggatgtctctgtgacctccctgtgctggattagcttccctactctatgctcttgtaaaacactatctacttcctttgtcataaactcatcattttcctataaacattaatattgtcctcctgctagaatgtaagctccgtgagagcaaggatcctcctgtttaccctgtacctccaatgtctggcacttgtaggtgctcaaatattcgttgaatgaatgaaaaatccatattgtaattgatgtcctctggccacatagttttaaaattaggtgattgattatatgaccgaatagaactatcaaatgttttcctaataaagtcaatatttcaaaca

SEQ ID NO: 6300 - DNA, 3637 bp, Homo sapiens
aggacctgagctcagcttccgccccagccagggaagcggcaggggaaagcaccggctccaggccagcgtgggccgctctctcgctcggtgcccgccgccatgtgggccgtcctgaggttagccctgcggccgtgtgcccgcgcctctcccgccgggccgcgcgcctatcacggggactcggtggcctcgctgggcacccagccggacttgggctctgccctctaccaggagaactacaagcagatgaaagcactagtaaatcagctccatgaacgagtggagcatataaaactaggaggtggtgagaaagcccgagcacttcacatatcaagaggaaaactattgcccagagaaagaattgacaatctcatagacccagggtctccatttctgsaattatcccagtttgcaggttaccagttatatgacaatgaggaggtgccaggaggtggcattattacaggcattggaagagtatcaggagtagaatgcatgattattgccaatgatgccaccgtcaaaggaggtgcctactacccagtgactgtgaaaaaacaattacrggcccaagaaattgccatgcaaaacaggctccccygcatctacttagttgattygggaggagcatacttacctcgacaagcagatgtgtttccagatcgagaccactttggcygtacattctataatcaggcaattatgtcttctaaaaatattgcacagatcgcagtggtcatggsctcctgcaccgcaggaggagcctatgtgcctgccatggctgatgaaaacatcattgtacgcaagcagggtaccattttcttggcaggaccccccttggttaaagcggcaacyggggaagaagtatctgctgaggatcttggaggtgctgatcttcattgcagaaagtctggagtaagtgaccactgggctttggatgatcatcatgcccttcacttaactaggaaggttgtgaggaatctaaattatcagaagaaattggatgtcaccattgaaccttctgaagagcctttatttcctgctgatgaattgtatggaatagttggtgctaaccttaagaggagctttgatgtccgagaggtcattgctagaatcgtggatggaagcagattcactgagttcaaagccttttatggagacacattagttacaggatttgctcgaatatttgggtacccagtaggtatcgttggaaacaacggagttctcttttctgaatctgcaaaaaagggtactcactttgtccagttatgctgccaaagaaatattcctctgctgttccttcaaaacattactggatttatggttggtagagagtatgaagctgaaggaattgccaaggatggtgccaagatggtggccgctgtggcctgtgcccaagtgcctaagataaccctcatcattgggggctcctatggagccggaaactatgggatgtgtggcagagcrtatagcccaagatttctctacatttggccaaatgctcgtatctcagtgatgggaggagagcaggsagccaatgtgttggccacgataacaaaggaccaaagagcccgggaaggaaagcagttctccagtgctgatgaagcggctttaaaagagcccatcattaagaagtttgaagaggaaggaaacccttactattccagcgcaagggtatgggatgatgggatcattgatccagcagacaccagactggtcttgggtctcagttttagtgcagccctcaacgcaccaatagagaagactgacttcggtatcttcaggatgtaactggaataaaggatgttttctgttggacatgtactgaaaattaacacatgtagtagccttaaaattttagacttctcgaacatgaggctgttacagtaatttttttaacactgtgcattgtacttttctaccttaaaaaaatcagtgaggatatttatttaatgaacatcaattccttttaaattttcttagagaaatttctctgtggctcagttttaccacccataaagcggagacagtaatttayggttatcctttctgacccacaaagtatgaaaagttctgtaatctgtaaactcagttctgtaatctgtattattgagatgattaatataaagttgtattttcactgaaatgattgttttgctggttatgcttggtgatattttagcgggcttatttttgaaaggcatctgttacttcagtggcataaagtgccctcacactgctgtgcagccatcaccaccattcatctccagaatttgttctcagtcccaaactgaaactataccattcaaacaacagcgctccccatttccccctcccccgagcccatgacatctccttattattattttttttttgagacagggtgtttctctgttgcccaggctggagtgcggtggtgtgatctcggctcactgcagcttccacctcccgggttcaagcgattcttgtgcctcagcctcccaagcagctgggactataggcacgcaccaccacacccagctaagttctgtatttttagcagagacgggatttcactaggttgcccaggctggtctcaaactactgacctcaagtgatccacccgcctcggcctcccaaagtgctgggattacaggtgtgagccaccgcgcctgaccacatctccttattcttaaatgtatgtgtttctcatggtttgatttattcttgctgggccatttcagcccctgtcatggcttcactcgccatctaaatgcagatgattactgccttgacggttcttaacccagctctcccctgagctgcaggcctgcatatccagtaggtctactggacatctgtactggttgttgtggaggaacctctggcttgctcattaagtcctactgattttcactatcccctgaatttccccacttatttttgtctttcactatcgcaggccttagaagaggtctacctgcctccagtcttacctagtccagtctaycccctggagttagaatggccatcctgaagtgaaaagtaatgtcacattactcccttcagtgatttcttgtagaagtgccaatccctgaatgccaccaagatcttaatcttcacatctttaatcttatctctttgactcctctttacaccggagaacggctccagctgttctagctctctttcagttctttgaaccttcccaccttagggtctataaggttccctctgcccaaattgttctactctcccttcttcttcaacacatccttcagtttaagcacttgcttctctcagtttaaactccacttccttagggatgtctctgtgacctccctgtgctggattagcttccctactctatgctcttgtaaaacactatctacttcctttgtcataaactcatcattttcctataaacattaatattgtcctcctgctagaatgtaagctccgtgagagcaaggatcctcctgtttaccctgtacctccaatgtctggcacttgtaggtgctcaaatattcgttgaatgaatgaaaaatccatattgtaattgatgtcctctggccacatagttttaaaattaggtgattgattatatgaccgaatagaactatcaaatgttttcctaataaagtcaatatttcaaaca

SEQ ID NO: 6301 - DNA, 1743 bp, Homo sapiens
tgcagctggttggctctcactgaccccagggatgtggccaggatcgaaagcaagacggttatygtcacccaagagcaaagagacacagtgcccatccccaaaacaggcctcagccagctcgcctccccgggtggaaggttgagtgcgtcggggatgacattgcctggatgaagtttgacgcacaaggtcatttaagggccatcaacccagaaaatggctttttcggtgtcgctcctgggacttcagtgaagaccaaccccaatgccatcaagaccatccagaagaacacaatctttaccaatgtggccgagaccagcgacgggggcrtttactgggaaggcattgatgagccgctagcttcaggygtcaccatcacgtcctggaagaataaggagtggagctcagaggatggggaaccttgtgcccaccccaactcgaggttctgcacccctgccagccagtgccccatcattgatgctgcctgggagtctccggaaggtgttcccattgaaggcattatctttggaggccgtagacctgctggtgtccctctagtctatgaagctctcagctggcaacatggagtctttgtgggggcggccatgagatcagaggccacagcggctgcagaacataaaggcaaaatcatcatgcatgacccctttgccatgcggcccttctttggctacaacttcggcaaatacctggcccactggcttagcatggcccagcacccagcagccaaactgcccaagatcttccatgtcaactggttccggaaggacaaggaaggcaaattcctctggccaggctttggagagaactccagggtgctggagtggatgttcaaccggatcgatggaaaagccagcaccaagctcacgcccataggctacatccccaaggaggatgccctgaacctgaaaggcctggggcacatcaacatgatggagcttttcmgcatctccaaggaattctgggasaaggaggtggaagacatcgagaagtatctggwggatcaagtcaatgccgacctcccctgtgaaatcgagagagagatccttgccttgaagcaaagaataagccagatgtaatcagggcctgagtgctttacctttaaaatcattccctttcccatccataaggtgcagtaggagcaagagagggcaagtgttcccaaattgacgccaccataataatcatcaccacaccgkgagcagatctgaaaggcacactttgatttttttaaggataagaaccacagaacactgggtagtagctaatgaaattgagaagggaaatcttagcatgcctccaaaaattcacatccaatgcatastttgttcaaatttaaggttactcaggcattgatcttttcagtgttttttcactttagctatgtggattagctagaatgcacaccaaaaaaatacttgagctgtatatatatwgtgtgtgtgtgtgtgtgtgtgtgtgtgtgtgtgcatgtatgtgcacatgtgtctgtgtggtatatttgtgtatgtgtatttgtatgtactgttattgaaaatatatttaatacctttggaaaaatcttgggcaagatgacctactagttttccttgaaaaaaagttgctttgttattaatattgtgcttaaattatttttatacaccattgttccttacctttacataattgcaatatttcccccttactacttcttggaaaaaaattacaaaatgaagttttatagaaaag

SEQ ID NO: 6302 - DNA, 2685 bp, Homo sapiens
agtatttaaagctgggaggttctgccaccaagcacggccttcccactgggaacacaaacttgctggcgggaagagcccggaaagaaacctgtggatctcccttcgagatcatccaaagagaagaaaggtgacctcacattcgtgccccttagcagcactctgcagaaatgcctcctcarctgcaaaacggcctgaacctctcggccaaagttgtccagggaagcctggacagcctrccccaggcagtgagggagtttctcgagaataacgctgagctgtgtcagcctgatcacatccacatctgtgacggctctgaggaggagaatgggcggcttctgggccagatggaggaagagggcatcctcaggcggctgaagaagtatgacaactgctggttggctctcactgaccccagggatgtggccaggatcgaaagcaagacggttatygtcacccaagagcaaagagacacagtgcccatccccaaaacaggcctcagccagctcggtcgctggatgtcagaggaggattttgagaaagcgttcaatgccaggttcccagggtgcatgaaaggtcgcaccatgtacgtcatcccattcagcatggggccgctgggctcrcctctgtcraagatcggcatcgagctgacggattcrccctacgtggtggccagcatgcggatcatgacgcggatgggcacgcccgtcctggaagcastgggcgatggggagtttgtcaaatgcctccattctgtggggtgccctctgcctttacaaaagcctttggtcaacaactggccctgcaacccggagctgacgctcatcgcccacctgcctgaccgcagagagatcatctcctttggcagtgggtayggcgggaactcgctgctcgggaagaagtgctttgctctcaggatggccagccggctggccaaggaggaagggtggctggcagagcacatgctgrttctgggtataaccaaccctgagggtragaagaagtacctggcrgccgcatttcccagcgcctgcgggaagacyaacctggccatgatgaaccccagcctccccgggtggaaggttgagtgcgtcggggatgacattgcctggatgaagtttgacgcacaaggtcatttaagggccatcaacccagaaaatggctttttcggtgtcgctcctgggacttcagtgaagaccaaccccaatgccatcaagaccatccagaagaacacaatctttaccaatgtggccgagaccagcgacgggggcrtttactgggaaggcattgatgagccgctagcttcaggygtcaccatcacgtcctggaagaataaggagtggagctcagaggatggggaaccttgtgcccaccccaactcgaggttctgcacccctgccagccagtgccccatcattgatgctgcctgggagtctccggaaggtgttcccattgaaggcattatctttggaggccgtagacctgctggtgtccctctagtctatgaagctctcagctggcaacatggagtctttgtgggggcggccatgagatcagaggccacagcggctgcagaacataaaggcaaaatcatcatgcatgacccctttgccatgcggcccttctttggctacaacttcggcaaatacctggcccactggcttagcatggcccagcacccagcagccaaactgcccaagatcttccatgtcaactggttccggaaggacaaggaaggcaaattcctctggccaggctttggagagaactccagggtgctggagtggatgttcaaccggatcgatggaaaagccagcaccaagctcacgcccataggctacatccccaaggaggatgccctgaacctgaaaggcctggggcacatcaacatgatggagcttttcmgcatctccaaggaattctgggasaaggaggtggaagacatcgagaagtatctggwggatcaagtcaatgccgacctcccctgtgaaatcgagagagagatccttgccttgaagcaaagaataagccagatgtaatcagggcctgagtgctttacctttaaaatcattccctttcccatccataaggtgcagtaggagcaagagagggcaagtgttcccaaattgacgccaccataataatcatcaccacaccgkgagcagatctgaaaggcacactttgatttttttaaggataagaaccacagaacactgggtagtagctaatgaaattgagaagggaaatcttagcatgcctccaaaaattcacatccaatgcatastttgttcaaatttaaggttactcaggcattgatcttttcagtgttttttcactttagctatgtggattagctagaatgcacaccaaaaaaatacttgagctgtatatatatwgtgtgtgtgtgtgtgtgtgtgtgtgtgtgtgtgcatgtatgtgcacatgtgtctgtgtggtatatttgtgtatgtgtatttgtatgtactgttattgaaaatatatttaatacctttggaaaaatcttgggcaagatgacctactagttttccttgaaaaaaagttgctttgttattaatattgtgcttaaattatttttatacaccattgttccttacctttacataattgcaatatttcccccttactacttcttggaaaaaaattacaaaatgaagttttatagaaaag

SEQ ID NO: 6303 - DNA, 4245 bp, Homo sapiens
ctcctccccgccgcccctcccgcgcgcgtccaccggctccccggctcgcgccgctccatgtagccccggctccccgggcggccgcggaggagggggcgaccacaagatggcggacctctcgctgcttcaggaggacctgcaggaggacgcagacggatttggtgtggatgactacagctcagagtctgatgtgattattataccttcagccctggactttgtctcacaagatraaatgttgacgcccctggggagattggacaagtatgctgcaagtgagaacatatttaacagacaaatggtggcccggagtttgctcgataccttgagggaagtctgcgatgatgaaagagattgtattgctgttttggaaagaattagcagattggccgatgattcagaaccaactgtgagagcggagctgatggaacaggtgcctcacatcgcactgttttgtcaagaaaaccggccttcaataccatatgctttttcaaaattcttactacctattgtggttagataccttgcagatcagaataatcaggtgaggaaaacaagtcaggcagctttgctggctctgttggagcaggagctcattgaacgatttgatgtggagaccaaagtgtgccctgtcctcatagagctgacagccccagatagcaatgatgatgtgaaaacagaagctgtggctataatgtgcaaaatggctcccatggttgggaaggatattacagagcgtcttatcctccctaggttttgtgagatgtgctgcgattgcagaatgtttcacgttcgaaaggtctgtgctgccaattttggagatatttgcagtgtagttggccagcaagctactgaagaaatgttgctgcccagatttttccagctttgttctgataatgtatggggagtccgaaaggcttgtgctgaatgcttcatggcggtttcatgtgcaacatgtcaagaaatccgacggaccaaattatcagcactttttattaatttgatcagtgatccttcacgttgggttcgccaagcagcttttcagtctctgggacctttcatatctacttttgctaatccatctagctcaggccagtattttaaagaagaaagcaaaagttcagaagagatgtcagtagaaaacaaaaataggaccagagatcaagaagccccagaggatgtacaagtcaggccagaggatactccttcagatctcagtgttagtaattccagtgtcatactggaaaacacgatggaagaccatgctgctgaggcatccgggaagcctctaggtgaaattagtgttccactggacagctctttactttgtactttgtcctcagaatctcaccaggaagcagctagtaatgagaatgataaaaaacctggtaactacaaatctatgttacgaccagaggttggcaccacttcacaagattcagctctcttagatcaggaattgtataactccttccatttctggaggactcctcttcctgaaatagatctagacrtagagcttgaacagaactctgggggaaaacccagcccagagggaccagaggaagaatctgagggccctgtgcccagttctccaaacatcaccatggccaccagaaaggaactggaagaaatgatagaaaatctagagccccacattgatgatccagatgttaaagcacaagtggaagtgctgtccgctgcactacgtgcttccagcctggatgcacatgaagagaccatcagtatagaaaagagaagtgatttgcaagatgaactggatataaatgagctaccaaattgtaaaataaatcaagaagattctgtgcctttaatcagcgatgctgttgagaatatggactccactcttcactatattcacarcgattcagacttgagcaacaatagcagttttagccctgatgaggaaaggagaactaaagtacaagatgttgtacctcaggcgttgttagatcagtatttatctatgactgacccttctcgtgcacagacggttgacactgaaattgctaagcactgtgcatatagcctccctggtgtggccttgacactcggaagacagaattggcactgcctgagagagacgtatgagactctggcctcagacatgcagtggaaagttcgacgaactctagcattctccatccacgagcttgcagttattcttggagatcaattgacagctgcagatctggttccaatttttaatggatttttaaaagacctcgatgaagtcaggataggtgttcttaaacacttgcatgattttctgaagcttcttcatattgacaaaagaagagaatatctttatcaacttcaggagtttttggtgacagataatagtagaaattggcggtttcgagctgaactggctgaacagctgattttacttctagagttatatagtcccagagatgtttatgactatttacgtcccattgctctgaatctgtgtgcagacaaagtttcttctgttcgttggatttcctacaagttggtcagcgagatggtgaagaagctgcacgcggcaacaccaccaacgttcggagtggacctcatcaatgagcttgtggagaactttggcagatgtcccaagtggtctggtcggcaagcctttgtctttgtctgccagactgtcattgaggatgactgccttcccatggaccagtttgctgtgcatctcatgccgcatctgctaaccttagcaaatgacagggttcctaacgtgcgagtgctgcttgcaaagacattaagacaaactctactagaaaaagactatttcttggcctctgccagctgccaccaggaggctgtggagcagaccatcatggctcttcagatggaccgtgacagcgatgtcaagtattttgcaagcatccaccctgccagtaccaaaatctccgaagatgccatgagcacagcgtcctcaacctactagaaggcttgaatctcggtgtctttcctgcttccatgagagccgaggttcagtgggcattcgccacgcatgtgacctgggatagctttcgggggaggagagaccttcctctcctgcggacttcattgcaggtgcaagttgcctacacccaataccagggatttcaagagtcaagagaaagtacagtaaacactattatcttatcttgactttaaggggaaataatttctcagaggattataattgtcaccgaagccttaaatccttctgtcttcctgactgaatgaaacttgaattggcagagcattttccttatggaagggatgagattcccagagacctgcattgctttctcctggttttatttaacaatcgacaaatgaaattcttacagcctgaaggcagacgtgtgcccagatgtgaaagagaccttcagtatcagccctaactcttctctcccaggaaggacttgctgggctctgtggccagctgtccagcccagccctgtgtgtgaatcgtttgtgacgtgtgcaaatgggaaaggaggggtttttacatctcctaaaggacctgatgccaacacaagtaggattgacttaaactcttaagcgcagcatattgctgtacacatttacagaatggttgctgagtgtctgtgtctgattttttcatgctggtcatgacctgaaggaaatttattagacgtatwatgtatgtctggtgtttttaacttgatcatgatcagctctgaggtgcaacttcttcacatactgtacatacctgtgaccactcttgggagtgctgcagtctttaatcatgctgtttaaactgttgtggcacaagttctcttgtccaaataaaatttattaataagatctatagagagagatatatacacttttgattgttttctagatgtctaccaataaatgcaatttgtgacctgtattaatgatttaaagtggggaaactagattaaaatatttgtcttttaactagtttattagtttctctggaatctgcctgtgtccctgggtttgggttttgctcttggcagcagcaggtgcctcttgggtgctcctcctgctcctgcctgcagccctaagagcaggtgggtgccgagtgtctggcacagcttggatgccgcccactgaagacagcagaggggggttgtcttgaagctcccgagacacagtcaagcatctctgagcctcgatgtcttcgtcagtaaaatgggaattagtaaaacctgccctgtttctcacagggttgttttgcaggcaaatgag

SEQ ID NO: 6304 - DNA, 4182 bp, Homo sapiens
cgcccggccgggttccggcactcgccgcagggtcccggccggcggcaggttgcgcgcccccgtccgcagcgctcggcgtgagggcggctcgggaggagggtacctctcgctgcttcaggaggacctgcaggaggacgcagacggatccctggactttgtctcacaagatraaatgttgacgcccctggggagattggacaagtatgctgcaagtgagaacatatttaacagacaaatggtggcccggagtttgctcgataccttgagggaagtctgcgatgatgaaagagattgtattgctgttttggaaagaattagcagattggccgatgattcagaaccaactgtgagagcggagctgatggaacaggtgcctcacatcgcactgttttgtcaagaaaaccggccttcaataccatatgctttttcaaaattcttactacctattgtggttagataccttgcagatcagaataatcaggtgaggaaaacaagtcaggcagctttgctggctctgttggagcaggagctcattgaacgatttgatgtggagaccaaagtgtgccctgtcctcatagagctgacagccccagatagcaatgatgatgtgaaaacagaagctgtggctataatgtgcaaaatggctcccatggttgggaaggatattacagagcgtcttatcctccctaggttttgtgagatgtgctgcgattgcagaatgtttcacgttcgaaaggtctgtgctgccaattttggagatatttgcagtgtagttggccagcaagctactgaagaaatgttgctgcccagatttttccagctttgttctgataatgtatggggagtccgaaaggcttgtgctgaatgcttcatggcggtttcatgtgcaacatgtcaagaaatccgacggaccaaattatcagcactttttattaatttgatcagtgatccttcacgttgggttcgccaagcagcttttcagtctctgggacctttcatatctacttttgctaatccatctagctcaggccagtattttaaagaagaaagcaaaagttcagaagagatgtcagtagaaaacaaaaataggaccagagatcaagaagccccagaggatgtacaagtcaggccagaggatactccttcagatctcagtgttagtaattccagtgtcatactggaaaacacgatggaagaccatgctgctgaggcatccgggaagcctctaggtgaaattagtgttccactggacagctctttactttgtactttgtcctcagaatctcaccaggaagcagctagtaatgagaatgataaaaaacctggtaactacaaatctatgttacgaccagaggttggcaccacttcacaagattcagctctcttagatcaggaattgtataactccttccatttctggaggactcctcttcctgaaatagatctagacrtagagcttgaacagaactctgggggaaaacccagcccagagggaccagaggaagaatctgagggccctgtgcccagttctccaaacatcaccatggccaccagaaaggaactggaagaaatgatagaaaatctagagccccacattgatgatccagatgttaaagcacaagtggaagtgctgtccgctgcactacgtgcttccagcctggatgcacatgaagagaccatcagtatagaaaagagaagtgatttgcaagatgaactggatataaatgagctaccaaattgtaaaataaatcaagaagattctgtgcctttaatcagcgatgctgttgagaatatggactccactcttcactatattcacarcgattcagacttgagcaacaatagcagttttagccctgatgaggaaaggagaactaaagtacaagatgttgtacctcaggcgttgttagatcagtatttatctatgactgacccttctcgtgcacagacggttgacactgaaattgctaagcactgtgcatatagcctccctggtgtggccttgacactcggaagacagaattggcactgcctgagagagacgtatgagactctggcctcagacatgcagtggaaagttcgacgaactctagcattctccatccacgagcttgcagttattcttggagatcaattgacagctgcagatctggttccaatttttaatggatttttaaaagacctcgatgaagtcaggataggtgttcttaaacacttgcatgattttctgaagcttcttcatattgacaaaagaagagaatatctttatcaacttcaggagtttttggtgacagataatagtagaaattggcggtttcgagctgaactggctgaacagctgattttacttctagagttatatagtcccagagatgtttatgactatttacgtcccattgctctgaatctgtgtgcagacaaagtttcttctgttcgttggatttcctacaagttggtcagcgagatggtgaagaagctgcacgcggcaacaccaccaacgttcggagtggacctcatcaatgagcttgtggagaactttggcagatgtcccaagtggtctggtcggcaagcctttgtctttgtctgccagactgtcattgaggatgactgccttcccatggaccagtttgctgtgcatctcatgccgcatctgctaaccttagcaaatgacagggttcctaacgtgcgagtgctgcttgcaaagacattaagacaaactctactagaaaaagactatttcttggcctctgccagctgccaccaggaggctgtggagcagaccatcatggctcttcagatggaccgtgacagcgatgtcaagtattttgcaagcatccaccctgccagtaccaaaatctccgaagatgccatgagcacagcgtcctcaacctactagaaggcttgaatctcggtgtctttcctgcttccatgagagccgaggttcagtgggcattcgccacgcatgtgacctgggatagctttcgggggaggagagaccttcctctcctgcggacttcattgcaggtgcaagttgcctacacccaataccagggatttcaagagtcaagagaaagtacagtaaacactattatcttatcttgactttaaggggaaataatttctcagaggattataattgtcaccgaagccttaaatccttctgtcttcctgactgaatgaaacttgaattggcagagcattttccttatggaagggatgagattcccagagacctgcattgctttctcctggttttatttaacaatcgacaaatgaaattcttacagcctgaaggcagacgtgtgcccagatgtgaaagagaccttcagtatcagccctaactcttctctcccaggaaggacttgctgggctctgtggccagctgtccagcccagccctgtgtgtgaatcgtttgtgacgtgtgcaaatgggaaaggaggggtttttacatctcctaaaggacctgatgccaacacaagtaggattgacttaaactcttaagcgcagcatattgctgtacacatttacagaatggttgctgagtgtctgtgtctgattttttcatgctggtcatgacctgaaggaaatttattagacgtatwatgtatgtctggtgtttttaacttgatcatgatcagctctgaggtgcaacttcttcacatactgtacatacctgtgaccactcttgggagtgctgcagtctttaatcatgctgtttaaactgttgtggcacaagttctcttgtccaaataaaatttattaataagatctatagagagagatatatacacttttgattgttttctagatgtctaccaataaatgcaatttgtgacctgtattaatgatttaaagtggggaaactagattaaaatatttgtcttttaactagtttattagtttctctggaatctgcctgtgtccctgggtttgggttttgctcttggcagcagcaggtgcctcttgggtgctcctcctgctcctgcctgcagccctaagagcaggtgggtgccgagtgtctggcacagcttggatgccgcccactgaagacagcagaggggggttgtcttgaagctcccgagacacagtcaagcatctctgagcctcgatgtcttcgtcagtaaaatgggaattagtaaaacctgccctgtttctcacagggttgttttgcaggcaaatgag

SEQ ID NO: 6305 - DNA, 4194 bp, Homo sapiens
ctcctccccgccgcccctcccgcgcgcgtccaccggctccccggctcgcgccgctccatgtagccccggctccccgggcggccgcggaggagggggcgaccacaagatggcggacctctcgctgcttcaggaggacctgcaggaggacgcagacggatccctggactttgtctcacaagatraaatgttgacgcccctggggagattggacaagtatgctgcaagtgagaacatatttaacagacaaatggtggcccggagtttgctcgataccttgagggaagtctgcgatgatgaaagagattgtattgctgttttggaaagaattagcagattggccgatgattcagaaccaactgtgagagcggagctgatggaacaggtgcctcacatcgcactgttttgtcaagaaaaccggccttcaataccatatgctttttcaaaattcttactacctattgtggttagataccttgcagatcagaataatcaggtgaggaaaacaagtcaggcagctttgctggctctgttggagcaggagctcattgaacgatttgatgtggagaccaaagtgtgccctgtcctcatagagctgacagccccagatagcaatgatgatgtgaaaacagaagctgtggctataatgtgcaaaatggctcccatggttgggaaggatattacagagcgtcttatcctccctaggttttgtgagatgtgctgcgattgcagaatgtttcacgttcgaaaggtctgtgctgccaattttggagatatttgcagtgtagttggccagcaagctactgaagaaatgttgctgcccagatttttccagctttgttctgataatgtatggggagtccgaaaggcttgtgctgaatgcttcatggcggtttcatgtgcaacatgtcaagaaatccgacggaccaaattatcagcactttttattaatttgatcagtgatccttcacgttgggttcgccaagcagcttttcagtctctgggacctttcatatctacttttgctaatccatctagctcaggccagtattttaaagaagaaagcaaaagttcagaagagatgtcagtagaaaacaaaaataggaccagagatcaagaagccccagaggatgtacaagtcaggccagaggatactccttcagatctcagtgttagtaattccagtgtcatactggaaaacacgatggaagaccatgctgctgaggcatccgggaagcctctaggtgaaattagtgttccactggacagctctttactttgtactttgtcctcagaatctcaccaggaagcagctagtaatgagaatgataaaaaacctggtaactacaaatctatgttacgaccagaggttggcaccacttcacaagattcagctctcttagatcaggaattgtataactccttccatttctggaggactcctcttcctgaaatagatctagacrtagagcttgaacagaactctgggggaaaacccagcccagagggaccagaggaagaatctgagggccctgtgcccagttctccaaacatcaccatggccaccagaaaggaactggaagaaatgatagaaaatctagagccccacattgatgatccagatgttaaagcacaagtggaagtgctgtccgctgcactacgtgcttccagcctggatgcacatgaagagaccatcagtatagaaaagagaagtgatttgcaagatgaactggatataaatgagctaccaaattgtaaaataaatcaagaagattctgtgcctttaatcagcgatgctgttgagaatatggactccactcttcactatattcacarcgattcagacttgagcaacaatagcagttttagccctgatgaggaaaggagaactaaagtacaagatgttgtacctcaggcgttgttagatcagtatttatctatgactgacccttctcgtgcacagacggttgacactgaaattgctaagcactgtgcatatagcctccctggtgtggccttgacactcggaagacagaattggcactgcctgagagagacgtatgagactctggcctcagacatgcagtggaaagttcgacgaactctagcattctccatccacgagcttgcagttattcttggagatcaattgacagctgcagatctggttccaatttttaatggatttttaaaagacctcgatgaagtcaggataggtgttcttaaacacttgcatgattttctgaagcttcttcatattgacaaaagaagagaatatctttatcaacttcaggagtttttggtgacagataatagtagaaattggcggtttcgagctgaactggctgaacagctgattttacttctagagttatatagtcccagagatgtttatgactatttacgtcccattgctctgaatctgtgtgcagacaaagtttcttctgttcgttggatttcctacaagttggtcagcgagatggtgaagaagctgcacgcggcaacaccaccaacgttcggagtggacctcatcaatgagcttgtggagaactttggcagatgtcccaagtggtctggtcggcaagcctttgtctttgtctgccagactgtcattgaggatgactgccttcccatggaccagtttgctgtgcatctcatgccgcatctgctaaccttagcaaatgacagggttcctaacgtgcgagtgctgcttgcaaagacattaagacaaactctactagaaaaagactatttcttggcctctgccagctgccaccaggaggctgtggagcagaccatcatggctcttcagatggaccgtgacagcgatgtcaagtattttgcaagcatccaccctgccagtaccaaaatctccgaagatgccatgagcacagcgtcctcaacctactagaaggcttgaatctcggtgtctttcctgcttccatgagagccgaggttcagtgggcattcgccacgcatgtgacctgggatagctttcgggggaggagagaccttcctctcctgcggacttcattgcaggtgcaagttgcctacacccaataccagggatttcaagagtcaagagaaagtacagtaaacactattatcttatcttgactttaaggggaaataatttctcagaggattataattgtcaccgaagccttaaatccttctgtcttcctgactgaatgaaacttgaattggcagagcattttccttatggaagggatgagattcccagagacctgcattgctttctcctggttttatttaacaatcgacaaatgaaattcttacagcctgaaggcagacgtgtgcccagatgtgaaagagaccttcagtatcagccctaactcttctctcccaggaaggacttgctgggctctgtggccagctgtccagcccagccctgtgtgtgaatcgtttgtgacgtgtgcaaatgggaaaggaggggtttttacatctcctaaaggacctgatgccaacacaagtaggattgacttaaactcttaagcgcagcatattgctgtacacatttacagaatggttgctgagtgtctgtgtctgattttttcatgctggtcatgacctgaaggaaatttattagacgtatwatgtatgtctggtgtttttaacttgatcatgatcagctctgaggtgcaacttcttcacatactgtacatacctgtgaccactcttgggagtgctgcagtctttaatcatgctgtttaaactgttgtggcacaagttctcttgtccaaataaaatttattaataagatctatagagagagatatatacacttttgattgttttctagatgtctaccaataaatgcaatttgtgacctgtattaatgatttaaagtggggaaactagattaaaatatttgtcttttaactagtttattagtttctctggaatctgcctgtgtccctgggtttgggttttgctcttggcagcagcaggtgcctcttgggtgctcctcctgctcctgcctgcagccctaagagcaggtgggtgccgagtgtctggcacagcttggatgccgcccactgaagacagcagaggggggttgtcttgaagctcccgagacacagtcaagcatctctgagcctcgatgtcttcgtcagtaaaatgggaattagtaaaacctgccctgtttctcacagggttgttttgcaggcaaatgag

SEQ ID NO: 6306 - DNA, 800 bp, Homo sapiens
atgtagactggaagtccatattttatttctctagtgacatatttacagttcaatataaattaaaggcctgcttgtatgccaaatccaggtcccttgggtggttcagtcaaaggggtargacctccagctggctcacaagaraagcgtccactccttggcccaggttttgggattttgccagccttgagctcatcaataatttcttcaatatccytagctgtcaaatcytcatagtaattgtcatttatttgaaccattggtgcgttcacacaggcccctaaacattccacttctacaagagtgaaaagtttgtcaggtgtastctccccaagctttattccaagctttttctgaatggcctccagtatgctgtcagagtttggaagcatgcagggtgtagtagtgcagrcctgaatgtgatactttycractggctttcgattatacattgtataaaaagttgctacttcatatactctyattggaggtacttgtaaaacttctgcaaccttgttcatagcagagatgggcaaccacccattctgcctttgggctaaatccaggactggaagaacagctgctgctttatggccttctggatagtttttwacaattgcctctatcctcttatagttttctggtgtgaaatcaaatggagtatcagggttattctcaggagtatctctgtgcacaaataaagctcctccagctccattttgcatagctgtcttatgcaattcctcacatgtcttccgtgggcggtraggccagcsgcccgggcccggagcgccgcggagaag

SEQ ID NO: 6307 - DNA, 4698 bp, Homo sapiens
gggagcggcgaggcggcggcggcggcgagtggcggcccgcgaggcccgggaggcggtggccgaggcccaggcggtggcggcggcggcccaggaggcggcggacggggagctgcgggagcaggcccggcctggctctctagcggccgcctggctgcagcatgcgcgcccgccgggggctgctgcggctgccgcgccgctcgctgctcgccgcgctcttcttcttttctctctcgtcctcgctgctgtacttcgtctatgtggcgcccggcatagtgaacacctacctcttcatgatgcaagcccaaggcattctgatccgggacaacgtgagaacaatcrgtgctcaggtttatgagcaggtgcttcggagtgcttatgcyaagaggaacagcagtgtaaatgactcagattatcctcttgacttgaaccacagtgaaaccttcctgcaaactacaacatttcttcctgaagacttcacctactttgcaaaccatacctgccctgaaagactcccttccatgaagggcccaatagacataaacatgagtgaaattggaatggattacattcatgaactcttctccaaagacccaaccatcaagctcggaggtcactggaagccttctgattgcatgcctcggtggaaggtggcgatccttatccccttccggaaccgccacgagcacctcccagtcctgttcagacacctgcttcccatgctccagcgccagcgcytgcagtttgcattttatgtggttgaacaagttggtacccaaccctttaatcgagccatgcttttcaacgttggctttcaagargcaatgaaagacttggattgggactgtttgatttttcatgatgtagatcacataccggaaagtgatcgcaactattatggatgtggacagatgccgaggcattttgcaaccaaattggataagtatatgtatctgcttccttataccgagttctttggyggagtgagtggcttaacagtggaacaatttcggaaaatcaatggctttcctaatgctttctggggttggggtggagaagatgacgacctctggaacagagtacagaatgcaggctattctgtgagccggccagagggtgacacaggaaagtacaagtccattcctcatcaccatcgaggagaagtccagtttcttggaaggtatgctctgctgaggaagtcaaaagaacggcaagggctggatggcctcaacaacctgaactactttgcaaacatcacatacracgccttgkataaaaacataactgtcaacctgacacccgagctggctcaggtgaacgagtactgagaggagagaatgtacgtttgctttacccaccgccaccaagaaagcagtccgatgagatttttttttggaggggggagggtctacacagcaagagaacagaaatactgtgtctcatgaaggatcacagagttcagggggaaaatgtgacagcacacgcacaaacgccttcactggatcagccgctggaactgagggagtgagcttggggacttccttcgtcagcactggctttctgttttcacaagacagacgtctgtcccgctgctctctccccatctcctaccccacatcctgtcttagccgcagtctccagaacccatgatgaactgtgatctgccgtggtcctgccgtggtcctgccgtggagcctgtccctacacatgaccttggagcctcttggccttcagagcagaggcaaacccaccacagggcagctgcgttttaggaagagcaaatgaaactccacaccattcttctagatctctggtgttctctttggtttcatttttttwaaaaattaccttctttgggtggggattgagggtggaggggagggtgtttgggaaagataaatagacataaatatataacaatcacttcttgaagaagtataattgtaaataagccatgtaaaatgcctttttaaaatttaattttctagctggctccaattcaaattgaggatttatgtattaggccacttacttggttggcaagtgcaggaactcagttaaaatgcagttgaagaatgtcatctccmgaattgctgtcactttggcgagggagtggatatagggcatgtcacaaaagaacaaaataacccgacctttattgctgggagctggcttctgtccctttcttccccccccccacgagtcttgcccttgacttctgctctggattcactcttccctgtcggccgcgcatgtgctcatcccactctccgctaagcgggaggctgctgttagagcaggctgcttcctgcctaaagcaggcccttcggggctcgctgcacacacatctctggctctccaggcttcgtgttctgtcttttcatcagcatggcggggcggggggcggggggcgggggtgtgtatgggaatccctccccctcttactttttctcttgtggaacttggccacagtttctgaacaatgtgcctacattaccagctggcttcagtgattcctctgtgtccctttttggtttctggaaagattctttgtcaacattagtaactgatacatagaaccaaggagcactcaaatagggagccaggagccagggagctggtgacacttgtgtgctgtggggcagctgggatccaggtaagaccggattgaagctttgaaattagactaacaaagctccagacagcaagagcccaggtgcactgctcacacccccacctgcattttgaagtcatattattttttgttttgttttttaagacggtctggctctgtcgcctaagctggagtgtggtggcacgatcacagctcactgcagcctccatctcctaggctcaagccattttcccacctcagcctcccgagtagctgggactacaggtgcacaccaccacacctggctaattttttgtatttttagtagagacrggggtttcttccatgttgcccaggstggtctcgaactcctggactcaagcaatccgcccaccttgacttcccaaagtgctgggattatgggcgggtgtgagccattgcgcccagccttgaagtcatgttctaaattgtatttgaatttgtgcctctttgtttttccccaaaccaaagccctcaaattgtagtctctgtcggcttctgcagaattctggaaaatgccagttttcctcccccgcccttgttttccataaaacatatttatatattgtgatgaggagtactttctgaagagtacttcgtatttttttttaattgccttgtttgccttcaacttccttgattttcatagtttacatgggtgtgtgtaggggtgtgtgtgtgtatgtgtgtgggttagggcttttttcgttgcatgtgatggttctgtggacatatgatccccacaaactgtgggagtgattggccaggccttgttttktttgtttgtttgtttgtgtttttgttyttttgaagaatagagtggtatttagaaaataaattgcattgcaaagctcttatcggctcatatgagagagcaggttcctgcccttgaaaatgccggtaagctatagcatatgttttttaagacttaagcatttcatgctttaaaataccttcacaagtgaacattacacacagaagttcatttggttttcctttgttttatggtgcatatagcaataaagacccccctccaccctgcaacccccatcccccaccgggcctttgtccctgccttggcttttctccccttctcattctcctctcccctttcctcactgaaggctgtgagttgctttcaatgtgacaacactatgatgtcatttggaaggatttgccaggacagactgattctgagtcctgggtgccgtatgtgtatgcggcagtgttgtcaggcgatcttktttgaagctctatgttgccataattaccatcaagtacacactgttggcaaaaggctaacacctgactttagaaaatgctgatttgagaacaaaaggaaaggtcttttttcactgcttaaagtggggtcrctttgatacctttgcggtcatgtctgtgtctgatgagtgtagaatctctggatgtgcactgtcagtcatgtgtccaccaggcctcgaatatcatatgggaaatgtcatagttaaaaacgtacagccaggcccgtgtgctgttaatagtgtgaaattgtcatgttaaaaaaaaaaamaaaacaggaaccaaatgtgaccttgtgcatatattggtagctgaaaatcttcaaggctactgatgggtggccccttaatcttgtctttgattgctgtgtgcagggaaaggtgtccccgtttgttcatgctgttttggggggtgggggggtatttgcaagaatactcattttgacataataggtcctcttgtcagagatcctctaccacagacattaatagctgagcaggagccacatggattgattgtatccactcaccattgacgatggcattgagcgtagctagcttatttccatcactacgtgtttttgagcttgctcttacrttttaagaggtgccaggggtacatttttgcactgaaatctaaagatgttttaaaaaacacttttcacaaaaatagtcctttgtcattacattatttactcatgtgtttgtacatttttgtatgttaatttatgaatgattttttcrgtaaaaaatacatattcaagaaccaaa

SEQ ID NO: 6308 - DNA, 3163 bp, Homo sapiens
gggaggcggtggccgaggcccaggcggtggcggcggcggcccaggaggcggcggacggggagctgcgggagcaggcccggcctggctctctagcggccgcctggctgcagcatgcgcgcccgccgggggctgctgcggctgccgcgccgctcgctgctcgccgcgctcttcttcttttctctctcgtcctcgctgctgtacttcgtctatgtggcgcccggcatagtgaacacctacctcttcatgatgcaagcccaaggcattctgatccgggacaacgtgagaacaatcrgtgctcaggtttatgagcaggtgcttcggagtgcttatgcyaagaggaacagcagtgtaaatgactcagattatcctcttgacttgaaccacagtgaaaccttcctgcaaactacaacatttcttcctgaagacttcacctactttgcaaaccatacctgccctgaaagactcccttccatgaagggcccaatagacataaacatgagtgaaattggaatggattacattcatgaactcttctccaaagacccaaccatcaagctcggaggtcactggaagccttctgattgcatgcctcggtggaaggtggcgatccttatccccttccggaaccgccacgagcacctcccagtcctgttcagacacctgcttcccatgctccagcgccagcgcytgcagtttgcattttatgtggttgaacaagttggtacccaaccctttaatcgagccatgcttttcaacgttggctttcaagargcaatgaaagacttggattgggactgtttgatttttcatgatgtagatcacataccggaaagtgatcgcaactattatggatgtggacagatgccgaggcattttgcaaccaaattggataagtatatgtatctgcttccttataccgagttctttggyggagtgagtggcttaacagtggaacaatttcggaaaatcaatggctttcctaatgctttctggggttggggtggagaagatgacgacctctggaacagagtacagaatgcaggctattctgtgagccggccagagggtgacacaggaaagtacaagtccattcctcatcaccatcgaggagaagtccagtttcttggaaggtatgctctgctgaggaagtcaaaagaacggcaagggctggatggcctcaacaacctgaactactttgcaaacatcacatacracgccttgkataaaaacataactgtcaacctgacacccgagctggctcaggtgaacgagtactgagaggagagaatgtacgtttgctttacccaccgccaccaagaaagcagtccgatgagatttttttttggaggggggagggtctacacagcaagagaacagaaatactgtgtctcatgaaggatcacagagttcagggggaaaatgtgacagcacacgcacaaacgccttcactggatcagccgctggaactgagggagtgagcttggggacttccttcgtcagcactggctttctgttttcacaagacagacgtctgtcccgctgctctctccccatctcctaccccacatcctgtcttagccgcagtctccagaacccatgatgaactgtgatctgccgtggtcctgccgtggtcctgccgtggagcctgtccctacacatgaccttggagcctcttggccttcagagcagaggcaaacccaccacagggcagctgcgttttaggaagagcaaatgaaactccacaccattcttctagatctctggtgttctctttggtttcatttttttwaaaaattaccttctttgggtggggattgagggtggaggggagggtgtttgggaaagataaatagacataaatatataacaatcacttcttgaagaagtataattgtaaataagccatgtaaaatgcctttttaaaatttaattttctagctggctccaattcaaattgaggatttatgtattaggccacttacttggttggcaagtgcaggaactcagttaaaatgcagttgaagaatgtcatctccmgaattgctgtcactttggcgagggagtggatatagggcatgtcacaaaagaacaaaataacccgacctttattgctgggagctggcttctgtccctttcttccccccccccacgagtcttgcccttgacttctgctctggattcactcttccctgtcggccgcgcatgtgctcatcccactctccgctaagcgggaggctgctgttagagcaggctgcttcctgcctaaagcaggcccttcggggctcgctgcacacacatctctggctctccaggcttcgtgttctgtcttttcatcagcatggcggggcggggggcggggggcgggggtgtgtatgggaatccctccccctcttactttttctcttgtggaacttggccacagtttctgaacaatgtgcctacattaccagctggcttcagtgattcctctgtgtccctttttggtttctggaaagattctttgtcaacattagtaactgatacatagaaccaaggagcactcaaatagggagccaggagccagggagctggtgacacttgtgtgctgtggggcagctgggatccagggagaacgagcgatggtacagaagcagaagagaagcaggggcgagtgagatgggtgcagggacgacggaggaggggagactgggagatactgaggtcgtgctcccaggacctgccaggggtgatggggatggaggactccacctaagctgctggcttcccacttgcacagggaatgtctgagagagcacagctgaatacgtacaagagaccaggtgatctggtgggaatgtccctgaactactggcaggagatgagattcaaaccagaaaaaccaaacagaaggaacgaggagctctgtataggccatcccattggcagacacacaccccgtgaagactgttgttgctgtggaggtcagagatcccttccagccagctgctggaattgggattcagcagaactgattcctggcactaccacgtcctccatactctcaacattttttttttttagttttcagggaagtccagtaataaaaatagttcctatttattgagtacttgctatgtgccagggcctatgctaagtgcattgcacaccgtgagtcctcaaccct

SEQ ID NO: 6309 - DNA, 6097 bp, Homo sapiens
gaactcggtggtcctggaagctccgcaggatgggggagaagatggcggaagaggmgaggttccccaatacaactcatgagggtttcaatgtcaccctccacaccaccctggttgtcacgacgaaactggtgctcccgacccctggcaagcccatcctccccgtgcagacaggggagcaggcccagcaagaggagcagtccagcggcatgaccattttcttcagcctccttgtcctagctatctgcatcatattggtgcatttactgatccgatacagattacatttcttgccagagagtgttgctgttgtttctttaggtattctcatgggagcagttataaaaattatagagtttaaaaaactggcgaattggaaggaagaagaaatgtttcgtccaaacatgtttttcctcctcctgcttccccctattatctttgagtctggatattcattacacaagggtaacttctttcaaaatattggttccatcaccctgtttgctgtttttggracggcaatctccgcttttgtagtaggtggaggaatttattttctgggtcaggctgatgtaatctctaaactcaacatgacagacagttttgcgtttggctccctaatatctgctgtcgatccagtggccactattgccattttcaatgcacttcatgtggaccccgtgctcaacatgctggtctttggagaaagtattctcaacgatgcrgtctccattgttctgaccaacacagctgaaggtttaacaagaaaaaatatgtcagatgtcagtgggtggcaaacatttttacaagcccttgactacttcctcaaaatgttctttggctctgcagcgctcggcactctcactggcttaatttctgcattaattgtcatttacgtgctgaagcatattgacttgaggaaaacgccttccttggagtttggcatgatgatcatttttgcttatctgccttatgggcttgcagaaggaatctcactctcaggcatcatggccatcctkttctcaggcatcgtgatgtcccactacacgcaccataacctctccccagtcacccagatcctcatgcagcagaccctccgcaccgtggccttcttatgtgaaacatgtgtgtttgcatttcttggcctgtccatttttagttttcctcacaagtttgaaatttcctttgtcatctggtgcatagtgcttgtactatttggcagagcggtaaacattttccctctttcctacctcctgaatttcttccgggatcataaaatcacaccgaagatgatgttcatcatgtggtttagtggcctgcggggagccatcccctatgccctgagcctacacctggacctggagcccatggagaagcggcagctcatcggcaccaccaccatcgtcatcgtgctcttcaccatcctgctgctgggcggcagcaccatgcccctcattcgcctcatggacatcgaggacgccaaggcacaccgcaggaacaagaaggacgtcaacctcagcaagactgagaagatgggcaacactgtggagtcggagcacctgtcggagctcacggaggaggagtacgaggcccactacatcaggcggcaggaccttaagggcttcgtgtggctggacgccaagtacctgaaccccttcttcactcggaggctgacgcaggaggacctgcaccacgggcgcatccagatgaaaactctcaccaacaagtggtacgaggaggtacgccagggcccctccggctccgaggacgacgagcaggagctgctctgacgccaggtgccaaggcttcaggcaggcaggcccaggatgggcgtttgctgcgcacagacactcagcaggggcctcgcagagatgcgtgcatccagcagccccttcaagacataagagggcggggcgaggtactggctgcagagtcgccttagtccagaacctgacaggcctctggagccaggcgacttcttgggaaactgtcatctcccgactcctccctgagccagcctccgctcagtgtggctcctcagcccacagaggggagggagcatggggccaggtgccagtcatctgtgaagctagggcgcctacccccccacccggaggacccctgcggccccctgcctagaggagcaccatctacagttgtgccattccccagccactgccttcatgctgcccccgccggactggcagagccaggggtcagccacctgcctttgagtcatcaagatgcctctgcagccacaattctgacctaagtggcagggcccagaaatcctgaaaacctcccgctgccttttgtgatacttcctgtgctccctcagagagaaacggagtgaccttttgtcctttacctgattggcacttcgcagtctatctccctgggtagcagacggctgctgcccttctctgggcatgttctgaatgtttacactggtaccttctggtatcttctttagagccccctgcaagctgcaactctaggcttttatcttgcggggtcagagcgccctctagagggaaaagctagaggcacagggtttctgccggcccacaactgctgtcttgatttgcattttacagcaaagtgctgagagcctctagtcgcctcctgccatctgatctccctccccaccattcccgtactcagttgttcttttgtctaatcggaggccactgtgctgaggccctgcagtgtctgctcactgctgccatcttcgctgctagtcagggttccatcctctttcccctctcccagttccctaccaygttggatcccattcgtcacccatgctagggtccccaaagcactggggcaggggccagagcagcagcacccagtgctccctcctctactctgacctggggccccagcatcctggagcacacgctccacgcacacacaccccagccctgtcccaggggcctggccccctcagccatctcagggtgaggagctgccagtcatgtccagatggaatgactcccatcctctcctcatctcccctttgacgagcctcaaactgctcagctcatcaaagagccattgccaacttccgtatgtggttctgggtcccagggagccttggaacctggcaccctggggtggtttaattcatcattaagaagcattcctgcttctcaagggacacagtggcctgcatgggccagcatggaccctgggctgatcatgtgcattcctgcttctctggggacacagtgggcccacatgggccagcatggaccctgggctagagcaagcacatctccatctcttccacctcaggcagtgtggctccagatgtcaggagggactgacctcaggaccttccaggttcctctgtgccaggaatgagaggccaggcccgatcctaccacctcgccttgaccctgaagtcagagcaggccagccaagcaggaagcacactgtttactttttgcatgaaaagtaaatgtgtacttgatagagctaaaatatgatcttttttaattyctcaaccccataatttgagccattgccttgcttaattttggtttccaccatttccttttagtggagaagagaggaagtcagagggtagggacctttgcctgcccctgggcgagtgcgggcagggatctgagaccagattgttctcgcrcccctgccagaactcactctcccctgaagtttagggtcccatctcccagatgtaagttgttttgcaaactcagtttgccaggatttctttctttcctaatcttaaattcacagataaagcaatgaaaagagtcagatcccatttccgtctgccccctcgtcaccaggtgtgatagccccagccaggtcacacctggcctcacactttgagctgagacttgaaaacgatgctgtggcggaagagcatgtggggcttggtggaggggccccaggatttgttgggggcaaagggggtggcgggaccgttcccaggaggtaccagcacctgcctcgatctcctctgagcctcttctgccccctgtcggccaggtgaggtcagcagcctgggagagtgcccccaagagatgagggcaccccgtgttccttggcaatcttggctcaccttggtaacaaaaggccatagaagtctgtttttctgggtcagttttttttgcctgagaataacaaattgctgctgtctacctttagcacacccaataattctatttggggcagtgaatgcatagaagatataaaaatacgcagcttaactatatcttcctgcgtgtgtatttattttcttctgggtctaggccatggtacaggagaactgtggcgtgtaggaggaatacttcaggatgagtgaaggctggagccagggagcgctggaggaaaccagccctttagccagcagcccctccaccacaggcactgctgtgtggaacgagttcttggaatgaatcccatgctttctgcagcctgtagttgttatgacccctcggaacaaccaccccgtggcttgtgtggggtctcgcagggaaaagggctggcttctaggtccccgagataagtgtgcagggggatgggccagggccaggctaagggtggctcagttccatcatctggaggtcagacacactgtccagaggcagaactgaagccctctcggcccctaccctaagccagccacccctcttcacagtgggtgagctgggctgggctggctggcatraggccaaggggtaggcctgagcgccagagtcgcccaggttagcccacaggattcctttgtgtgccatggaatgctgaaagatgggtgactggggacccttcttaaaacctttggcaaaggtgccatcggcagggcttggcctcatgaagtctcaggtccgtgttcccgcagggcgcacatgcttggagagtcctcagcagggtagccgaggccaggccacttctgctgaggatggggcaggctggggtgtgggtgtggcctggggtggctcagggctggaactgctgcctgattcctgtgtggggagaagctcagtggccgtttgctgccactgacaaggatttcacatgcagaagagaaaaggcccccctccaccccccgcattccctgccgagtgagagccagtgtttgctgcccttgctgggggcgggtaggaaaccctgagcttcctgatgcggagtcatgaagcagagtcctcgggaaggcatctccacagccccgggtcctctgtctaacgccctccatttcacgccctccatctcacagtcaagataaaggcctcgagaataaagagccagcccccttccatttagtctcctgccgtttcccaaacagttgtccaacagttagacattgaggggcttcactgttaccaggcatgtaacagaaggaggaagactaacacacaccccctgccccatcccatccccctctcccgagctattttcttgctgtggcctctggtgcccttgagttggtctccccggctgctctgcgggggcttcactggcttcggagtgagcgcgaagtgctggtgagcagtgggcctgtgattggatgggaagatgtgcatccgtggtcaaaagtcagctgccagccctgcggaaccagagcctcaggctgggatggggaggcctccctgcttccacctgcatggtgggcatggcctggcttacaccaaaggctttgacggtttctccaagtaaggatctgcaaatcttgaatcgtcctcaaaatgacgaagcttgaattgtcctcaagatggatgtgaatcttacattccttttcatcatttcctttgtaaaaatgacgagtgctgggtttttgttttaagaagcattatgaaggccagacttactcatttttctcccccaagtgagctgcaagaggcccctgttaggcccctgtttcctgagcagtgatgtgctgctcttcttggtggggctttgggctgggaggggaaggcgggtcagagatgggggacctgtggctgccatgcaggagcccctgcgtcatctcgttggactctttaagggagtcaggaatagatgtatgaacagtcgtgtcactggatgcctatttagaaataaagtgtatgctgctgaattggagcca

SEQ ID NO: 6310 - DNA, 971 bp, Homo sapiens
gaactcggtggtcctggaagctccgcaggatgggggagaagatggcggaagaggmgaggttccccaatacaactcatgagggtttcaatgtcaccctccacaccaccctggttgtcacgacgaaactggtgctcccgacccctggcaagcccatcctccccgtgcagacaggggagcaggcccagcaagaggagcagtccagcggcatgaccattttcttcagcctccttgtcctagctatctgcatcatattggtgcatttactgatccgatacagattacatttcttgccagagagtgttgctgttgtttctttagtgaggagagaagcaggccaaactcaggtgatgagaagtgcaaacagcctgtctgaaggaaaagtgaagaagatcatgggagatggaaagaagggggtgtcttcgggctcttcagagacaggctccaaatcccctctgaaaagaatccaagagcaaagtccccagaagcggggtcagcccccaaagaatgagaagaatgtcaccatcgtggagtccgccaaacaagccatctctgtctgttaccaggcaatcacaaagaagttgaaaatatgtgaagaggaaactggttccacctccatccgggcagctgacagcacggccgtgaatggcagcatcacagacaaaaagatgggatttgggggccttggtctcatgagaagtggaatcgtctctaacttgctaaaaatgggtcacacagtgactgtctggaaccgcactgccaagaaacgtgaagttggcaacgcagccaagatgatgctgattgtaaacatagtccaagggagcttcatagccatgatcactgagaaggatctctgcttagccattgcgctgggcaatgcggtcaactctctgactcccatggcagctgcagccaaccaggtgtacaaaagagccaaggcactggaccagtccaacaatatgtccgctgtgtcc

SEQ ID NO: 6311 - DNA, 6084 bp, Homo sapiens
gaactcggtggtcctggaagctccgcaggatgggggagaagatggcggaagaggmgaggttccccaatacaactcatgagggtttcaatgtcaccctccacaccaccctggttgtcacgacgaaactggtgctcccgacccctggcaagcccatcctccccgtgcagacaggggagcaggcccagcaagaggagcagtccagcggcatgaccattttcttcagcctccttgtcctagctatctgcatcatattggtgcatttactgatccgatacagattacatttcttgccagagagtgttgctgttgtttctttaggtattctcatgggagcagttataaaaattatagagtttaaaaaactggcgaattggaaggaagaagaaatgtttcgtccaaacatgtttttcctcctcctgcttccccctattatctttgagtctggatattcattacacaagggtaacttctttcaaaatattggttccatcaccctgtttgctgtttttggracggcaatctccgcttttgtagtaggtggaggaatttattttctgggtcaggctgatgtaatctctaaactcaacatgacagacagttttgcgtttggctccctaatatctgctgtcgatccagtggccactattgccattttcaatgcacttcatgtggaccccgtgctcaacatgctggtctttggagaaagtattctcaacgatgcrgtctccattgttctgaccaacacagctgaaggtttaacaagaaaaaatatgtcagatgtcagtgggtggcaaacatttttacaagcccttgactacttcctcaaaatgttctttggctctgcagcgctcggcactctcactggcttaatttctgcattaatctgaagcatattgacttgaggaaaacgccttccttggagtttggcatgatgatcatttttgcttatctgccttatgggcttgcagaaggaatctcactctcaggcatcatggccatcctkttctcaggcatcgtgatgtcccactacacgcaccataacctctccccagtcacccagatcctcatgcagcagaccctccgcaccgtggccttcttatgtgaaacatgtgtgtttgcatttcttggcctgtccatttttagttttcctcacaagtttgaaatttcctttgtcatctggtgcatagtgcttgtactatttggcagagcggtaaacattttccctctttcctacctcctgaatttcttccgggatcataaaatcacaccgaagatgatgttcatcatgtggtttagtggcctgcggggagccatcccctatgccctgagcctacacctggacctggagcccatggagaagcggcagctcatcggcaccaccaccatcgtcatcgtgctcttcaccatcctgctgctgggcggcagcaccatgcccctcattcgcctcatggacatcgaggacgccaaggcacaccgcaggaacaagaaggacgtcaacctcagcaagactgagaagatgggcaacactgtggagtcggagcacctgtcggagctcacggaggaggagtacgaggcccactacatcaggcggcaggaccttaagggcttcgtgtggctggacgccaagtacctgaaccccttcttcactcggaggctgacgcaggaggacctgcaccacgggcgcatccagatgaaaactctcaccaacaagtggtacgaggaggtacgccagggcccctccggctccgaggacgacgagcaggagctgctctgacgccaggtgccaaggcttcaggcaggcaggcccaggatgggcgtttgctgcgcacagacactcagcaggggcctcgcagagatgcgtgcatccagcagccccttcaagacataagagggcggggcgaggtactggctgcagagtcgccttagtccagaacctgacaggcctctggagccaggcgacttcttgggaaactgtcatctcccgactcctccctgagccagcctccgctcagtgtggctcctcagcccacagaggggagggagcatggggccaggtgccagtcatctgtgaagctagggcgcctacccccccacccggaggacccctgcggccccctgcctagaggagcaccatctacagttgtgccattccccagccactgccttcatgctgcccccgccggactggcagagccaggggtcagccacctgcctttgagtcatcaagatgcctctgcagccacaattctgacctaagtggcagggcccagaaatcctgaaaacctcccgctgccttttgtgatacttcctgtgctccctcagagagaaacggagtgaccttttgtcctttacctgattggcacttcgcagtctatctccctgggtagcagacggctgctgcccttctctgggcatgttctgaatgtttacactggtaccttctggtatcttctttagagccccctgcaagctgcaactctaggcttttatcttgcggggtcagagcgccctctagagggaaaagctagaggcacagggtttctgccggcccacaactgctgtcttgatttgcattttacagcaaagtgctgagagcctctagtcgcctcctgccatctgatctccctccccaccattcccgtactcagttgttcttttgtctaatcggaggccactgtgctgaggccctgcagtgtctgctcactgctgccatcttcgctgctagtcagggttccatcctctttcccctctcccagttccctaccaygttggatcccattcgtcacccatgctagggtccccaaagcactggggcaggggccagagcagcagcacccagtgctccctcctctactctgacctggggccccagcatcctggagcacacgctccacgcacacacaccccagccctgtcccaggggcctggccccctcagccatctcagggtgaggagctgccagtcatgtccagatggaatgactcccatcctctcctcatctcccctttgacgagcctcaaactgctcagctcatcaaagagccattgccaacttccgtatgtggttctgggtcccagggagccttggaacctggcaccctggggtggtttaattcatcattaagaagcattcctgcttctcaagggacacagtggcctgcatgggccagcatggaccctgggctgatcatgtgcattcctgcttctctggggacacagtgggcccacatgggccagcatggaccctgggctagagcaagcacatctccatctcttccacctcaggcagtgtggctccagatgtcaggagggactgacctcaggaccttccaggttcctctgtgccaggaatgagaggccaggcccgatcctaccacctcgccttgaccctgaagtcagagcaggccagccaagcaggaagcacactgtttactttttgcatgaaaagtaaatgtgtacttgatagagctaaaatatgatcttttttaattyctcaaccccataatttgagccattgccttgcttaattttggtttccaccatttccttttagtggagaagagaggaagtcagagggtagggacctttgcctgcccctgggcgagtgcgggcagggatctgagaccagattgttctcgcrcccctgccagaactcactctcccctgaagtttagggtcccatctcccagatgtaagttgttttgcaaactcagtttgccaggatttctttctttcctaatcttaaattcacagataaagcaatgaaaagagtcagatcccatttccgtctgccccctcgtcaccaggtgtgatagccccagccaggtcacacctggcctcacactttgagctgagacttgaaaacgatgctgtggcggaagagcatgtggggcttggtggaggggccccaggatttgttgggggcaaagggggtggcgggaccgttcccaggaggtaccagcacctgcctcgatctcctctgagcctcttctgccccctgtcggccaggtgaggtcagcagcctgggagagtgcccccaagagatgagggcaccccgtgttccttggcaatcttggctcaccttggtaacaaaaggccatagaagtctgtttttctgggtcagttttttttgcctgagaataacaaattgctgctgtctacctttagcacacccaataattctatttggggcagtgaatgcatagaagatataaaaatacgcagcttaactatatcttcctgcgtgtgtatttattttcttctgggtctaggccatggtacaggagaactgtggcgtgtaggaggaatacttcaggatgagtgaaggctggagccagggagcgctggaggaaaccagccctttagccagcagcccctccaccacaggcactgctgtgtggaacgagttcttggaatgaatcccatgctttctgcagcctgtagttgttatgacccctcggaacaaccaccccgtggcttgtgtggggtctcgcagggaaaagggctggcttctaggtccccgagataagtgtgcagggggatgggccagggccaggctaagggtggctcagttccatcatctggaggtcagacacactgtccagaggcagaactgaagccctctcggcccctaccctaagccagccacccctcttcacagtgggtgagctgggctgggctggctggcatraggccaaggggtaggcctgagcgccagagtcgcccaggttagcccacaggattcctttgtgtgccatggaatgctgaaagatgggtgactggggacccttcttaaaacctttggcaaaggtgccatcggcagggcttggcctcatgaagtctcaggtccgtgttcccgcagggcgcacatgcttggagagtcctcagcagggtagccgaggccaggccacttctgctgaggatggggcaggctggggtgtgggtgtggcctggggtggctcagggctggaactgctgcctgattcctgtgtggggagaagctcagtggccgtttgctgccactgacaaggatttcacatgcagaagagaaaaggcccccctccaccccccgcattccctgccgagtgagagccagtgtttgctgcccttgctgggggcgggtaggaaaccctgagcttcctgatgcggagtcatgaagcagagtcctcgggaaggcatctccacagccccgggtcctctgtctaacgccctccatttcacgccctccatctcacagtcaagataaaggcctcgagaataaagagccagcccccttccatttagtctcctgccgtttcccaaacagttgtccaacagttagacattgaggggcttcactgttaccaggcatgtaacagaaggaggaagactaacacacaccccctgccccatcccatccccctctcccgagctattttcttgctgtggcctctggtgcccttgagttggtctccccggctgctctgcgggggcttcactggcttcggagtgagcgcgaagtgctggtgagcagtgggcctgtgattggatgggaagatgtgcatccgtggtcaaaagtcagctgccagccctgcggaaccagagcctcaggctgggatggggaggcctccctgcttccacctgcatggtgggcatggcctggcttacaccaaaggctttgacggtttctccaagtaaggatctgcaaatcttgaatcgtcctcaaaatgacgaagcttgaattgtcctcaagatggatgtgaatcttacattccttttcatcatttcctttgtaaaaatgacgagtgctgggtttttgttttaagaagcattatgaaggccagacttactcatttttctcccccaagtgagctgcaagaggcccctgttaggcccctgtttcctgagcagtgatgtgctgctcttcttggtggggctttgggctgggaggggaaggcgggtcagagatgggggacctgtggctgccatgcaggagcccctgcgtcatctcgttggactctttaagggagtcaggaatagatgtatgaacagtcgtgtcactggatgcctatttagaaataaagtgtatgctgctgaattggagcca

SEQ ID NO: 6312 - DNA, 482 bp, Homo sapiens
gaactcggtggtcctggaagctccgcaggatgggggagaagatggcggaagaggmgaggttccccaatacaactcatgagggtttcaatgtcaccctccacaccaccctggttgtcacgacgaaactggtgctcccgacccctggcaagcccatcctccccgtgcagacaggggagcaggcccagcaagaggagcagtccagcggcatgaccattttcttcagcctccttgtcctagctatctgcatcatattggtgcatttactgatccgatacagattacatttcttgccagagagtgttgctgttgtttctttaggtattctcatgggagcagttataaaaattatagagtttaaaaaactggcgaattggaaggaagaagaaatgtttcgtccaaacatgtttttcctcctcctgcttccccctattatctttgagtctggatattcattacacaaggtgagactcaggcacacattg

SEQ ID NO: 6313 - DNA, 492 bp, Homo sapiens
gaactcggtggtcctggaagctccgcaggatgggggagaagatggcggaagaggmgaggttccccaatacaactcatgagggtttcaatgtcaccctccacaccaccctggttgtcacgacgaaactggtgctcccgacccctggcaagcccatcctccccgtgcagacaggggagcaggcccagcaagaggagcagtccagcggcatgaccattttcttcagcctccttgtcctaggtgaatatggacactgtcatccccatcatctgccatcccgtgtctgtgtgctcggtctgtgtgtttaaccctgtcactcctcttgactgtcaagtcttcctcccatttggttttcatatcaaacactgagggaacatgatcagtttataacatcattaacaggaaactctcttctttataaaatcatggtgcttagcaagttctgaagagctgttgatgtaatatcttggcctttgaaagaaggattaaaaaaat

SEQ ID NO: 6314 - DNA, 5600 bp, Homo sapiens
ggagtgggccaggccgccagccccgycagccccgccagccccgccagccccgcgatggcttgggccgcgctcctcggcctcctggccgcactgttgctgctgytgctactgagccgccgccgcacgcggcgacctggtgagcctcccctggacctgggcagcatcccctggttggggtatgccttggactttggaaaagatgctgccagcttcctcacgaggatgaaggagaagcacggtgacatctttactatactggttgggggcaggtatgtcaccgttctcctggacccacactcctacgacgcggtkgtgtgggagcctcgcaccaggctcgacttccatgcctatgccatcttcctcatggagaggatttttgatgtgcagcttccacattacagccccagwgatgaaaaggccaggatgaaactgactcttctccacagagagctccaggcactcacagaagccatgtataccaacctccatgcagtgctgttgggcgatgctacagmagcaggcagtggctggcacgagatgggtctcctcgacttctcctacagcytcctgctcagagccggctayctgactctttacggaattgaggcgctgccacgcacccatgaaagccaggcccaggaccgygtccactcagctgatgtcttccacacctttcgccagctcgaccggctgctccccaaactggcccgtggctccctgtcagtgggggacaaggaccacatgtgcagtgtcaaaagtygcctgtggaagctgctrtccccagccaggctggccaggcgggcccaccggagcaaatggctrgagagttacctgctgcacctggaggagatgggtgtgtcagaggagatgcaggcacrggccctggtgctgcagctgtgggccacacaggggaatatgggtcccgctgccttctggctcctgctcttccttctcaagaatcctgaagccctggctgctgtccgcggagagctcgagagtatcctttggcaagcggagcagcctgtctcgcagacgaccactctcccacagaaggttctagacagcacacctgtgcttgatagcgtgctgagtgagagcctcaggcttacagctgcccccttcatcacccgcgaggttgtggtggacctggccatgcccatggcagacgggmgagaattcaacctgcgacgtggtgaccgcctcctcctcttccccttcctgagcccccagagagacccagaaatctacacagacccagaggtatttaaatacaaccgattcctgaaccctgayggatcagagaagaaagacttttacaaggatgggaaacggctgaagaattacaacatgccctggggggcggggcacaatcactgcctggggaggagttatgcggtcaacagcatcaaacaatttgtgttccttgtgctggtgcacttggacttggagctgatcaacgcagatgtggagatccctgagtttgacctcagcaggtacggcttcggtctgatgcagccggaacacgacgtgcccgtccgctaccgcatccgcycatgacacagggagcagatggatccacgtgctcgcctctgcccagcctgccccagcctgccccagcctcccagctttctgtgtgcacagttggcccgggtgcaggtgctagcattaccacytccctgcttttctcccagaaggctgggtccaggggagkgaaaagctaagagggtgaacaaagaaaagacattgaaagctctatggattatccactgcaaagttttctttccaaaatcaggctttgtctgytcccaattcacctcgttactctcacctcgtgatatccacaaatgctattcagayaaggcagaactaggagtcttcactgctctgcccccaactcccggaggtgtcaccttcctagttcttatgagctagcatggcccgggccttatccagtcaaagcggatgctggccacakaaagrccactcaggatgtcctttgtgtccattgatgtcattcagcagtcagtcccccaataatccttaaactagctaaaaccaaaggagtcccttagaagatctgcttccctggggccccatttgccagattgccccattgctcacactacttgagaaaatgcaggagagcttcccccaaggctgatgcattcccggtgcagaacaggggcaccctccaaacactgggctctgaggagtggagttctctgttctagagtgacaggcaccagatgggatgggctttctcagtgtcagcactcaggtagggagctaaggaagacacagcccagacaagatggctggaaggagccagccaggactccttagactgatmaagccaaaaaagaaggtgccgatttcatgcattctagtgcagaagccccaactgtgatcacgatccagtctgcagacgtgttttgtttggacttcacttaaaaaaatgccttagttgttatcatctttgggagagttcattcaaaatgtccagcttctcttgaaaacttggtatatctggccacactgggctcacattcccaagggtaactcttggccagagctgagtggcagccgcctcccttatgcaggacatgtgctctcggcttcaccagggttctgaccgggtctgcttctgcattcacagygcctcctggacctgaaggcatctgagtgtgagaccctgttctaactcttagaagtgacattgtaagaggtggtggggaccagctaattggtccaacccagcctgagtgcaccaccctttgaacaaatgtatcagtgatgaaaatttgcctttgccccggcttgcctgtaatcccagcactttgggaggccgaggtgggcggatcacttgaggtcgggagttcaagaccagcctggccaacatggcgaaaycccgtctctactaaamatamaaaaattagtcaggtgtggcrgtgcgtgcctgtaatcccagctattcaggaggctgaggcaccagaattgcttgaacccaggaggtggaggttgcagtgaactgagactgcgccacggcactccagcctgggcgacagagcaagactctgtctcaataaataaataattaattaaaataaaaaacagcttaaagagaaaaatggcctgcaaaccttttttatgatgctatttktattaatataaagtcytgtttattgagaccctttaaatgcctgcgagagaccctacagacagtatgtctactcctcacagcatctctatgargagaaggagggttgtgcccacttcatagatgagaaaactgagaggtgaggtgacttgcctggggccacatagctcataagctgtagaactctgcaggcagatttactgtcccaggagcaaatgctggatgagcaactcctgttctttgggctcaaggggactggtgatgggacaattcttctcgacttcaggagctgacagagccagaggcacctaaacttgggtacatcttgtaagacacataatgaggtccctctagctttagctggagggagataaaagaaccccagacctctgaatgtcccagaggctagtctcttctcagagcagcactggggtttgggggcttccctgggcctcagcctccaggcacccccaggattcccagagagacgctgtgattggcaggaggcaggatatccccagggaaacccatcttcacgcctgggtgacccccactgccgcctccttcttaactctgcaggaaatcagagctggcagcctccagtgggaggacagagccggtttccgtggcaaccctcagctgcctcatcgtggctgggaagggaaggaagcaagccggcagaaatagctatggaaggtcttgcgcaggctgcaaccytggtgtgctgggcgaaaacccttatgactccccccttccaaatcaggctgggttgtcactgagactagattctcacctgccttcaaagaagggccaattccctttaaaggtcgcacctccttggaaccacagtcattagtgaattacactcaaggaaaagaygtgctcccaccaggcagctccagctgttacctgagatactgaagtgcagctcaggagacgattatttaaacctgcccttgttttaatcgttatttttctctttaaaaaaaatagaagctataaagaaaagagggagagatgagtgggttagctacctgctatgcgctagttaggaagttacctggatgccattgtatttcttcatcccttgcttaagaatcaaaattactggacatatgttaggaatactctttctttctttctttctttttaagctcagtggcaagaatgaaatactctttttttttttttttttttgagatggagtctcgctctgctgcccaggctagagtgcagtggcgtgatctcggcycactgcaagctctgcctcccgtgttcacaccattctcctgcctcagcctcctgagtagctgggactacaggcacccgccaccacacccggctaatttttggatttttagtagagatgggatttcaccgtaytagccaggatggtcttgatctcctgagctcgtgatctgcccgcctcggcctcccaaagtgctgggattacaggtgtragccaccgcgcccagccaagaataaamtactcttaagttgatctaatgaagtgtttccttaccattgtgattattgttactattatttgctatattttaatattgttgtttaccaaatattytcctttaaacagactcgctttttaaacttttttttttttttttgagacggagtttcacgcttattgcccaggctggagtrcaatggcacgatctcagctcaccacaacctccacctcctgggtttaagcaatgcttctgcctcagcttcccaagtagctgagattacaggcgcacaccaccacgcccaactgatttttgtwtttttagtagagacggggtttccccatgttggtcaggctggtctcgaactcctgacctcgtgatttgcctgcctkggcctcccaaagtgctaggattacaggcatgarccaccatgcccrgcctaaactttgtttttaaaatgaactttttttccccccaattgctgccaatagtggataacatgtatcactcactgccaaaaatagaaagtgaccatgaaaaataaattygctggggaagggggctccatgctggtgtggccaaggctgagagctctctcttctctgttacaaaaygagataagcaagtgttagaattgccttaaggccacactggcatctccctgaccttctccagggacagaagcaggagtaagtttctcatcccatgggcgaccagggccatctcctcccaccagtggcccccactcacagggagctggcaatgccctacctgcctgttctccagatggagaaacaggctctgagatttcacaggtcttgcccaaagtcattgattttgatgattaraaagaataaacacagtgtttcctgagtagcagtgattgttatgccttgctattttaataaagattctattttcgtataacattgtcaagtggaaacatgctgaaatctattaaaccatctttgtttgtg

SEQ ID NO: 6315 - DNA, 1459 bp, Homo sapiens
tgcgtctctgcccgccccgtggcgcccgagtgcactgaagatggcggctgctgtaggacggttgctccgagcgtcggttcctcatgccatgcacctgctgtcacccagcatgcaccctattttaagggtacagccgttgtcaatggagagttcaaagacctaagccttgatgactttaaggggaaatatttggtgcttttcttctatcctttggatttcacctttgtgtgtcctacagaaattgttgcttttagtgacaaagctaacgaatttcacgaygtgaactgtgaagttgtcgcagtctcagtggattcccactttagccatcttgcctggataaatacaccaagaaagaatggtggtttgggccacatgaacatcgcactcttgtcagacttaactaagcagatttcccgagactackgtgtgctgttagaaggttctggtcttgcactaagaggtctcttcataattgaccccaatggagtcatcaagcatttgagcgtcaacgatctcccagtgggccgaagcgtggaagaaaccctccgcttggtgaaggcgttccagtatgtagaaacacatggagaagtctgcccagcgaactggacaccggattctcctacgatcaagccaagtccagctgcttccaaagagtactttcagaaggtaaatcagtagatcacccatgtgtatctgcaccttctcaactgagagaagaaccacagttgaaacctgcttttatcattttcaagatggttatttgtagaaggcaaggaaccaattatgcttgtattcataagtattactctaaatgttttgtttttgtaattctggctaagaccttttaaacatggttagttgctagtacaaggaatcstttattggtaacatcttggtggctggctagctagtttctacagaacataatttgcctctatagaaggctattcttagatcatgtctcaatggaaacactcttctttcttagccttacttgaatcttgcctataataaagtagagcaacacacattgaaagcttctgatcaacggtcctgaaattttcatcttgaatgtctttgtattaaactgaattttcttttaagctaacaaagatcataattttcmatgattagccgtgtaactcctgcaatgaatgtttatgtgattgaagcaaatgtgaatcgtattattttaaaaagtggcagagtgacttaactgatcatgcatgatccctcatccctgaaattgagtttatgtagtcattttasttattttattcattagctaactttgtctatgtatatttctagatattgattagtgtaatcgattataaaggatatttatcaaatccagggattgcattttgaaattataattattttctttgctgaagtattcattgtaaaacatacaaaataaacatattttaaaacatttgcattttaccaccattaa

SEQ ID NO: 6316 - DNA, 1468 bp, Homo sapiens
tgcgtctctgcccgccccgtggcgcccgagtgcactgaagatggcggctgctgtaggacggttgctccgagcgtcggttgcccgacatgtgagtgccattccttggggcatttctgccactgcagccctcaggcctgctgcatgtggaagaacgagcttgacaaatttattgtgttctggttccagtcaagcaaaattattcagcaccagttcctcatgccatgcacctgctgtcacccagcatgcaccctattttaagggtacagccgttgtcaatggagagttcaaagacctaagccttgatgactttaaggggaaatatttggtgcttttcttctatcctttggatttcacctttgtgtgtcctacagaaattgttgcttttagtgacaaagctaacgaatttcacgaygtgaactgtgaagttgtcgcagtctcagtggattcccactttagccatcttgcctggataaatacaccaagaaagaatggtggtttgggccacatgaacatcgcactcttgtcagacttaactaagcagatttcccgagactackgtgtgctgttagaaggttctggtcttgcactaagaggtctcttcataattgaccccaatggagtcatcaagcatttgagcgtcaacgatctcccagtgggccgaagcgtggaagaaaccctccgcttggtgaaggcgttccagtatgtagaaacacatggagaagtctgcccagcgaactggacaccggattctcctacgatcaagccaagtccagctgcttccaaagagtactttcagaaggtaaatcagtagatcacccatgtgtatctgcaccttctcaactgagagaagaaccacagttgaaacctgcttttatcattttcaagatggtactctaaatgttttgtttttgtaattctggctaagaccttttaaacatggttagttgctagtacaaggaatcstttattggtaacatcttggtggctggctagctagtttctacagaacataatttgcctctatagaaggctattcttagatcatgtctcaatggaaacactcttctttcttagccttacttgaatcttgctttcatcttgaatgtctttgtattaaactgaattttcttttaagctaacaaagatcataattttcmatgattagccgtgtaactcctgcaatgaatgtttatgtgattgaagcaaatgtgaatcgtattattttaaaaagtggcagagtgacttaactgatcatgcatgatccctcatccctgaaattgagtttatgtagtcattttasttattttattcattagctaactttgtctatgtatatttctagatattgattagtgtaatcgattataaaggatatttatcaaatccagggattgcattttgaaattataattattttctttgctgaagtattcattgtaaaacatacaaaataaacatattttaaaac

SEQ ID NO: 6317 - DNA, 1592 bp, Homo sapiens
tgcgtctctgcccgccccgtggcgcccgagtgcactgaagatggcggctgctgtaggacggttgctccgagcgtcggttgcccgacatgtgagtgccattccttggggcatttctgccactgcagccctcaggcctgctgcatgtggaagaacgagcttgacaaatttattgtgttctggttccagtcaagcaaaattattcagcaccagttcctcatgccatgcacctgctgtcacccagcatgcaccctattttaagggtacagccgttgtcaatggagagttcaaagacctaagccttgatgactttaaggggaaatatttggtgcttttcttctatcctttggatttcacctttgtgtgtcctacagaaattgttgcttttagtgacaaagctaacgaatttcacgaygtgaactgtgaagttgtcgcagtctcagtggattcccactttagccatcttgcctggataaatacaccaagaaagaatggtggtttgggccacatgaacatcgcactcttgtcagacttaactaagcagatttcccgagactackgtgtgctgttagaaggttctggtcttgcactaagaggtctcttcataattgaccccaatggagtcatcaagcatttgagcgtcaacgatctcccagtgggccgaagcgtggaagaaaccctccgcttggtgaaggcgttccagtatgtagaaacacatggagaagtctgcccagcgaactggacaccggattctcctacgatcaagccaagtccagctgcttccaaagagtactttcagaaggtaaatcagtagatcacccatgtgtatctgcaccttctcaactgagagaagaaccacagttgaaacctgcttttatcattttcaagatggttatttgtagaaggcaaggaaccaattatgcttgtattcataagtattactctaaatgttttgtttttgtaattctggctaagaccttttaaacatggttagttgctagtacaaggaatcstttattggtaacatcttggtggctggctagctagtttctacagaacataatttgcctctatagaaggctattcttagatcatgtctcaatggaaacactcttctttcttagccttacttgaatcttgcctataataaagtagagcaacacacattgaaagcttctgatcaacggtcctgaaattttcatcttgaatgtctttgtattaaactgaattttcttttaagctaacaaagatcataattttcmatgattagccgtgtaactcctgcaatgaatgtttatgtgattgaagcaaatgtgaatcgtattattttaaaaagtggcagagtgacttaactgatcatgcatgatccctcatccctgaaattgagtttatgtagtcattttasttattttattcattagctaactttgtctatgtatatttctagatattgattagtgtaatcgattataaaggatatttatcaaatccagggattgcattttgaaattataattattttctttgctgaagtattcattgtaaaacatacaaaataaacatattttaaaacatttgcattttaccaccattaa

SEQ ID NO: 6318 - DNA, 3718 bp, Homo sapiens
ccccgcagccctcccgggacacggtggacacgcttgtcccagacctgggcgccctcctgccgggagccaggactggccgcagcaggcgctgtccgggcccgtgggcggggtttcgggagggggcggagccaggcccacggccggtgtcaggttgctccggtaacggtgacgtttcgcggcgtgggcggggccagcacgcaggttgcatattttaggaagtgaggaggaggcgcgggctggagctgcggcggggtctggggcgcaragcagcggcgggaggaggcggacacgtggcaacagcggtagcagcccgggcggcggcagcaacagcggcggcggcatcggcccgagccgccggccgccctcccaccctcccgccccgcggcagccctagctccctccacttggctcccctggtcccgctcgctcggccgggagmtgctctgtgcttttctctctgattctccagcgacaggaccyggcgccgggcamtgagcaccgccaccatggggaagggggttggacgtgataagtatgagcctgcagctgtttcagaacaaggtgataaaaagggcaaaaagggcaaaaaagacagggacatggatgaactgaagaaagaagtttctatggatgatcataaacttagccttgatgaacttcatcgtaaatatggaacagacttgagccggggattaacatctgctcgtgcagctgagatcctggcgcgagatggtcccaacgccctcactccccctcccactactcctgaatggatcaagttttgtcggcagctctttggggggttctcaatgttactgtggattggagcgattctttgtttcttggcttatagcatccaagctgctacagaagaggaacctcaaaacgataatctgtacctgggtgtggtgctatcagccgttgtaatcataactggttgcttctcctactatcaagaagctaaaagttcaaagatcatggaatccttcaaaaacatggtccctcagcaagcccttgtgattcgaaatggtgagaaaatgagcataaatgcggaggaagttgtggttggggatctggtggaagtaaaaggaggagaccgaattcctgctgacctcagaatcatatctgcaaatggctgcaaggtggataactcctcgctcactggtgaatcagaaccccagactaggtctccagatttcacaaatgaaaaccccctggagacgaggaacattgccttcttttcaacmaattgtgttgaaggcaccgcacgtggtattgttgtctacactggggatcgcactgtgatgggaagaattgccacacttgcttctgggctggaaggaggccagacccccattgctgcagaaattgaacattttatccacatcatcacgggtgtggctgtgttcctgggtgtgtctttcttcatcctttctctcatccttgagtacacctggcttgaggctgtcatcttcctcatcggtatcatcgtagccaatgtgccggaaggtttgctggccactgtcacggtctgtctgacacttactgccaaacgcatggcaaggaaaaactgcttagtgaagaacttagaagctgtggagaccttggggtccacrtccaccatctgctctgataaaactggaactctgactcagaaccggatgacagtggcccacatgtggtttgacaatcaaatccatgaagctgatacgacagagaatcagagtggtgtctcttttgacaagacttcagctacctggcttgctctgtccagaattgcaggtctttgtaacagggcagtgtttcaggctaaccaggaaaacctacctattcttaagcgggcagttgcaggagatgcctctgagtcagcactcttaaagtgcatagagctgtgctgtggttccgtgaaggagatgagagaaagatacgccaaaatcgtcgagatacccttcaactccaccaacaagtaccagttgtctattcataagaaccccaacacatcggagccccaacacctgttggtgatgaagggcgccccagaaaggatcctagaccgttgcagctctatcctcctccacggcaaggagcagcccctggatgaggagctgaaagacgcctttcagaacgcctatttggagctggggggcctcggagaacgagtcctaggtttctgccacctctttctgccagatgaacagtttcctgaagggttccagtttgacactgacgatgtgaatttccctatcgataatctgtgctttgttgggctcatctccatgattgaccctccacgggcggccgttcctgatgccgtgggcaaatgtcgaagtgctggaattaaggtcatcatggtcacaggagaccatccaatcacagctaaagctattgccaaaggtgtgggcatcatctcagaaggcaatgagaccacctatgagcagaggaaaatcgtggagttcacctgccacacagccttcttcgtcagtatcgtggtggtgcagtgggccgacttggtcatctgtaagaccaggaggaattcggtcttccagcaggggatgaagaacaagatcttgatatttggcctctttgaagagacagccctggctgctttcctttcctactgccctggaatgggtgttgctcttaggatgtatcccctcaaacctacctggtggttctgtgccttcccctactctcttctcatcttcgtatatgacgaagtcagaaaactcatcatcaggcgacgccctggcggctgggtggagaargaaacctactattagccccccgtcctgcacgcygtggagcatcaggccacacactytgcatccgacacccacmccctctttgtgtacttcagtcttggagtttggaactctaccctggtaggaaagcacmgcagcatgtggggaagcaagacgtcctggaatgaagcatgtagctctatggggggaggggggagggcygcctgaaaaccatccatctgtggaaatgacagcggggaaggtttttatgtgcctttttgtttttgtaaaaaaggaacmcccggaaagactgaaagaatacattttatatctggatttttacaaataaagatggctattataatggaatttgtctgtgccctcgtcgcttctttggtacagatgtctatgtgatctggagctgtggttttcaacatgagtccctgaccagcagtttatcagcatcacctggttgcttgctaggaaggcgggcccagacccactgagtcagaaatgcatcagcaatgtggcttaataagccctcaggtgattttgatttacattcaagtttggaaaccactggctaagaggaagcattctgcccgtgctcttttagttggagtaggtgagtttacctgacccattttttctggctgctgcctggggtgatagggctgtaactccacctgctgccttagcatctggctttttgatggaagagcacctcgcctaaaggatttccagaccctcagagtatactaaactgcagatgaggcccttctctttcagtctaaaagagacctgaagccttcctgctttccctccagagatcaccaccacatctcaagtgtctctagcccagggcttatctgagaagcagaaatctatcccacacagtctgcctgggcatgtgtgctgagaagtggttcccttccttccatataatgtgttcctaatttagcatcaatgacacaatt

SEQ ID NO: 6319 - DNA, 4212 bp, Homo sapiens
caagcgcccggggaggccatccgcaggtgggcgcggggcctggattccacagaggggcggagtccctcagtcaggcgctggctgcaatcacacccgagcgccagccccctccagcatccctgagtcccagaggagatcgccgaagcgctggaaaagccgttccgcccacgacttctggtgccgggtcggcggcgactgggggagcccagttccgagaccgtaccgcacccactgcggacctcctgggccctacatagttggacgtgataagtatgagcctgcagctgtttcagaacaaggtgataaaaagggcaaaaagggcaaaaaagacagggacatggatgaactgaagaaagaagtttctatggatgatcataaacttagccttgatgaacttcatcgtaaatatggaacagacttgagccggggattaacatctgctcgtgcagctgagatcctggcgcgagatggtcccaacgccctcactccccctcccactactcctgaatggatcaagttttgtcggcagctctttggggggttctcaatgttactgtggattggagcgattctttgtttcttggcttatagcatccaagctgctacagaagaggaacctcaaaacgataatctgtacctgggtgtggtgctatcagccgttgtaatcataactggttgcttctcctactatcaagaagctaaaagttcaaagatcatggaatccttcaaaaacatggtccctcagcaagcccttgtgattcgaaatggtgagaaaatgagcataaatgcggaggaagttgtggttggggatctggtggaagtaaaaggaggagaccgaattcctgctgacctcagaatcatatctgcaaatggctgcaaggtggataactcctcgctcactggtgaatcagaaccccagactaggtctccagatttcacaaatgaaaaccccctggagacgaggaacattgccttcttttcaacmaattgtgttgaaggcaccgcacgtggtattgttgtctacactggggatcgcactgtgatgggaagaattgccacacttgcttctgggctggaaggaggccagacccccattgctgcagaaattgaacattttatccacatcatcacgggtgtggctgtgttcctgggtgtgtctttcttcatcctttctctcatccttgagtacacctggcttgaggctgtcatcttcctcatcggtatcatcgtagccaatgtgccggaaggtttgctggccactgtcacggtctgtctgacacttactgccaaacgcatggcaaggaaaaactgcttagtgaagaacttagaagctgtggagaccttggggtccacrtccaccatctgctctgataaaactggaactctgactcagaaccggatgacagtggcccacatgtggtttgacaatcaaatccatgaagctgatacgacagagaatcagagtggtgtctcttttgacaagacttcagctacctggcttgctctgtccagaattgcaggtctttgtaacagggcagtgtttcaggctaaccaggaaaacctacctattcttaagcgggcagttgcaggagatgcctctgagtcagcactcttaaagtgcatagagctgtgctgtggttccgtgaaggagatgagagaaagatacgccaaaatcgtcgagatacccttcaactccaccaacaagtaccagttgtctattcataagaaccccaacacatcggagccccaacacctgttggtgatgaagggcgccccagaaaggatcctagaccgttgcagctctatcctcctccacggcaaggagcagcccctggatgaggagctgaaagacgcctttcagaacgcctatttggagctggggggcctcggagaacgagtcctaggtttctgccacctctttctgccagatgaacagtttcctgaagggttccagtttgacactgacgatgtgaatttccctatcgataatctgtgctttgttgggctcatctccatgattgaccctccacgggcggccgttcctgatgccgtgggcaaatgtcgaagtgctggaattaaggtcatcatggtcacaggagaccatccaatcacagctaaagctattgccaaaggtgtgggcatcatctcagaaggcaatgagaccgtggaagacattgctgcccgcctcaacatcccagtcagccaggtgaaccccagggatgccaaggcctgcgtagtacacggcagtgatctaaaggacatgacctccgagcagctggatgacattttgaagtaccacactgagatagtgtttgccaggacctcccctcagcagaagctcatcattgtggaaggctgccaaagacagggtgctatcgtggctgtgactggtgacggtgtgaatgactctccagctttgaagaaagcagacattggggttgctatggggattgctggctcagatgtgtccaagcaagctgctgacatgattcttctggatgacaactttgcctcaattgtgactggagtagaggaaggtcgtctgatctttgataacttgaagaaatccattgcttataccttaaccagtaacattcccgagatcaccccgttcctgatatttattattgcaaacattccactaccactggggactgtcaccatcctctgcattgacttgggcactgacatggttcctgccatctccctggcttatgagcaggctgagagtgacatcatgaagagacagcccagaaatcccaaaacagacaaacttgtgaatgagcggctgatcagcatggcctatgggcagattggaatgatccaggccctgggaggcttctttacttactttgtgattctggctgagaacggcttcctcccaattcacctgttgggcctccgagtggactgggatgaccgctggatcaacgatgtggaagacagctacgggcagcagtggacctatgagcagaggaaaatcgtggagttcacctgccacacagccttcttcgtcagtatcgtggtggtgcagtgggccgacttggtcatctgtaagaccaggaggaattcggtcttccagcaggggatgaagaacaagatcttgatatttggcctctttgaagagacagccctggctgctttcctttcctactgccctggaatgggtgttgctcttaggatgtatcccctcaaacctacctggtggttctgtgccttcccctactctcttctcatcttcgtatatgacgaagtcagaaaactcatcatcaggcgacgccctggcggctgggtggagaargaaacctactattagccccccgtcctgcacgcygtggagcatcaggccacacactytgcatccgacacccacmccctctttgtgtacttcagtcttggagtttggaactctaccctggtaggaaagcacmgcagcatgtggggaagcaagacggcygcctgaaaaccatccatctgtggaaatgacagcggggaaggtttttatgtgcctttttgtttttgtaaaaaaggaacmcccggaaagactgaaagaatacattttatatctggatttttacaaataaagatggctattataatggaatttgtctgtgccctcgtcgcttctttggtacagatgtctatgtgatctggagctgtggttttcaacatgagtccctgaccagcagtttatcagcatcacctggttgcttgctaggaaggcgggcccagacccactgagtcagaaatgcatcagcaatgtggcttaataagccctcaggtgattttgatttacattcaagtttggaaaccactggctaagaggaagcattctgcccgtgctcttttagttggagtaggtgagtttacctgacccattttttctggctgctgcctggggtgatagggctgtaactccacctgctgccttagcatctggctttttgatggaagagcacctcgcctaaaggatttccagaccctcagagtatactaaactgcagatgaggcccttctctttcagtctaaaagagacctgaagccttcctgctttccctccagagatcaccaccacatctcaagtgtctctagcccagggcttatctgagaagcagaaatctatcccacacagtctgcctgggcatgtgtgctgagaagtggttcccttccttccatataatgtgttcctaatttagcatcaatgacacaatt

SEQ ID NO: 6320 - DNA, 3634 bp, Homo sapiens
ccccgcagccctcccgggacacggtggacacgcttgtcccagacctgggcgccctcctgccgggagccaggactggccgcagcaggcgctgtccgggcccgtgggcggggtttcgggagggggcggagccaggcccacggccggtgtcaggttgctccggtaacggtgacgtttcgcggcgtgggcggggccagcacgcaggttgcatattttaggaagtgaggaggaggcgcgggctggagctgcggcggggtctggggcgcaragcagcggcgggaggaggcggacacgtggcaacagcggtagcagcccgggcggcggcagcaacagcggcggcggcatcggcccgagccgccggccgccctcccaccctcccgccccgcggcagccctagctccctccacttggctcccctggtcccgctcgctcggccgggagmtgctctgtgcttttctctctgattctccagcgacaggaccyggcgccgggcamtgagcaccgccaccatggggaagggggttggacgtgataagtatgagcctgcagctgtttcagaacaaggtgataaaaagggcaaaaagggcaaaaaagacagggacatggatgaactgaagaaagaagtttctatggatgatcataaacttagccttgatgaacttcatcgtaaatatggaacagacttgagccggggattaacatctgctcgtgcagctgagatcctggcgcgagatggtcccaacgccctcactccccctcccactactcctgaatggatcaagttttgtcggcagctctttggggggttctcaatgttactgtggattggagcgattctttgtttcttggcttatagcatccaagctgctacagaagaggaacctcaaaacgataatctgtacctgggtgtggtgctatcagccgttgtaatcataactggttgcttctcctactatcaagaagctaaaagttcaaagatcatggaatccttcaaaaacatggtccctcagcaagcccttgtgattcgaaatggtgagaaaatgagcataaatgcggaggaagttgtggttggggatctggtggaagtaaaaggaggagaccgaattcctgctgacctcagaatcatatctgcaaatggctgcaaggtggataactcctcgctcactggtgaatcagaaccccagactaggtctccagatttcacaaatgaaaaccccctggagacgaggaacattgccttcttttcaacmaattgtgttgaaggcaccgcacgtggtattgttgtctacactggggatcgcactgtgatgggaagaattgccacacttgcttctgggctggaaggaggccagacccccattgctgcagaaattgaacattttatccacatcatcacgggtgtggctgtgttcctgggtgtgtctttcttcatcctttctctcatccttgagtacacctggcttgaggctgtcatcttcctcatcggtatcatcgtagccaatgtgccggaaggtttgctggccactgtcacggtctgtctgacacttactgccaaacgcatggcaaggaaaaactgcttagtgaagaacttagaagctgtggagaccttggggtccacrtccaccatctgctctgataaaactggaactctgactcagaaccggatgacagtggcccacatgtggtttgacaatcaaatccatgaagctgatacgacagagaatcagagtggtgtctcttttgacaagacttcagctacctggcttgctctgtccagaattgcaggtctttgtaacagggcagtgtttcaggctaaccaggaaaacctacctattcttaagcgggcagttgcaggagatgcctctgagtcagcactcttaaagtgcatagagctgtgctgtggttccgtgaaggagatgagagaaagatacgccaaaatcgtcgagatacccttcaactccaccaacaagtaccagttgtctattcataagaaccccaacacatcggagccccaacacctgttggtgatgaagggcgccccagaaaggatcctagaccgttgcagctctatcctcctccacggcaaggagcagcccctggatgaggagctgaaagacgcctttcagaacgcctatttggagctggggggcctcggagaacgagtcctaggtttctgccacctctttctgccagatgaacagtttcctgaagggttccagtttgacactgacgatgtgaatttccctatcgataatctgtgctttgttgggctcatctccatgattgaccctccacgggcggccgttcctgatgccgtgggcaaatgtcgaagtgctggaattaagacctatgagcagaggaaaatcgtggagttcacctgccacacagccttcttcgtcagtatcgtggtggtgcagtgggccgacttggtcatctgtaagaccaggaggaattcggtcttccagcaggggatgaagaacaagatcttgatatttggcctctttgaagagacagccctggctgctttcctttcctactgccctggaatgggtgttgctcttaggatgtatcccctcaaacctacctggtggttctgtgccttcccctactctcttctcatcttcgtatatgacgaagtcagaaaactcatcatcaggcgacgccctggcggctgggtggagaargaaacctactattagccccccgtcctgcacgcygtggagcatcaggccacacactytgcatccgacacccacmccctctttgtgtacttcagtcttggagtttggaactctaccctggtaggaaagcacmgcagcatgtggggaagcaagacgtcctggaatgaagcatgtagctctatggggggaggggggagggcygcctgaaaaccatccatctgtggaaatgacagcggggaaggtttttatgtgcctttttgtttttgtaaaaaaggaacmcccggaaagactgaaagaatacattttatatctggatttttacaaataaagatggctattataatggaatttgtctgtgccctcgtcgcttctttggtacagatgtctatgtgatctggagctgtggttttcaacatgagtccctgaccagcagtttatcagcatcacctggttgcttgctaggaaggcgggcccagacccactgagtcagaaatgcatcagcaatgtggcttaataagccctcaggtgattttgatttacattcaagtttggaaaccactggctaagaggaagcattctgcccgtgctcttttagttggagtaggtgagtttacctgacccattttttctggctgctgcctggggtgatagggctgtaactccacctgctgccttagcatctggctttttgatggaagagcacctcgcctaaaggatttccagaccctcagagtatactaaactgcagatgaggcccttctctttcagtctaaaagagacctgaagccttcctgctttccctccagagatcaccaccacatctcaagtgtctctagcccagggcttatctgagaagcagaaatctatcccacacagtctgcctgggcatgtgtgctgagaagtggttcccttccttccatataatgtgttcctaatttagcatcaatgacacaatt

SEQ ID NO: 6321 - DNA, 2857 bp, Homo sapiens
ccccgcagccctcccgggacacggtggacacgcttgtcccagacctgggcgccctcctgccgggagccaggactggccgcagcaggcgctgtccgggcccgtgggcggggtttcgggagggggcggagccaggcccacggccggtgtcaggttgctccggtaacggtgacgtttcgcggcgtgggcggggccagcacgcaggttgcatattttaggaagtgaggaggaggcgcgggctggagctgcggcggggtctggggcgcaragcagcggcgggaggaggcggacacgtggcaacagcggtagcagcccgggcggcggcagcaacagcggcggcggcatcggcccgagccgccggccgccctcccaccctcccgccccgcggcagccctagctccctccacttggctcccctggtcccgctcgctcggccgggagmtgctctgtgcttttctctctgattctccagcgacaggaccyggcgccgggcamtgagcaccgccaccatggggaagggggttggacgtgataagtatgagcctgcagctgtttcagaacaaggtgataaaaagggcaaaaagggcaaaaaagacagggacatggatgaactgaagaaagaagtttctatggatgatcataaacttagccttgatgaacttcatcgtaaatatggaacagacttgagccggggattaacatctgctcgtgcagctgagatcctggcgcgagatggtcccaacgccctcactccccctcccactactcctgaatggatcaagttttgtcggcagctctttggggggttctcaatgttactgtggattggagcgattctttgtttcttggcttatagcatccaagctgctacagaagaggaacctcaaaacgataatctgtacctgggtgtggtgctatcagccgttgtaatcataactggttgcttctcctactatcaagaagctaaaagttcaaagatcatggaatccttcaaaaacatggtccctcagcaagcccttgtgattcgaaatggtgagaaaatgagcataaatgcggaggaagttgtggttggggatctggtggaagtaaaaggaggagaccgaattcctgctgacctcagaatcatatctgcaaatggctgcaaggtggataactcctcgctcactggtgaatcagaaccccagactaggtctccagatttcacaaatgaaaaccccctggagacgaggaacattgccttcttttcaacmaattgtgttgaaggcaccgcacgtggtattgttgtctacactggggatcgcactgtgatgggaagaattgccacacttgcttctgggctggaaggaggccagacccccattgctgcagaaattgaacattttatccacatcatcacgggtgtggctgtgttcctgggtgtgtctttcttcatcctttctctcatccttgagtacacctggcttgaggctgtcatcttcctcatcggtatcatcgtagccaatgtgccggaaggtttgctggccactgtcacggtctgtctgacacttactgccaaacgcatggcaaggaaaaactgcttagtgaagaacttagaagctgtggagaccttggggtccacrtccaccatctgctctgataaaactggaactctgactcagaaccggatgacagtggcccacatgtggtttgacaatcaaatccatgaagctgatacgacagagaatcagagtggtgtctcttttgacaagacttcagctacctggcttgctctgtccagaattgcaggtctttgtaacagggcagtgtttcaggctaaccaggaaaacctaccttctcttctcatcttcgtatatgacgaagtcagaaaactcatcatcaggcgacgccctggcggctgggtggagaargaaacctactattagccccccgtcctgcacgcygtggagcatcaggccacacactytgcatccgacacccacmccctctttgtgtacttcagtcttggagtttggaactctaccctggtaggaaagcacmgcagcatgtggggaagcaagacgtcctggaatgaagcatgtagctctatggggggaggggggagggcygcctgaaaaccatccatctgtggaaatgacagcggggaaggtttttatgtgcctttttgtttttgtaaaaaaggaacmcccggaaagactgaaagaatacattttatatctggatttttacaaataaagatggctattataatggaatttgtctgtgccctcgtcgcttctttggtacagatgtctatgtgatctggagctgtggttttcaacatgagtccctgaccagcagtttatcagcatcacctggttgcttgctaggaaggcgggcccagacccactgagtcagaaatgcatcagcaatgtggcttaataagccctcaggtgattttgatttacattcaagtttggaaaccactggctaagaggaagcattctgcccgtgctcttttagttggagtaggtgagtttacctgacccattttttctggctgctgcctggggtgatagggctgtaactccacctgctgccttagcatctggctttttgatggaagagcacctcgcctaaaggatttccagaccctcagagtatactaaactgcagatgaggcccttctctttcagtctaaaagagacctgaagccttcctgctttccctccagagatcaccaccacatctcaagtgtctctagcccagggcttatctgagaagcagaaatctatcccacacagtctgcctgggcatgtgtgctgagaagtggttcccttccttccatataatgtgttcctaatttagcatcaatgacacaatt

SEQ ID NO: 6322 - DNA, 4516 bp, Homo sapiens
ccccgcagccctcccgggacacggtggacacgcttgtcccagacctgggcgccctcctgccgggagccaggactggccgcagcaggcgctgtccgggcccgtgggcggggtttcgggagggggcggagccaggcccacggccggtgtcaggttgctccggtaacggtgacgtttcgcggcgtgggcggggccagcacgcaggttgcatattttaggaagtgaggaggaggcgcgggctggagctgcggcggggtctggggcgcaragcagcggcgggaggaggcggacacgtggcaacagcggtagcagcccgggcggcggcagcaacagcggcggcggcatcggcccgagccgccggccgccctcccaccctcccgccccgcggcagccctagctccctccacttggctcccctggtcccgctcgctcggccgggagmtgctctgtgcttttctctctgattctccagcgacaggaccyggcgccgggcamtgagcaccgccaccatggggaagggggttggacgtgataagtatgagcctgcagctgtttcagaacaaggtgataaaaagggcaaaaagggcaaaaaagacagggacatggatgaactgaagaaagaagtttctatggatgatcataaacttagccttgatgaacttcatcgtaaatatggaacagacttgagccggggattaacatctgctcgtgcagctgagatcctggcgcgagatggtcccaacgccctcactccccctcccactactcctgaatggatcaagttttgtcggcagctctttggggggttctcaatgttactgtggattggagcgattctttgtttcttggcttatagcatccaagctgctacagaagaggaacctcaaaacgataatctgtacctgggtgtggtgctatcagccgttgtaatcataactggttgcttctcctactatcaagaagctaaaagttcaaagatcatggaatccttcaaaaacatggtccctcagcaagcccttgtgattcgaaatggtgagaaaatgagcataaatgcggaggaagttgtggttggggatctggtggaagtaaaaggaggagaccgaattcctgctgacctcagaatcatatctgcaaatggctgcaaggtggataactcctcgctcactggtgaatcagaaccccagactaggtctccagatttcacaaatgaaaaccccctggagacgaggaacattgccttcttttcaacmaattgtgttgaaggcaccgcacgtggtattgttgtctacactggggatcgcactgtgatgggaagaattgccacacttgcttctgggctggaaggaggccagacccccattgctgcagaaattgaacattttatccacatcatcacgggtgtggctgtgttcctgggtgtgtctttcttcatcctttctctcatccttgagtacacctggcttgaggctgtcatcttcctcatcggtatcatcgtagccaatgtgccggaaggtttgctggccactgtcacggtctgtctgacacttactgccaaacgcatggcaaggaaaaactgcttagtgaagaacttagaagctgtggagaccttggggtccacrtccaccatctgctctgataaaactggaactctgactcagaaccggatgacagtggcccacatgtggtttgacaatcaaatccatgaagctgatacgacagagaatcagagtggtgtctcttttgacaagacttcagctacctggcttgctctgtccagaattgcaggtctttgtaacagggcagtgtttcaggctaaccaggaaaacctacctattcttaagcgggcagttgcaggagatgcctctgagtcagcactcttaaagtgcatagagctgtgctgtggttccgtgaaggagatgagagaaagatacgccaaaatcgtcgagatacccttcaactccaccaacaagtaccagttgtctattcataagaaccccaacacatcggagccccaacacctgttggtgatgaagggcgccccagaaaggatcctagaccgttgcagctctatcctcctccacggcaaggagcagcccctggatgaggagctgaaagacgcctttcagaacgcctatttggagctggggggcctcggagaacgagtcctaggtttctgccacctctttctgccagatgaacagtttcctgaagggttccagtttgacactgacgatgtgaatttccctatcgataatctgtgctttgttgggctcatctccatgattgaccctccacgggcggccgttcctgatgccgtgggcaaatgtcgaagtgctggaattaaggtcatcatggtcacaggagaccatccaatcacagctaaagctattgccaaaggtgtgggcatcatctcagaaggcaatgagaccgtggaagacattgctgcccgcctcaacatcccagtcagccaggtgaaccccagggatgccaaggcctgcgtagtacacggcagtgatctaaaggacatgacctccgagcagctggatgacattttgaagtaccacactgagatagtgtttgccaggacctcccctcagcagaagctcatcattgtggaaggctgccaaagacagggtgctatcgtggctgtgactggtgacggtgtgaatgactctccagctttgaagaaagcagacattggggttgctatggggattgctggctcagatgtgtccaagcaagctgctgacatgattcttctggatgacaactttgcctcaattgtgactggagtagaggaaggtcgtctgatctttgataacttgaagaaatccattgcttataccttaaccagtaacattcccgagatcaccccgttcctgatatttattattgcaaacattccactaccactggggactgtcaccatcctctgcattgacttgggcactgacatggttcctgccatctccctggcttatgagcaggctgagagtgacatcatgaagagacagcccagaaatcccaaaacagacaaacttgtgaatgagcggctgatcagcatggcctatgggcagattggaatgatccaggccctgggaggcttctttacttactttgtgattctggctgagaacggcttcctcccaattcacctgttgggcctccgagtggactgggatgaccgctggatcaacgatgtggaagacagctacgggcagcagtggacctatgagcagaggaaaatcgtggagttcacctgccacacagccttcttcgtcagtatcgtggtggtgcagtgggccgacttggtcatctgtaagaccaggaggaattcggtcttccagcaggggatgaagaacaagatcttgatatttggcctctttgaagagacagccctggctgctttcctttcctactgccctggaatgggtgttgctcttaggatgtatcccctcaaacctacctggtggttctgtgccttcccctactctcttctcatcttcgtatatgacgaagtcagaaaactcatcatcaggcgacgccctggcggctgggtggagaargaaacctactattagccccccgtcctgcacgcygtggagcatcaggccacacactytgcatccgacacccacmccctctttgtgtacttcagtcttggagtttggaactctaccctggtaggaaagcacmgcagcatgtggggaagcaagacgtcctggaatgaagcatgtagctctatggggggaggggggagggcygcctgaaaaccatccatctgtggaaatgacagcggggaaggtttttatgtgcctttttgtttttgtaaaaaaggaacmcccggaaagactgaaagaatacattttatatctggatttttacaaataaagatggctattataatggaatttgtctgtgccctcgtcgcttctttggtacagatgtctatgtgatctggagctgtggttttcaacatgagtccctgaccagcagtttatcagcatcacctggttgcttgctaggaaggcgggcccagacccactgagtcagaaatgcatcagcaatgtggcttaataagccctcaggtgattttgatttacattcaagtttggaaaccactggctaagaggaagcattctgcccgtgctcttttagttggagtaggtgagtttacctgacccattttttctggctgctgcctggggtgatagggctgtaactccacctgctgccttagcatctggctttttgatggaagagcacctcgcctaaaggatttccagaccctcagagtatactaaactgcagatgaggcccttctctttcagtctaaaagagacctgaagccttcctgctttccctccagagatcaccaccacatctcaagtgtctctagcccagggcttatctgagaagcagaaatctatcccacacagtctgcctgggcatgtgtgctgagaagtggttcccttccttccatataatgtgttcctaatttagcatcaatgacacaatt

SEQ ID NO: 6323 - DNA, 3376 bp, Homo sapiens
ttgtgtacatttacatctgtttaatcggctatttacagtcgccctttaccgccacctgtaagaggcagcgccataacgacactaagtggccgggccggaagccgggtgcccartggttttctccacttgaggacgcctgaatctgtgaagtggttggcacttggagaaacagagagacagctggggacatcacacgtacagggcgggaggcgcgggaaagaggcgcgccagacggagggtccttccttcctcgttagctccactcggcggctccttttccattaccacagcagcaaggaggaacctgcckagccttcggtgcggcttgtttcctgcctgacagagagcccgctgccatttggatttgaygaatttctgaatcacccgagggcctggcgacccgaaggagggcggggagtgggggcgctggggtggacccgccatcctgcggaatccgggccagataacagcccccgagctggggaaatcggcttgcggatgtgatgcgggaccgcgaggacacctgcgctcccttgcgtgtcgcactcgtgcagctcccggtggcgacggggtgatgtgggggcgagggtgagaggaagtccaggcgccagagcgtcagaaacgcttccttagcttccctggcactttggaggttgtctcgagggaacacggacagtgcacgacggactttcaagttgctcccggcacaacgggaggtcgggagctcggagcccctacgggcggtccaagtgtccgcgagaagcccgcagcgcccaggaccgcgttgagcgctcggggcgcgccaagccgcacctaagcaaaagagaaacgctgacgggccggaggcgggttggctgggacgcggaatacgcgcggccccggagcgcctttcgttttaaggagccttacttctggaaagggacagggaactgtcaatcagcgagggagggagcgcaccggcgctgggtgatgtcagcggatcagctgctcgataacaaagagagggtattacaggagaaagttgcagcagcggcagcggccaaggcggcacaccggagcctccgaggcgaggggcaagtgggcgaagggaggggggacgacggctgctgccgcagcagctgaaggccaaggaattgaaagggctgtagggggaggcagtgcgagccagccccgactgctcctcctcttcctcctcctcctccaaactcgcgagccccagagctcgctcagccgccgggagcacccagagggacgggaggcagccgcgcagccccgagctgggcagtgtccccagccgccatggatagcgacgacgagatggtggaggaggcggtggaagggcacctggacgatgacggattaccrcacgggttctgcacagtcacctactcctccacagacagatttgaggggaactttgttcacggagaaaagaacggacgggggaagttcttcttctttgatggcagcaccctggaggggtattatgtggatgatgccttgcagggccagggagtttacacttacgaagatgggggagttctccagggcacgtatgtagacggagagctgaayggtccagcccaggaatatgacacagatgggagactgatcttcaaggggcagtataaagataacattcgtcatggagtgtgctggatatattacccagatggaggaagccttgtaggagaagtaaatgaagatggggagatgactggagagaagatagcctaygtgtaccctgatgagaggaccgcactttatgggaaatttattgatggagagatgatagaaggcaaactggctacccttatgtccactgaagaagggaggcctcaytttgaactgatgcctggaaattcagtgtaccactttgataagtcgacttcatcttgcatttctaccaatgctcttcttccagatccttatgaatcagaaagggtttatgttgctgaatctcttatttccagtgctggagaaggacttttttcaaaggtagctgtgggacctaatactgttatgtctttttataatggagttcgaattacacaccaagaggttgacagcagggactgggcccttaatgggaacaycctctcccttgatgaagaaacggtcattgatgtgcctgagccctataaccacgtatccaagtactgtgcctccttgggacacaaggcaaatcactccttcactccaaactgcatctacgatatgtttgtccacccccgttttgggcccatcaaatgcatccgcaccctgagagcagtggaggccgatgaagagctcaccgttgcctatggctatgaccacagcccccccgggaagagtgggcctgaagcccctgagtggtaccaggtggagctgaaggccttccaggccacccagcaaaagtgaaaggcctggctttggggttcagagacctggaatagaaacttggatctatgcactacgtttatctgacaatgggacaaccagggactgctcatgctgtgacgtcacatcctctcaccatgcgttagcaacgactttctcgcatactaactaggtttgactgtattactcataccagatttaaaattagctagccttgcaacaacgtcctactgagaggtattgtcgagcatttgacataagacagcgtgatgttctttggtggttcaagtctaaatctgtaccacattcggagatgccaaatgattagactgaaacagggaaacggggtttttcagtcatttttagtcagtggtttttccatagtgcttttttcctatggccagtgcaaattgtgttagcacacttgcatatgtgccgtattaagggttgacaattactacatctttattctctaaatgtagtataatttgccttttaacctttgatctgtatcttgcaatagaatggctttggtttttttcttagtaaataggagcccacttctaaagtcatttcacccctcagccctattctctttcttagataccctttacaagagaaaacttccaaatggatttttgcatcaatagcagtgtgtaggtctctctggttctttctatatcatcattttattattatgtcctaatataaagtactggctcatagggccagggtattattatagaatattattctcgcatgtaaacaaagatatctttgctttaagatgtgagaagaaatgaatttactttgtttgcattaagttatggaagagttgtaatatatactttaagaaagaagagaagaaaactagtatctctaagcggtaactatggcaattttgcaatattttcagtagtgctagtaattttttcctccttgagtacacattaaatgtacataacatagcgcggtcaggcttgtggcacagtgcatt

SEQ ID NO: 6324 - DNA, 2573 bp, Homo sapiens
ctctaggagtccagagtatcaactggcagamggccttcaaccgacaagcgcatcacacagacaagttctccagccaggagctcatcttgcggagaggccaaaacttccaggtcttaatgatcatgaacaaaggccttggctctaacgaaagactggagttcattgtctccacagggccttacccctcagagtcggccatgacgaaggctgtgtttccactctccaatggcagtagtggtggctggagtgcggtgcttcaggccagcaatggcaatactctgactatcagcatctccagtcctgccagcgcacccataggacggtacacaatggccctccagatcttctcccagggcggcatctcctctgtgaaacttgggacgttcatactgctttttaacccctggctgaatgtggatagcgtctttatgggtaaccacgctgagagagaagagtatgttcaggaagatgccggcatcmtctttgtgggaagcacaaaccgaattggcatgattggctggaactttggacagtttgaagaagacattctcagcatctgcctctcaatcttggataggagtctgaatttccgccgtgacgctgctactgatgtggccagcagaaatgaccccaaatacgttggccgggtgctgagtgccatgatcaatagcaatgatgacaatggtgtgcttgctgggaattggagcggcacttacaccggtggccgggacccaaggarctggaacggcagcgtggagatcctcaaaaattggaaaaaatctggcttcagcccagtccgatatggccagtgctgggtctttgctgggaccctcaacacagcgctgcggtctttggggattccttcccgggtgatcaccaacttcaactcagctcatgacacagaccgaaatctcagtgtggatgtgtactacgaccccatgggaaaccccctggacaagggtagtgatagcgtatggaatttccatgtctggaatgaaggctggtttgtgaggtctgacctgggcccctcgtacggtggatggcaggtgttggatgctaccccgcaggaaagaagccaaggggtgttccagtgcggccccgcttcggtcattggtgttcgagagggtgatgtgcagctgaacttcgacatgccctttatcttcgcggaggttaatgccgaccgcatcacctggctgtacgacaacaccactggcaaacagtggaagaattccgtgaacagtcacaccattggcaggtacatcagcaccaaggckgtgggcagcaatgctcgcatggacgtcacggacaagtacaagtacccagaaggctctgaccaggaaagacaagtgttccaaaaggctttggggaaacttaaacccaacacgccatttgccgcgacgtcttcratgggtttggaaacagaggaacaggagcccagcatcatcgggaagctgaaggtcgctggcatgctggcagtaggcaaagaagtcaacctggtcctactgctcaaaaacctgagcagggatacgaagacagtgacagtgaacatgacagcctggaccatcatctacaayggcacgcttgtacatgaagtgtggaaggactctgccacaatgtccctggaccctgaggaagaggcagaacatcccataaagatctcgtacgctcagtatgagargtacctgaagtcagacaacatgatccggatcacagcggtgtgcaaggtcccagatgagtctgaggtggtggtggagcgggacatcatcctggacaaccccaccttgaccctggaggtgctgaacgaggctcgtgtgcggaagcctgtgaacgtgcagatgctcttctccaatccactggatgagccggtgagggactgcgtgctgatggtggagggaagcggcctgctgttgggtaacctgaagatcgacgtgccgaccctagggcccaaggagsggtcccgggtccgttttgatatcctgccctcccggagtggcaccaagcaactgctcgccgacttctcctgcaacaagttccctgcaatcaaggccatgttgtccatcgaygtagccgaatgaagggcgctggtggcctcccgtacaaacttggacaacacggagcagggagagctcaccatggaatgaaccccccgcccatgctgtccggcctgggaaaccctctccatctcccaaggctgccagacatggacctccrggctccagcacatccccctctcctctcccccaggttggggctgggtccaccctgtcctatgacttgatcacttttgcacattccctggccgyttctccccagagctgcctgctctgtgagccccacagccctgctcattcctcacgcccttcaatgctgcaggatggactggcccctgacccagggactctccaaacgggatacaggagagaagctggtctagactgtttgctgatccccaacctgcacggggcattcctgcttctctctcaggccaccacagagggcaggggatggttagycacctgccccagcactcacaccctaactcaaaataaatgttaaataagtgcgatcacaca

SEQ ID NO: 6325 - DNA, 2574 bp, Homo sapiens
gtctgtcagcactgtccgtgccattcccagaggagcctgagaagaggcagaggaaggcgaaacatggctgctctaggagtccagagtatcaactggcagamggccttcaaccgacaagcgcatcacacagacaagttctccagccaggagctcatcttgcggagaggccaaaacttccaggtcttaatgatcatgaacaaaggccttggctctaacgaaagactggagttcattgtctccacagggccttacccctcagagtcggccatgacgaaggctgtgtttccactctccaatggcagtagtggtggctggagtgcggtgcttcaggccagcaatggcaatactctgactatcagcatctccagtcctgccagcgcacccataggacggtacacaatggccctccagatcttctcccagggcggcatctcctctgtgaaacttgggacgttcatactgctttttaacccctggctgaatgtggatagcgtctttatgggtaaccacgctgagagagaagagtatgttcaggaagatgccggcatcmtctttgtgggaagcacaaaccgaattggcatgattggctggaactttggacagtttgaagaagacattctcagcatctgcctctcaatcttggataggagtctgaatttccgccgtgacgctgctactgatgtggccagcagaaatgaccccaaatacgttggccgggtgctgagtgccatgatcaatagcaatgatgacaatggtgtgcttgctgggaattggagcggcacttacaccggtggccgggacccaaggarctggaacggcagcgtggagatcctcaaaaattggaaaaaatctggcttcagcccagtccgatatggccagtgctgggtctttgctgggaccctcaacacagcgctgcggtctttggggattccttcccgggtgatcaccaacttcaactcagctcatgacacagaccgaaatctcagtgtggatgtgtactacgaccccatgggaaaccccctggacaagggtagtgatagcgtatggaatttccatgtctggaatgaaggctggtttgtgaggtctgacctgggcccctcgtacggtggatggcaggtgttggatgctaccccgcaggaaagaagccaaggggtgttccagtgcggccccgcttcggtcattggtgttcgagagggtgatgtgcagctgaacttcgacatgccctttatcttcgcggaggttaatgccgaccgcatcacctggctgtacgacaacaccactggcaaacagtggaagaattccgtgaacagtcacaccattggcaggtacatcagcaccaaggckgtgggcagcaatgctcgcatggacgtcacggacaagtacaagtacccagaaggctctgaccaggaaagacaagtgttccaaaaggctttggggaaacttaaacccaacacgccatttgccgcgacgtcttcratgggtttggaaacagaggaacaggagcccagcatcatcgggaagctgaaggtcgctggcatgctggcagtaggcaaagaagtcaacctggtcctactgctcaaaaacctgagcagggatacgaagacagtgacagtgaacatgacagcctggaccatcatctacaayggcacgcttgtacatgaagtgtggaaggactctgccacaatgtccctggaccctgaggaagaggcagaacatcccataaagatctcgtacgctcagtatgagargtacctgaagtcagacaacatgatccggatcacagcggtgtgcaaggtcccagatgagtctgaggtggtggtggagcgggacatcatcctggacaaccccaccttgaccctggaggtgctgaacgaggctcgtgtgcggaagcctgtgaacgtgcagatgctcttctccaatccactggatgagccggtgagggactgcgtgctgatggtggagggaagcggcctgctgttgggtaacctgaagatcgacgtgccgaccctagggcccaaggagsggtcccgggtccgttttgatatcctgccctcccggagtggcaccaagcaactgctcgccgacttctcctgcaacaagttccctgcaatcaaggccatgttgtccatcgaygtagccgaatgaagggcgctggtggcctcccgtacaaacttggacaacacggagcagggagagctcaccatggaatgaaccccccgcccatgctgtccggcctgggaaaccctctccatctcccaaggctgccagacatggacctccrggctccagcacatccccctctcctctcccccagagctgcctgctctgtgagccccacagccctgctcattcctcacgcccttcaatgctgcaggatggactggcccctgacccagggactctccaaacgggatacaggagagaagctggtctagactgtttgctgatccccaacctgcacggggcattcctgcttctctctcaggccaccacagagggcaggggatggttagycacctgccccagcactcacaccctaactcaaaataaatgttaaataagtgcgatcacaca

SEQ ID NO: 6326 - DNA, 2643 bp, Homo sapiens
gtctgtcagcactgtccgtgccattcccagaggagcctgagaagaggcagaggaaggcgaaacatggctgctctaggagtccagagtatcaactggcagamggccttcaaccgacaagcgcatcacacagacaagttctccagccaggagctcatcttgcggagaggccaaaacttccaggtcttaatgatcatgaacaaaggccttggctctaacgaaagactggagttcattgtctccacagggccttacccctcagagtcggccatgacgaaggctgtgtttccactctccaatggcagtagtggtggctggagtgcggtgcttcaggccagcaatggcaatactctgactatcagcatctccagtcctgccagcgcacccataggacggtacacaatggccctccagatcttctcccagggcggcatctcctctgtgaaacttgggacgttcatactgctttttaacccctggctgaatgtggatagcgtctttatgggtaaccacgctgagagagaagagtatgttcaggaagatgccggcatcmtctttgtgggaagcacaaaccgaattggcatgattggctggaactttggacagtttgaagaagacattctcagcatctgcctctcaatcttggataggagtctgaatttccgccgtgacgctgctactgatgtggccagcagaaatgaccccaaatacgttggccgggtgctgagtgccatgatcaatagcaatgatgacaatggtgtgcttgctgggaattggagcggcacttacaccggtggccgggacccaaggarctggaacggcagcgtggagatcctcaaaaattggaaaaaatctggcttcagcccagtccgatatggccagtgctgggtctttgctgggaccctcaacacagcgctgcggtctttggggattccttcccgggtgatcaccaacttcaactcagctcatgacacagaccgaaatctcagtgtggatgtgtactacgaccccatgggaaaccccctggacaagggtagtgatagcgtatggaatttccatgtctggaatgaaggctggtttgtgaggtctgacctgggcccctcgtacggtggatggcaggtgttggatgctaccccgcaggaaagaagccaaggggtgttccagtgcggccccgcttcggtcattggtgttcgagagggtgatgtgcagctgaacttcgacatgccctttatcttcgcggaggttaatgccgaccgcatcacctggctgtacgacaacaccactggcaaacagtggaagaattccgtgaacagtcacaccattggcaggtacatcagcaccaaggckgtgggcagcaatgctcgcatggacgtcacggacaagtacaagtacccagaaggctctgaccaggaaagacaagtgttccaaaaggctttggggaaacttaaacccaacacgccatttgccgcgacgtcttcratgggtttggaaacagaggaacaggagcccagcatcatcgggaagctgaaggtcgctggcatgctggcagtaggcaaagaagtcaacctggtcctactgctcaaaaacctgagcagggatacgaagacagtgacagtgaacatgacagcctggaccatcatctacaayggcacgcttgtacatgaagtgtggaaggactctgccacaatgtccctggaccctgaggaagaggcagaacatcccataaagatctcgtacgctcagtatgagargtacctgaagtcagacaacatgatccggatcacagcggtgtgcaaggtcccagatgagtctgaggtggtggtggagcgggacatcatcctggacaaccccaccttgaccctggaggtgctgaacgaggctcgtgtgcggaagcctgtgaacgtgcagatgctcttctccaatccactggatgagccggtgagggactgcgtgctgatggtggagggaagcggcctgctgttgggtaacctgaagatcgacgtgccgaccctagggcccaaggagsggtcccgggtccgttttgatatcctgccctcccggagtggcaccaagcaactgctcgccgacttctcctgcaacaagttccctgcaatcaaggccatgttgtccatcgaygtagccgaatgaagggcgctggtggcctcccgtacaaacttggacaacacggagcagggagagctcaccatggaatgaaccccccgcccatgctgtccggcctgggaaaccctctccatctcccaaggctgccagacatggacctccrggctccagcacatccccctctcctctcccccaggttggggctgggtccaccctgtcctatgacttgatcacttttgcacattccctggccgyttctccccagagctgcctgctctgtgagccccacagccctgctcattcctcacgcccttcaatgctgcaggatggactggcccctgacccagggactctccaaacgggatacaggagagaagctggtctagactgtttgctgatccccaacctgcacggggcattcctgcttctctctcaggccaccacagagggcaggggatggttagycacctgccccagcactcacaccctaactcaaaataaatgttaaataagtgcgatcacaca

SEQ ID NO: 6327 - DNA, 3332 bp, Homo sapiens
cccaggtttactcttacgccactgacgtaacgtcatcgtgcgggacgtggacggaagaaaaaagagagtgagcgagcgccggaatcagcccggcgtggagtgcggacccgcggtagtgccagggggcgaaggcggcggtggtgaggaagatactttggttagtgaccacatcgcagcatgttgagtcaagtttaccgctgtgggttccagcccttcaaccaacatcttctgccctgggtcaagtgtacaaccgtcttcagatctcattgtatccagccttcagtcatcagacatgttcgttcttggagcaacatcccgtttatcactgtacccctcagtcgtacacatggcaagtccttcgcccaccgcagtgagctgaagcatgccaagagaatcgtggtgaagctcggcagtgccgtggtgacccraggggatgaatgtggcctggccctggggcgcttggcatctattgttgagcaggtatcagtgctgcagaatcagggcagagagatgatgctggtgaccagtggagccgtagcctttggcaaacaacgcttgcgccatgagatccttctgtctcagagcgtgcggcaggccctccactcggggcagaaccagctgaaagaaatggcaattccagtcttagaggcacgagcctgtgcagctgccggacagagtgggctgatggccttgtatgaggctatgtttacccagtacagcatctgtgctgcccagattttggtgaccaatttggatttccatgatgagcagaagcgccggaacctcaatggaacacttcatgaactccttagaatgaacattgtccccattgtcaacacaaatgatgctgttgtccccccagctgagcccaacagtgacctgcagggggtaaatgttattagtgttaaagataatgatagcctggctgcccgactggctgtggaaatgaaaactgatctcttgattgttctttcagatgtagaaggcctttttgacagccccccaggttcagatgatgcaaagcttattgatatattttatcccggagatcagcagtctgtgacatttggamycaagtctagagtgggaatgggtggcatggaagccaaggtgaaagcagccctctgggctttgcaaggtggcacttctgttgttattgccaatggaacccacccaaaggtgtctgggcacgtcatcacagacattgtggaggggaagaaagttggtaccttcttttcagaagtaaagcctgcaggccctactgttgagcagcagggagaaatggcgcgatmtggaggaaggatgttggccaccttggaacctgagcagagagcagaaattatccatcatctggctgatctgttgacggaccagcgtgatgagatcctgttagccaacaaaaaagacttggaggaggcagaggggagacttgcagctcctctgctgaaacgtttaagcctctccacatccaaattgaacagcctggccatcggtctgcgacagatcgcagcctcctcccaggacagcgtgggacgtgttttgcgccgcacccgaatcgccaaaaacttggaactggaacaagtgactgtcccaattggagttctgctggtgatctttgaatctcgtcctgactgtctaccccaggtggcagctttggctatcgcaagtggcaatggcttgttactcaaaggagggaaggaggctgcacacagcaaccggattctccacctcctgacccaggaggctctctcaatccatggagtcaaggaggccgtgcaactggtgaataccagagaagaagttgaagatctttgccgcctagacaaaatgatagatctgatcattccacgtggctcttcccagctggtcagagacatccagaaagctgctaaggggattccagtgatggggcacagcgaagggatctgtcacatgtatgtggattccgaggccagtgttgataaggtcaccaggctagtcagagactctaaatgtgaatatccagctgcctgtaatgctttggagactttgttaatccaccgggatctgctcaggacaccattatttgaccagatcattgatatgctgagagtggaacaggtaaaaattcatgcaggccccaaatttgcctcctatctgaccttcagcccctcygaagtgaagtcactccgaactgagtatggggacctggaattatgcattgaagtagtggacaacgttcaggatgccattgaccacatccacaagtatggcagctcccacacggatgtcatcgtcacagaggacgaaaacacagcggagttcttcctgcagcacgtagacagtgcctgtgtgttctggaatgccagcactcgcttttctgatggttaccgctttggactgggagctgaagtgggaatcagtacatcgagaatccacgcccggggaccagtaggacttgagggactgcttactactaagtggctgctgcgagggaaggaccacgtggtctcagatttctcagagcatggaagtttaaaatatcttcatgagaacctccctattcctcagagaaacaccaactgaaaagagccaggaaaacccgggaattttccaaaaggtcttcacgttaaacttgtcttatctcaggagagagcccgctcttgtctcccagttcctggtagggtctgcctgttggaaagtgtacctggatgcttctgggctccgtttggcaatagcartcttggctgatgtgcacagtctggctcccagctcaccctttttttttaaagtaagaaaatagttgctaccgrtagggactttgccaagtccaattatcttctaggattgaaaggtgcattttccccataaaaaaggcgaggaaaacccatggctgctttgtgtcacctcagtgacttacagtcccccttggcatttagttggtactagagccagtcatccttaacaaatcttttcacattttatttctttcacatgyagtcatcttcaaaaaggaaagatttggaattttagaaaaggggcaactcttctttttagcattctcatcagaaatggggtaaattaataagcattccagatgcttgcagcttcctgcatccaggagatgctgtgttccccgtgatgcagctggaacccaagctgcagcaggagatgcaagtttcaggatgttccccactgagctggaggaatatctacagcagtgatgyttgaaatttttgtatgaattattttgtcgtcctacccttttcctccaaaacaaaaattagaggattattttaatactttggattcttcccccttttttgagaaataaagttttttatgaaaagcct

SEQ ID NO: 6328 - DNA, 3354 bp, Homo sapiens
aggcggcggtggtgaggaaggtacgcggcgagcggcggggatggctaggcgcccgcgtctctgcggaagctgttgcgcgcccaggctcaagcgcgaggggcgtgagcgccgggccgctggagcggggacgctgccggagcaggtgccggggcccggggatctggcccatggatactttggttagtgaccacatcgcagcatgttgagtcaagtttaccgctgtgggttccagcccttcaaccaacatcttctgccctgggtcaagtgtacaaccgtcttcagatctcattgtatccagccttcagtcatcagacatgttcgttcttggagcaacatcccgtttatcactgtacccctcagtcgtacacatggcaagtccttcgcccaccgcagtgagctgaagcatgccaagagaatcgtggtgaagctcggcagtgccgtggtgacccraggggatgaatgtggcctggccctggggcgcttggcatctattgttgagcaggtatcagtgctgcagaatcagggcagagagatgatgctggtgaccagtggagccgtagcctttggcaaacaacgcttgcgccatgagatccttctgtctcagagcgtgcggcaggccctccactcggggcagaaccagctgaaagaaatggcaattccagtcttagaggcacgagcctgtgcagctgccggacagagtgggctgatggccttgtatgaggctatgtttacccagtacagcatctgtgctgcccagattttggtgaccaatttggatttccatgatgagcagaagcgccggaacctcaatggaacacttcatgaactccttagaatgaacattgtccccattgtcaacacaaatgatgctgttgtccccccagctgagcccaacagtgacctgcagggggtaaatgttattagtgttaaagataatgatagcctggctgcccgactggctgtggaaatgaaaactgatctcttgattgttctttcagatgtagaaggcctttttgacagccccccaggttcagatgatgcaaagcttattgatatattttatcccggagatcagcagtctgtgacatttggamycaagtctagagtgggaatgggtggcatggaagccaaggtgaaagcagccctctgggctttgcaaggtggcacttctgttgttattgccaatggaacccacccaaaggtgtctgggcacgtcatcacagacattgtggaggggaagaaagttggtaccttcttttcagaagtaaagcctgcaggccctactgttgagcagcagggagaaatggcgcgatmtggaggaaggatgttggccaccttggaacctgagcagagagcagaaattatccatcatctggctgatctgttgacggaccagcgtgatgagatcctgttagccaacaaaaaagacttggaggaggcagaggggagacttgcagctcctctgctgaaacgtttaagcctctccacatccaaattgaacagcctggccatcggtctgcgacagatcgcagcctcctcccaggacagcgtgggacgtgttttgcgccgcacccgaatcgccaaaaacttggaactggaacaagtgactgtcccaattggagttctgctggtgatctttgaatctcgtcctgactgtctaccccaggtggcagctttggctatcgcaagtggcaatggcttgttactcaaaggagggaaggaggctgcacacagcaaccggattctccacctcctgacccaggaggctctctcaatccatggagtcaaggaggccgtgcaactggtgaataccagagaagaagttgaagatctttgccgcctagacaaaatgatagatctgatcattccacgtggctcttcccagctggtcagagacatccagaaagctgctaaggggattccagtgatggggcacagcgaagggatctgtcacatgtatgtggattccgaggccagtgttgataaggtcaccaggctagtcagagactctaaatgtgaatatccagctgcctgtaatgctttggagactttgttaatccaccgggatctgctcaggacaccattatttgaccagatcattgatatgctgagagtggaacaggtaaaaattcatgcaggccccaaatttgcctcctatctgaccttcagcccctcygaagtgaagtcactccgaactgagtatggggacctggaattatgcattgaagtagtggacaacgttcaggatgccattgaccacatccacaagtatggcagctcccacacggatgtcatcgtcacagaggacgaaaacacagcggagttcttcctgcagcacgtagacagtgcctgtgtgttctggaatgccagcactcgcttttctgatggttaccgctttggactgggagctgaagtgggaatcagtacatcgagaatccacgcccggggaccagtaggacttgagggactgcttactactaagtggctgctgcgagggaaggaccacgtggtctcagatttctcagagcatggaagtttaaaatatcttcatgagaacctccctattcctcagagaaacaccaactgaaaagagccaggaaaacccgggaattttccaaaaggtcttcacgttaaacttgtcttatctcaggagagagcccgctcttgtctcccagttcctggtagggtctgcctgttggaaagtgtacctggatgcttctgggctccgtttggcaatagcartcttggctgatgtgcacagtctggctcccagctcaccctttttttttaaagtaagaaaatagttgctaccgrtagggactttgccaagtccaattatcttctaggattgaaaggtgcattttccccataaaaaaggcgaggaaaacccatggctgctttgtgtcacctcagtgacttacagtcccccttggcatttagttggtactagagccagtcatccttaacaaatcttttcacattttatttctttcacatgyagtcatcttcaaaaaggaaagatttggaattttagaaaaggggcaactcttctttttagcattctcatcagaaatggggtaaattaataagcattccagatgcttgcagcttcctgcatccaggagatgctgtgttccccgtgatgcagctggaacccaagctgcagcaggagatgcaagtttcaggatgttccccactgagctggaggaatatctacagcagtgatgyttgaaatttttgtatgaattattttgtcgtcctacccttttcctccaaaacaaaaattagaggattattttaatactttggattcttcccccttttttgagaaataaagttttttatgaaaagcct

SEQ ID NO: 6329 - DNA, 3403 bp, Homo sapiens
cccaggtttactcttacgccactgacgtaacgtcatcgtgcgggacgtggacggaagaaaaaagagagtgagcgagcgccggaatcagcccggcgtggagtgcggacccgcggtagtgccagggggcgaaggcggcggtggtgaggaagatactttggttagtgaccacatcgcagcatgttgagtcaagtttaccgctgtgggttccagcccttcaaccaacatcttctgccctgggtcaagtgtacaaccgtcttcagatctcattgtatccagccttcagtcatcagacatgttcgttcttggagcaacatcccgtttatcactgtacccctcagtcgtacacatggcaagtccttcgcccaccgcagtgagctgaagcatgccaagagaatcgtggtgaagctcggcagtgccgtggtgacccraggggatgaatgtggcctggccctggggcgcttggcatctattgttgagcaggtatcagtgctgcagaatcagggcagagagatgatgctggtgaccagtggagccgtagcctttggcaaacaacgcttgcgccatgagatccttctgtctcagagcgtgcggcaggccctccactcggggcagaaccagctgaaagaaatggcaattccagtcttagaggcacgagcctgtgcagctgccggacagagtgggctgatggccttgtatgaggctatgtttacccagtacagcatctgtgctgcccagattttggtgaccaatttggatttccatgatgagcagaagcgccggaacctcaatggaacacttcatgaactccttagaatgaacattgtccccattgtcaacacaaatgatgctgttgtccccccagctgagcccaacagtgacctgcagggggtaaatgttattagtgttaaagataatgatagcctggctgcccgactggctgtggaaatgaaaactgatctcttgattgttctttcagatgtagaaggcctttttgacagccccccaggttcagatgatgcaaagcttattgatatattttatcccggagatcagcagtctgtgacatttggamycaagtctagagtgggaatgggtggcatggaagccaaggtgaaagcagccctctgggctttgcaaggtggcacttctgttgttattgccaatggaacccacccaaaggtgtctgggcacgtcatcacagacattgtggaggggaagaaagttggtaccttcttttcagaagtaaagcctgcaggccctactgttgagcagcagggagaaatggcgcgatmtggaggaaggatgttggccaccttggaacctgagcagagagcagaaattatccatcatctggctgatctgttgacggaccagcgtgatgagatcctgttagccaacaaaaaagacttggaggaggcagaggggagacttgcagctcctctgctgaaacgtttaagcctctccacatccaaattgaacagcctggccatcggtctgcgacagatcgcagcctcctcccaggacagcgtgggacgtgttttgcgccgcacccgaatcgccaaaaacttggaactggaacaagtgactgtcccaattggagttctgctggtgatctttgaatctcgtcctgactgtctaccccaggtggcagctttggctatcgcaagtggcaatggcttgttactcaaaggagggaaggaggctgcacacagcaaccggattctccacctcctgacccaggaggctctctcaatccatggagtcaaggaggccgtgcaactggtgaataccagagaagaagttgaagatctttgccgcctagacaaaatgatagatctgatcattccacgtggctcttcccagctggtcagagacatccagaaagctgctaaggggattccagtgatggggcacagcgaagggatctgtcacatgtatgtggattccgaggccagtgttgataaggtcaccaggctagtcagagactctaaatgtgaatatccagctgcctgtaatgctttggagactttgttaatccaccgggatctgctcaggacaccattatttgaccagatcattgatatgctgagagtggaacaggtaaaaattcatgcaggccccaaatttgcctcctatctgaccttcagcccctcygaagtgaagtcactccgaactgagtatggggacctggaattatgcattgaagtagtggacaacgttcaggatgccattgaccacatccacaagtatggcagctcccacacggatgtcatcgtcacagaggacgaaaacacagcggagttcttcctgcagcacgtagacagtgcctgtgtgttctggaatgccagcactcgcttttctgatggttaccgctttggactgggagctgaagtgggaatcagtacatcgagaatccacgcccggggaccagtaggacttgagggactgcttactactaagtggctgctgcgagggaaggaccacgtggtctcagatttctcagagcatggaagtttaaaatatcttcatgagaacctccctattcctcagagaaacaccaactgaaaagagccaggaaaacccgggaattttccaaaaggtcttcacgttaaacttgtcttatctcaggagagagcccgctcttgtctcccagttcctggtagggtctgcctgttggaaagtgtacctggatgcttctgggctccgtttggcaatagcartcttggctgatgtgcacagtctggctcccagctcaccctttttttttaaagtaagaaaatagttgctaccgrtagggactttgccaagtccaattatcttctaggattgaaaggtgcattttccccataaaaaaggcgaggaaaacccatggctgctttgtgtcacctcagtgacttacagtcccccttggcatttagttggtactagagccagtcatccttaacaaatcttttcacattttatttctttcacatgyagtcatcttcaaaaaggaaagatttggaattttagaaaaggggcaactcttctttttagcattctcatcagaaagtcacaaaaatcgatggaatcatttccactgggaagattgaccttttgtatttatttgtggggtaaattaataagcattccagatgcttgcagcttcctgcatccaggagatgctgtgttccccgtgatgcagctggaacccaagctgcagcaggagatgcaagtttcaggatgttccccactgagctggaggaatatctacagcagtgatgyttgaaatttttgtatgaattattttgtcgtcctacccttttcctccaaaacaaaaattagaggattattttaatactttggattcttcccccttttttgagaaataaagttttttatgaaaagcctgtgcgtgattgaa

SEQ ID NO: 6330 - DNA, 4475 bp, Homo sapiens
gctgaggccccagcttgtggccaccacaacgtatcaagctatctccagggttgggctcaggactcagagctgacgcagctggggtgccccttggttctggaggatgaggctyctccgcagacgccacatgcccctgcgcctggccatggtgggctgcgcctttgtgctcttcctcttcctcctgcatagggatgtgarcagcagagaggaggccacagagaagccgtggctgaagtccctggtgagccggaaggatcacgtcctggacctcatgctggaggccatgaacaaccttagagattcaatgcccaagctccaaatcagggctccagaagcccagcagactctgttctccataaaccagtcctgcctccctgggttctataccccagctgaactgaagcccttctgggaacggccaccacaggaccccaatgcccctggggcagatggaaaagcatttcagaagagcaagtggacccccctggagacccaggaaaaggaagaaggctataagaagcactgtttcaatgcctttgccagcgaccggatctccctgcagaggtccctggggccagacacccgaccacctgagtgtgtggaccagaagttccggcgctgcccccmactggccaccaccagcgtgatcattgtgttccacaacgaagcctggtccacactgctgcgaacagtgtacagcgtcctrcacaccacccctgccatcttgctcaaggagatcatactggtggatgatgccagcacagaggagcacctaaaggagaagctggagcagtacgtgaagcagctgcaggtggtgagggtggtrcggcaggaggagcggaaggggctgatcaccgcccggctgctgggggccagcgtggcacaggcggaggtgctcacgttcctggatgcccactgtgagtgcttccacggctggctggagcccctcctggctcgaatcgctgaggacaagacagtggtggtgagcccagacatcgtcaccatcgaccttaatacttttgagttcgccaagcccgtccagaggggcagagtccatagccgaggcaactttgactggagcctgaccttcggctgggaaacacttcctccacatgagaagcagaggcgcaaggatgaaacctaccccatcaaatccccgacgtttgctggtggcctcttctccatctccaagtcctactttgagcacatcggtacctatgataatcagatggagatctggggaggggagaacgtggaaatgtccttccgggtgtggcagtgtgggggccagctggagatcatcccctgctctgtcgtaggccatgtgttccggaccaagagcccccacaccttccccaagggcactagtrtcattgctcgcaatcaagtgcgcctggcagaggtctggatggacagctacaagaagattttctataggagaaatctgcaggcagcaaagatggcccaagagaaatccttcggtgacatttcggaacgactgcagctgagggaacaactgcactgtcacaacttttcctggtacctgcacaatgtctacccagagatgtttgttcctgacctgacgcccaccttctatggtgccatcaagaacctcggcaccaaccaatgcctggatgtgggtgagaacaaccgcggggggaagcccctcatcatgtactcctgccacggccttggcggcaaccagtactttgagtacacaactcagagggaccttcgccacaacatcgcaaagcagctgtgtctacatgtcagcaagggtgctctgggccttgggagctgtcacttcactggcaagaatagccaggtccccaaggacgaggaatgggaattggcccaggatcagctcatcaggaactcaggatctggtacctgcctgacatcccaggacaaaaagccagccatggccccctgcaatcccagtgacccccatcagttgtggctctttgtctaggacccagatcatccccagagagagcccccacaagctcctcaggaaacaggattgctgatgtctgggaacctgatcaccagcttctctggaggccgtaaagatggatttctaaacccactgggtggcaaggcaggaccttcctaatccttgcaacaacattgggcccattttctttccttcacaccgatggaagagaccattaggacatatatttagcctagcgttttcctgttctagaaatagaggctyccaaagtagggaaggcagctgggggagggttcagggcagcaatgctgagttcaagaaaagtacttcaggctgggcacagtggctcatgcctgaaatcctagcactttgggaagacaatgtgggagaatggcttgagcccaggagttcaagaccggcctgagcaacatagtgaggatcccatctctacgcccaccctccccccggcaaaaaaaaaaagctgggtatggtggcttatgcctgtagtcgcagctactcagaaggctgaggtgggaggattgcttgttccccggaggttgaagctacagtgagccttgattgtgtcactgcactccagcctgggcaacaggtaagactctgtctcaaaaaaaaacaaaaaagaagaagaaaagtacttctacagccatgtcctattccttgatcatccaaagcacctgcagagtccagtgaaatgatatattctggctgggcacagtggctcacacctgtaatcctagcactttgggaggccaaggcaggtggatcacctgaggtcagaagtttgaaaccagcctggactacatggtgaaactccatctctactaaaagtacaaaaattagctgggcatgatggcacgcacctgcagtcccagctacttgggaggctgaggcaggagaatcactcgaacccaggaggcagaggttgcagtgagccaagacagcaccattgcaccccagcctgagcaacaagagcgaaactccatctcaggaaaaaaaaaaaaaaaaaaagtatattctaacagacagatcagaggtctaagagatcctcccttgctattattacctgaagtctgtagaactgtttacagatatctccttgacaggtgtcctttatcttactttatctgtacagtaatcctgtgagaaagacaggacagaaaccactgtgcctattttacagatacgaaaactgagacacaggtaaaggggcttgtctgtagtcccatagctagcagatggctggagccaagactgaggctcgttcttcaatgctgagccagggctccttccgctgcaccacaagaacgctagaccactcgccaccagccttctcattccctcttcctccattctaatcatttctagctggctggcctccacagagcataggaaaacagccagggccgggcacggtggctcatgcctgtaatctcaacactctgggaggccgagccgggtggataacctgaggtcaggaattcgagaccagcctggccaacatggtaaaaccccatctctactaaaaatataaaaattagccaggcatggtggcgcacacctgtaatcccagctactcaagaggctgaggcaggagaattgcttaaatctgggaggcggaagttgcagtgagccaagatcgcgccactgaactccagcctaggcaacaagagcaaaactccatctccaaaaaaaagaaaggaaaaacagggccaggtagccattgtggagagagcacacttaggaatcctgggatgttagtgttaaaagaaagctcctggagccagtgattctcaggtttgtcccagaacccttttttctaagccccatataaaaggtagattaaaaaaacaaagtagcatgagtgaaattgagagagggacaggtaatgccttycagcccctaacttctaacaatctggaagcacaacgtgaaaatcacgtagcccaaccctatcattttcatattatgaaactgagtccaggtaagtgaatctgtccaaggtcacccagcaaggtatcagtagccctgagggtaaggactctgataaggctcgggagggtcctggaaagcctgaggcggcaggaagagtgtgcagagttgagcgtgtctggaaggctgatccactgctgggcccacatcaaagcccccatggggagcagacccgactgcacatggctcttttgctggaagaagagcatggctgcgcagaggactaaaatttcatctgggaaggcttcttttgactgtcagtagcaggatgtcaccagatgagggtgctatgggaccacagctgtctttgttcccattgcaactcaaccctgcrggaggccgcctrcatccctgagagccttctggagcctamagaggagacattggccagccaaaaggaaaggagtggccagggtacgacctggagtagggaagggaaaaagttcccggaaagaagagaattggatgagaggtctcrgtggaaataaaggttttctggcattggtca

SEQ ID NO: 6331 - DNA, 4683 bp, Homo sapiens
ccctcctgccttcgctctctgctggtcgcggtggcctgtagctcctccctcggtaggacccccctccaccttggcgcttamgagatgaatgaggagcccagacctctggaacttggagggttgttcagattcccaggctgacaaaaaggagaaacagcttttacttgcatccagggccaatcatcgcagacccagacgtctgcagagggctgaggccccagcttgtggccaccacaacgtatcaagctatctccagggttgggctcaggactcagagctgacgcagctggggtgccccttggttctggaggatgaggctyctccgcagacgccacatgcccctgcgcctggccatggtgggctgcgcctttgtgctcttcctcttcctcctgcatagggatgtgarcagcagagaggaggccacagagaagccgtggctgaagtccctggtgagccggaaggatcacgtcctggacctcatgctggaggccatgaacaaccttagagattcaatgcccaagctccaaatcagggctccagaagcccagcagactctgttctccataaaccagtcctgcctccctgggttctataccccagctgaactgaagcccttctgggaacggccaccacaggaccccaatgcccctggggcagatggaaaagcatttcagaagagcaagtggacccccctggagacccaggaaaaggaagaaggctataagaagcactgtttcaatgcctttgccagcgaccggatctccctgcagaggtccctggggccagacacccgaccacctgagtgtgtggaccagaagttccggcgctgcccccmactggccaccaccagcgtgatcattgtgttccacaacgaagcctggtccacactgctgcgaacagtgtacagcgtcctrcacaccacccctgccatcttgctcaaggagatcatactggtggatgatgccagcacagaggagcacctaaaggagaagctggagcagtacgtgaagcagctgcaggtggtgagggtggtrcggcaggaggagcggaaggggctgatcaccgcccggctgctgggggccagcgtggcacaggcggaggtgctcacgttcctggatgcccactgtgagtgcttccacggctggctggagcccctcctggctcgaatcgctgaggacaagacagtggtggtgagcccagacatcgtcaccatcgaccttaatacttttgagttcgccaagcccgtccagaggggcagagtccatagccgaggcaactttgactggagcctgaccttcggctgggaaacacttcctccacatgagaagcagaggcgcaaggatgaaacctaccccatcaaatccccgacgtttgctggtggcctcttctccatctccaagtcctactttgagcacatcggtacctatgataatcagatggagatctggggaggggagaacgtggaaatgtccttccgggtgtggcagtgtgggggccagctggagatcatcccctgctctgtcgtaggccatgtgttccggaccaagagcccccacaccttccccaagggcactagtrtcattgctcgcaatcaagtgcgcctggcagaggtctggatggacagctacaagaagattttctataggagaaatctgcaggcagcaaagatggcccaagagaaatccttcggtgacatttcggaacgactgcagctgagggaacaactgcactgtcacaacttttcctggtacctgcacaatgtctacccagagatgtttgttcctgacctgacgcccaccttctatggtgccatcaagaacctcggcaccaaccaatgcctggatgtgggtgagaacaaccgcggggggaagcccctcatcatgtactcctgccacggccttggcggcaaccagtactttgagtacacaactcagagggaccttcgccacaacatcgcaaagcagctgtgtctacatgtcagcaagggtgctctgggccttgggagctgtcacttcactggcaagaatagccaggtccccaaggacgaggaatgggaattggcccaggatcagctcatcaggaactcaggatctggtacctgcctgacatcccaggacaaaaagccagccatggccccctgcaatcccagtgacccccatcagttgtggctctttgtctaggacccagatcatccccagagagagcccccacaagctcctcaggaaacaggattgctgatgtctgggaacctgatcaccagcttctctggaggccgtaaagatggatttctaaacccactgggtggcaaggcaggaccttcctaatccttgcaacaacattgggcccattttctttccttcacaccgatggaagagaccattaggacatatatttagcctagcgttttcctgttctagaaatagaggctyccaaagtagggaaggcagctgggggagggttcagggcagcaatgctgagttcaagaaaagtacttcaggctgggcacagtggctcatgcctgaaatcctagcactttgggaagacaatgtgggagaatggcttgagcccaggagttcaagaccggcctgagcaacatagtgaggatcccatctctacgcccaccctccccccggcaaaaaaaaaaagctgggtatggtggcttatgcctgtagtcgcagctactcagaaggctgaggtgggaggattgcttgttccccggaggttgaagctacagtgagccttgattgtgtcactgcactccagcctgggcaacaggtaagactctgtctcaaaaaaaaacaaaaaagaagaagaaaagtacttctacagccatgtcctattccttgatcatccaaagcacctgcagagtccagtgaaatgatatattctggctgggcacagtggctcacacctgtaatcctagcactttgggaggccaaggcaggtggatcacctgaggtcagaagtttgaaaccagcctggactacatggtgaaactccatctctactaaaagtacaaaaattagctgggcatgatggcacgcacctgcagtcccagctacttgggaggctgaggcaggagaatcactcgaacccaggaggcagaggttgcagtgagccaagacagcaccattgcaccccagcctgagcaacaagagcgaaactccatctcaggaaaaaaaaaaaaaaaaaaagtatattctaacagacagatcagaggtctaagagatcctcccttgctattattacctgaagtctgtagaactgtttacagatatctccttgacaggtgtcctttatcttactttatctgtacagtaatcctgtgagaaagacaggacagaaaccactgtgcctattttacagatacgaaaactgagacacaggtaaaggggcttgtctgtagtcccatagctagcagatggctggagccaagactgaggctcgttcttcaatgctgagccagggctccttccgctgcaccacaagaacgctagaccactcgccaccagccttctcattccctcttcctccattctaatcatttctagctggctggcctccacagagcataggaaaacagccagggccgggcacggtggctcatgcctgtaatctcaacactctgggaggccgagccgggtggataacctgaggtcaggaattcgagaccagcctggccaacatggtaaaaccccatctctactaaaaatataaaaattagccaggcatggtggcgcacacctgtaatcccagctactcaagaggctgaggcaggagaattgcttaaatctgggaggcggaagttgcagtgagccaagatcgcgccactgaactccagcctaggcaacaagagcaaaactccatctccaaaaaaaagaaaggaaaaacagggccaggtagccattgtggagagagcacacttaggaatcctgggatgttagtgttaaaagaaagctcctggagccagtgattctcaggtttgtcccagaacccttttttctaagccccatataaaaggtagattaaaaaaacaaagtagcatgagtgaaattgagagagggacaggtaatgccttycagcccctaacttctaacaatctggaagcacaacgtgaaaatcacgtagcccaaccctatcattttcatattatgaaactgagtccaggtaagtgaatctgtccaaggtcacccagcaaggtatcagtagccctgagggtaaggactctgataaggctcgggagggtcctggaaagcctgaggcggcaggaagagtgtgcagagttgagcgtgtctggaaggctgatccactgctgggcccacatcaaagcccccatggggagcagacccgactgcacatggctcttttgctggaagaagagcatggctgcgcagaggactaaaatttcatctgggaaggcttcttttgactgtcagtagcaggatgtcaccagatgagggtgctatgggaccacagctgtctttgttcccattgcaactcaaccctgcrggaggccgcctrcatccctgagagccttctggagcctamagaggagacattggccagccaaaaggaaaggagtggccagggtacgacctggagtagggaagggaaaaagttcccggaaagaagagaattggatgagaggtctcrgtggaaataaaggttttctggcattggtca

SEQ ID NO: 6332 - DNA, 2090 bp, Homo sapiens
agaccagcctggccaacatggtgataccctgtctctcctaaaaatacaaaaattagccgggtgtggtggtgyacgcctgtaaacccagctacttgggagactgaggcaggagaatcacttgaacccaggaggcggaagttgcagtgagccgagatcacatcactgcattccagcctgggtggcagagtgagactctgtctcaaaaaaacaaaaacaacaacaacaaacaaaaaaccagttaagtgaaatgaggaaatttctttggtgaaagagaaggctagataagrtgacagttgtctcaaagtcatcatacggaaaacagaatagaagcacagaacaaggactattgtatataagagaagcaggtgttaatgtaagttgctgtggaatgactgttttcaagaagagagaaggagccaatatatctactttcattaagaagctgaaattaaatttggatttccttctttccaaagctgagacacratggccaaaaagcgattgctgtgattggagctggaattagcggactgrgggccatcaagtgctgcctggatgaagatctggagcccacctgctttgaaagaaatgatgatattggacatctctggaaatttcraaaaaatacttmagagaaaatgcctagtatctacaaatctgtgaccatcaatacttccaaggagatgatgtgcttcagtgacttccctgtccctgatcattttcccaactacatgcacaactccaaactcatggactacttcgggatgtatgccacacactttggcctcctgaattacattcgttttaakactgaagtgcaaagtgtgaggaagcacccagatttttctatcaatggacaatgggaygttgttgtggagactgaagagaaacaagrgactttggtctttgatggggtcttagtttgcagtggacaccacacagatccctacttaccacttcagtccttcccaygcattgagaaatttgaaggctgttatttccatagtcgggaatacaaaagtcccgaggacttttcagggaaaagaatcatagtgatcggcattggaaattctggagtggatattgcggtggagctcagtcgtgtagcaaaacaggtttgttttactagacgtggatcatggattttacaccgtgtttgggataatgggtatcccatggatagttcatttttcactcggttcaatagttttctccagaaaatactaactacaccacaaataaataaccagctagagaaaataatgaactcaagatttaatcatgcgcactgtggcctgcagcctcagcacagatgggctttaagtcagcatccaactgtcagtgatgacctgccaaatcacataatttctggaaaagtccaagtaaagcccagcgtgaaggagttcacagaaacagatgccatttttgaagacagcactgtagaggagaatattgatgttgtcatckttgctacaggatacagtttttctttttctttccttgatggtctgatcaaggttactaacaatkaagtatctctgtataagcttatgttccctcctgacctggagaagccaaccttggctgtcatcggtcttatccaaccactgggcatcatcttacctattgcagagctccaatctcgttgggctacacgagtgttcaaagggctgatcaaattaccctcagcggagaacatgatggcagatattgcccagaggaaaagggctatggaaaaacggagatatgtaaagacacccygccacacaatccaagtgratcacattgagtacatggatgagattgccatgccagcaggggtgaaacccaacctgctcttcctctttctctcagatccaaagctggccatggaggttttctttggcccctgcaccccataccagtaccacctccatgggcccgagaaatgggatggggcccggagagctaacctgacccagagagagaggatcatcaagcccctgagsactcgcattactagtgaggacagccacccatcctmacagctctcttggataaagatggccccagtgagcctggcatttctggctgctggcttggcatacttt

SEQ ID NO: 6333 - DNA, 2676 bp, Homo sapiens
ggccgtgcaggggcgggctccgagcgtggggtgggcgcttgcgcactgccgctgcggctgttgctgcggagccaggaggggaagcgatggctgggcccgcgtggatctccaaggtctctcggctgctgggggcattccacaacccaaaacaggtgaccagaggttttactggtggtgttcagacagtaactttaattccaggagatggtattggcccagaaatttcagctgcagttatgaagatttttgatgctgccaaagcacctattcagtgggaggagcggaacgtcactgccattcaaggacctggaggaaagtggatgatcccttcagaggctaaagagtccatggataagaacaagatgggcttgaaaggccctttgaagaccccaatagcagccggtcacccatctatgaatttactgctgcgcaaaacatttgacctttacgcgaatgtccgaccatgtgtctctatcgaaggctataaaaccccttacaccgatgtaaatattgtgaccattcgagagaacacagaaggagaatacagtggaattgagcatgtgattgttgatggagtcgtgcagagtatcaagctcatcaccgagggggcgagcaagcgcattgctgagtttgcctttgagtatgcccggaacaaccaccggagcaacgtcacggcggtgcacaaagccaacatcatgcggatgtcagatgggctttttctacaaaaatgcagggaagttgcagaaagctgtaaagatattaaatttaatgagatgtaccttgatacagtatgtttgaatatggtacaagatccttcccaatttgatgttcttgttatgccaaatttgtatggagacatccttagtgacttgtgtgcaggattgatcggaggtctcggtgtgacaccaagtggcaacattggagccaatggggttgcaatttttgagtcggttcatgggacggctccagacattgcaggcaaggacatggcgaatcccacagccctcctgctcagtgccgtgatgatgctgcgccacatgggactttttgaccatgctgcaagaattgaggctgcgtgttttgctacaattaaggayggaaagagcttgacaaaagatttgggaggcaatgcaaaatgctcagacttcacagaggaaatctgtcgccgagtaaaagatttagattaacacttctacaactggcatttacatcagtcactctaaatggacaccacatgaacctctgtttagaatacctacgtatgtatgcattggtttgcttgtttcttgacagtacrtttttagatctggccttttcttaacaaaatctgtgcaaaagatgcaggtggatgtccctaggtctgttttcaaagaactttttccaagtgcttgttttatttattaagtgtctacctggtaaatgttttttttgtaaactctgagtggactgtatcatttgctattctaaaccattttacacttaagttaaaatagtttctcttcagctgtaaataacaggatacagaattaacaagagaaaatgtctaactttttaagaaaaaccttattttcttcggtttttgaaaaacataatggaaataaaacaggatattgacataatagcacaaaatgacactcttctaaaactaaatgggcacaagagaattttcctgggaaagttcacatcaaaaagagtgaatgtggtatatttctaaatgatatggaaaatagagacagatttgtcctttacagaaattactgagtgtgaataaaaacttcagatccaagaaatatataatgagagatataatttttgttaataagacaaaggtaatatattggatacaaagacacaaatgtattgtgtgttcaattattttgttgtcttgagatttaatattctttccaagagcttttaatgaagcagagagctagtacttcattttcactggatacattttcagcatcatgagttgtcacagcctctgagcccctgatctgaagccagaagggctgagtgtattgtaaacttattcttgcatgttgctgtctgggaatggaccacactacagcaggtagttctgggggcgatactgccgaaaggcccgattttgtatttcagcaactgccccttctcctatcccaaagcaccaattactgccctctgcctcagcagtaccagtataagatgacattccaaagactggaggcaactcagcctgagttaattcacaaaattatgccatgctggggcttgagcttgagcttgggcttaggcttgggctcagcttttgaccctcaggcatctcctttyccttcctgtcttcctctcccttctcctctgctgcagcatgattttcttaatcttcagacactcactattttcatgaacagttaccctctgtccccacaaccaaagacaactcatggcctcctttggcccttgtgtaacattgcaaacctgtggctttgcaaaatgtacccaggtcacaaggggatttttttttttttagcaatgatatccctgtctgggtcactttttaagcttgtaaccgcccccccagacttataatcttaaatgtattttcctttgtttaagctgctgcttcctctgtttcattggattgtgccagttatcagtggctcttgggttcaaagtaataaagaattccaaaac

SEQ ID NO: 6334 - DNA, 3090 bp, Homo sapiens
ggccgtgcaggggcgggctccgagcgtggggtgggcgcttgcgcactgccgctgcggctgttgctgcggagccaggaggggaagcgatggctgggcccgcgtggatctccaaggtctctcggctgctgggggcattccacaacccaaaacaggtgaccagaggttttactggtggtgttcagacagtaactttaattccaggagatggtattggcccagaaatttcagctgcagttatgaagatttttgatgctgccaaagcacctattcagtgggaggagcggaacgtcactgccattcaaggacctggaggaaagtggatgatcccttcagaggctaaagagtccatggataagaacaagatgggcttgaaaggccctttgaagaccccaatagcagccggtcacccatctatgaatttactgctgcgcaaaacatttgacctttacgcgaatgtccgaccatgtgtctctatcgaaggctataaaaccccttacaccgatgtaaatattgtgaccattcgagagaacacagaaggagaatacagtggaattgagcatgtgattgttgatggagtcgtgcagagtatcaagctcatcaccgagggggcgagcaagcgcattgctgagtttgcctttgagtatgcccggaacaaccaccggagcaacgtcacggcggtgcacaaagccaacatcatgcggatgtcagatgggctttttctacaaaaatgcagggaagttgcagaaagctgtaaagatattaaatttaatgagatgtaccttgatacagtatgtttgaatatggtacaagatccttcccaatttgatgttcttgttatgccaaatttgtatggagacatccttagtgacttgtgtgcaggattgatcggaggtctcggtgtgacaccaagtggcaacattggagccaatggggttgcaatttttgagtcggttcatgggacggctccagacattgcaggcaaggacatggcgaatcccacagccctcctgctcagtgccgtgatgatgctgcgccacatgggactttttgaccatgctgcaagaattgaggctgcgtgttttgctacaattaaggayggaaagagcttgacaaaagatttgggaggcaatgcaaaatgctcagacttcacagaggaaatctgtcgccgagtaaaagatttagattaacacttctacaactggcatttacatcagtcactctaaatggacaccacatgaacctctgtttagaatacctacgtatgtatgcattggtttgcttgtttcttgacagtacrtttttagatctggccttttcttaacaaaatctgtgcaaaagatgcaggtggatgtccctaggtctgttttcaaagaactttttccaagtgcttgttttatttattaagtgtctacctggtaaatgttttttttgtaaactctgagtggactgtatcatttgctattctaaaccattttacacttaagttaaaatagtttctcttcagctgtaaataacaggatacagaattaacaagagaaaatgtctaactttttaagaaaaaccttattttcttcggtttttgaaaaacataatggaaataaaacaggatattgacataatagcacaaaatgacactcttctaaaactaaatgggcacaagagaattttcctgggaaagttcacatcaaaaagagtgaatgtggtatatttctaaatgatatggaaaatagagacagatttgtcctttacagaaattactgagtgtgaataaaaacttcagatccaagaaatatataatgagagatataatttttgttaataagacaaaggtaatatattggatacaaagacacaaatgtattgtgtgttcaattattttgttgtcttgagatttaatattctttccaagagcttttaatgaagcagagagctagtacttcattttcactggatacattttcagcatcatgagttgtcacagcctctgagcccctgatctgaagccagaagggctgagtgtattgtaaacttattcttgcatgttgctgtctgggaatggaccacactacagcaggtagttctgggggcgatactgccgaaaggcccgaacacatgtattttggctgcaattgaggaacttgggatgctattaattttgtatttcagcaactgccccttctcctatcccaaagcaccaattactgccctctgcctcagcagtaccagtataagatgacattccaaagactggaggcaactcagcctgagttaattcacaaaattatgccatgctggggcttgagcttgagcttgggcttaggcttgggctcagcttttgaccctcaggcatctcctttyccttcctgtcttcctctcccttctcctctgctgcagcatgattttcttaatcttcagacactcactattttcatgaacagttaccctctgtccccacaaccaaagacaactcatggcctcctttggcccttgtgtaacattgcaaacctgtggctttgcaaaatgtacccaggtcacaaggggatttttttttttttagcaatgatatccctgtctgggtcactttttaagcttgtaaccgcccccccagacttataatcttaaatgtattttcctttgtttaagctgctgcttcctctgtttcattggattgtgccagttatcagtggctcttgggttcaaagtaataaagaattccaaaactgagatgtttgctttctctacctgtttcctgttcagatgccttcggtcattttggctcagcttgctactgagaatggctgcttcccgtattcagaatggaagtggggtggtctggtggcgacaggctaacgtagagctggctgcttttatgagaatgcgccacttgaccccatcctgcacctttgtttattccagggcactaatggtcactcgcatgcccgctgtgcacagtcctgtgagttaaatgcccactactctctgcactggtcccacctgctcaattgacaaaaaaaatcaggtccttgttgacagttctgttaaaaggtttaatattcaaattatacattaaatagaatcaaacaggcagca

SEQ ID NO: 6335 - DNA, 2727 bp, Homo sapiens
aaaccctcaaggggttgcaggttcagctttcacttagagacagcaactccaaattcagggtcgctggggaaactaaggcaggactggggactctgagtgagaggtcagacgctggtcgcggactctttctcccgagaactggggatagctcttccgatagcccaaagcgattcatgcggatcctagaagaaagcgccgagaggaggtggcggtggtggccctcgcctgtggcccccgtgctgcttgcactcgaactcgtcgccatggaggagctccaggagcctctgagaggasagctccggctctgcttcacgcaagctgcccggactagcctcttactgctcaggctcaacgacgctgccctgcgggcgctgcaagagtgtcagcggcaacaggtacggccggtgattgctttccaaggccaccgagggtatctgagactcccaggccctggttggtcctgcctcttctccttcatagtgtcccagtgttgtcaggagggcgctggtggtagcttggaccttgtgtgccaacgcttcctcaggtctgggcctaacagcctccactgcctgggctcactcagggagcgcctcattatttgggcagccatggattctatcccagccccatcatcagttcagggacacaacctgactgaagatgccagacatcctgagagtyggcagaacacaggaggctattctgaaggagatgcagtatcacagccacagatggcactagaggaggtgtcagtgtcagatccactggcaagcaaccaaggacagtcactcccaggatcctcaagggagcacatggcacagtgggaagtgagaagccagacccatgttccaaacagagaacctgttcaggcactgccttcctctgccagccggaaacgtctggacaagaaacgttcagtgcctgtagccactgtagaactggaagaaaagaggttcagaactctgcctttagtgcyaagccccctacaaggcctgaccaatcaggatttacaagagggagaagattgggagcaagaagatgaggacatggaccccagattagaacacagttcctcagttcaagaagattctgaatccccaagtcctgaagatataccagactacctcctgcaatacagggccatccacagtgcagaacagcaacatgcctatgagcaggactttgagacagattatgctgaataccgcatcctgcatgcccgtgttgggactgcaagccaaaggttcatagagctgggagcagagattaaaagagttcggcgaggaactccagaatacaaggtcctggaagacaagataatccaggaatataaaaagttcaggaagcagtacccaagttacagagaagaaaagcgtcgctgtgagtaccttcaccagaaattgtcccacattaaaggtctcatcctggagtttgaggaaaagaacaggggcagctgaagttatcaagggaatttttgagcctctgcttagtgaaacacaaaggaacaaagcagctataaactaaatagaatgcaactatctgcttttcttatgctgaccactggagtccatggtggcaagtagagagctgctctaggttcttgaggtttggttttcattattaatttttagggtatgggcactgtgcaaagactccatagctgtgcctaggagtctaggaaaagtgacagaggcttggcttttttacctttagttcagccaagtcattttcaagtcctgagaaatgacatcatcttcaggataaaataatgaggacattagacaaaccaaactaagtgaattttagcctggtagcctctctaaggaaacagtaataataacttctgataagagttaaaagaacttgtagcatacctggatataaygggaaagggcctgggtgttacccatgtactgaaaatgaacttttaccaacatggctaaaaaattaaaactgactgcttckgtgtcctttgtacaagtttatatgtttcccttaaatcttccaaggcagatggttcttaaccctggctttacatctgagccacttttggggctctctaaacaattagatccccgggccccagcccagatgttatgagttacaagattatggtttagacatcttttactttttccaagctttgtgtgtgaccaagatacatactttactataaggctctaccaaattcatcttaaaattgacagctaaatactgtaattatatagtaggaagaaaattcttttctgaacataggagttcctaggatcacctaaagtagggctcctacctggaattctccagtgactgaaaactataactgggcaggatttgaatttacctacaaaaggagataaatggtttagttggacaaaagatcactcttcagtcttatcctttctgttcctcattgttacaaaagaaagtggatgcttcactcataactaggaatggtactgcctttcccagttctactgaaggggaagttaaagggccacaccctaggctttaggggatagaactgcacccagcagtgtcagcaattcctgaaacaacttggatgaaactgcgtgatgccacacccttgacagggcatttctgagcagagaacagtccttgggagatataaacatgcagtaagctcagctgcgtggcaaggataaacaggaacccatccttagggcatggacagcctaacaagaaaggcccttcagctgttctaatcac

SEQ ID NO: 6336 - DNA, 2641 bp, Homo sapiens
acgcggctgggaaagcttggggtggcgctggcgggaggtggggccgggggcgggttcctggcggagggtggggcagacgtgggttaccgggtgtgccaaccaaaccctgaacagaggaggtggcggtggtggccctcgcctgtggcccccgtgctgcttgcactcgaactcgtcgccatggaggagctccaggagcctctgagaggasagctccggctctgcttcacgcaagctgcccggactagcctcttactgctcaggctcaacgacgctgccctgcgggcgctgcaagagtgtcagcggcaacaggtacggccggtgattgctttccaaggccaccgagggtatctgagactcccaggccctggttggtcctgcctcttctccttcatagtgtcccagtgttgtcaggagggcgctggtggtagcttggaccttgtgtgccaacgcttcctcaggtctgggcctaacagcctccactgcctgggctcactcagggagcgcctcattatttgggcagccatggattctatcccagccccatcatcagttcagggacacaacctgactgaagatgccagacatcctgagagtyggcagaacacaggaggctattctgaaggagatgcagtatcacagccacagatggcactagaggaggtgtcagtgtcagatccactggcaagcaaccaaggacagtcactcccaggatcctcaagggagcacatggcacagtgggaagtgagaagccagacccatgttccaaacagagaacctgttcaggcactgccttcctctgccagccggaaacgtctggacaagaaacgttcagtgcctgtagccactgtagaactggaagaaaagaggttcagaactctgcctttagtgcyaagccccctacaaggcctgaccaatcaggatttacaagagggagaagattgggagcaagaagatgaggacatggaccccagattagaacacagttcctcagttcaagaagattctgaatccccaagtcctgaagatataccagactacctcctgcaatacagggccatccacagtgcagaacagcaacatgcctatgagcaggactttgagacagattatgctgaataccgcatcctgcatgcccgtgttgggactgcaagccaaaggttcatagagctgggagcagagattaaaagagttcggcgaggaactccagaatacaaggtcctggaagacaagataatccaggaatataaaaagttcaggaagcagtacccaagttacagagaagaaaagcgtcgctgtgagtaccttcaccagaaattgtcccacattaaaggtctcatcctggagtttgaggaaaagaacaggggcagctgaagttatcaagggaatttttgagcctctgcttagtgaaacacaaaggaacaaagcagctataaactaaatagaatgcaactatctgcttttcttatgctgaccactggagtccatggtggcaagtagagagctgctctaggttcttgaggtttggttttcattattaatttttagggtatgggcactgtgcaaagactccatagctgtgcctaggagtctaggaaaagtgacagaggcttggcttttttacctttagttcagccaagtcattttcaagtcctgagaaatgacatcatcttcaggataaaataatgaggacattagacaaaccaaactaagtgaattttagcctggtagcctctctaaggaaacagtaataataacttctgataagagttaaaagaacttgtagcatacctggatataaygggaaagggcctgggtgttacccatgtactgaaaatgaacttttaccaacatggctaaaaaattaaaactgactgcttckgtgtcctttgtacaagtttatatgtttcccttaaatcttccaaggcagatggttcttaaccctggctttacatctgagccacttttggggctctctaaacaattagatccccgggccccagcccagatgttatgagttacaagattatggtttagacatcttttactttttccaagctttgtgtgtgaccaagatacatactttactataaggctctaccaaattcatcttaaaattgacagctaaatactgtaattatatagtaggaagaaaattcttttctgaacataggagttcctaggatcacctaaagtagggctcctacctggaattctccagtgactgaaaactataactgggcaggatttgaatttacctacaaaaggagataaatggtttagttggacaaaagatcactcttcagtcttatcctttctgttcctcattgttacaaaagaaagtggatgcttcactcataactaggaatggtactgcctttcccagttctactgaaggggaagttaaagggccacaccctaggctttaggggatagaactgcacccagcagtgtcagcaattcctgaaacaacttggatgaaactgcgtgatgccacacccttgacagggcatttctgagcagagaacagtccttgggagatataaacatgcagtaagctcagctgcgtggcaaggataaacaggaacccatccttagggcatggacagcctaacaagaaaggcccttcagctgttctaatcac

SEQ ID NO: 6337 - DNA, 3070 bp, Homo sapiens
ccgggtttgggggttgggacctccggctgcaggtccgcctgggccagacgcgcgagcgcaagcagcsggttwgtggtcgcgcgcccgacctccgcagtcccagccgagccgcgacccttccggccgtccccaccccacctcgccgccatgcgcctccgccgcctagcgctgttcccgggtgtggcgctgcttcttgccgcggcccgcctcgccgctgcctccgacgtgctagaactcacggacgacaacttcgagagtckcatctcckacacgggctctgcgggcctcatgctcgtcgagttyttcgcyccctggtgtggacactgcaagagacttgcacctgagtatgaagctgcagctaccagattaaaaggaatagtcccattagcaaaggttgattgcactgccaacactaacacctgtaataaatatggagtcagtggatatccaaccctgaagatatttagagatggtgaagaagcaggtgcttatgatggacctaggactgctgatggaattgtcagccacttgaagaagcaggcaggaccagcttcagtgcctctcaggactgaggaagaatttaagaaattcattagtgataaagatgcctctatagtaggttttttcgatgattcattcagtgaggctcactccgagttcctaaaagcagccagcaacttgagggataactaccgatttgcacatacgaatgttgagtctctggtgaacgagtatgatgataatggagagggtatcatcttatttcgtccttcacatctcactaacaagtttgaggacaagactgtggcatatacagagcaaaaaatgaccagtggcaaaattaaaaagtttatccaggaaaacatttttggtatctgccctcacatgacagaagacaataaagatttgatacagggcaaggacttacttattgcttactatgatgtggactatgaaaagaacgctaaaggttccaactactggagaaacagggtaatgatggtggcaaagaaattcctggatgctgggcacaaactcaactttgctgtagctagccgcaaaacctttagccatgaactttctgattttggcttggagagcactgctggagagattcctgttgttgctatcagaactgctaaaggagagaagtttgtcatgcaggaggagttctcgcgtgatgggaaggctctggagaggttcctgcaggattactttgatggcaatctgaagagatacctgaagtctgaacctatcccagagagcaatgatgggcctgtgaaggtagtggtagcagagaattttgatgaaatagtgaataatgaaaataaagatgtgctgattgaattttatgccccttggtgtggtcaytgtaagaacctggagcccaagtataaagaacttggcgagaagctcagcaaagacccaaatatcgtcatagccaagatggatgccacagccaatgatgtgccttctccatatgaagtcagaggttttcctaccakatacttctctccagccaacaagaagctaaatccaaagaaatatgaaggtggccgtgaattaagtgattttattagctatctacaaagagaagctacaaayccccctgtaattcaagaagaaaaacccaagaagaagaagaaggcacaggaggatctctaaagcagtagccaaacaccactttgtaaaaggactcttccatcagagatgggaaaaccattggggaggactaggacccatatgggaattattacctctcagggccgagaggacagaatggatataatytgaatcctgttaaattttctctaaactgtttyttagctgcmctgtttatggaaataccaggaccagtttatgtttgtggttttgggaaaaattatttgtgttgggggaaatgttgtgggggtggggttgagttgggggtattttytaattttttttgtacatttggaacagtgacaataaatgagacccctttaaactgtcttattttccaccagattgagaaccagatgttctctacacactatcactgttcaatagagctttcttcagtgatggaaatgctctgtaatctacactgttcagtacaggtagctacrgagcatctgaaatatggctagaaactacatttttgttttgattaatttaaatagccatacagttgctaccatactggtcacggcagctgtagactgactgggtccatagttcatcacctcaaaattctttcaaaatttattatctctttctctccttacatgtttatttcccaggcctaccctggtgattagaacagctgaagggcctttcttgttaggctgtccatgccctaaggatgggttcctgtttatccttgccacgcagctgagcttactgcatgtttatatctcccaaggactgttctctgctcagaaatgccctgtcaagggtgtggcatcacgcagtttcatccaagttgtttcaggaattgctgacactgctgggtgcagttctatcccctaaagcctagggtgtggccctttaacttccccttcagtagaactgggaaaggcagtaccattcctagttatgagtgaagcatccactttcttttgtaacaatgaggaacagaaaggataagactgaagagtgatcttttgtccaactaaaccatttatctccttttgtaggtaaattcaaatcctgcccagttatagttttcagtcactggagaattccaggtaggagccctactttaggtgatcctaggaactcctatgttcagaaaagaattttcttcctactatataattacagtatttagctgtcaattttaagatgaatttggtagagccttatagtaaagtatgtatcttggtcacacacaaagcttggaaaaagtaaaagatgtctaaaccataatcttgtaactcataacatctgggctggggcccggggatctaattgtttagagagccccaaaagtggctcagatgtaaagccagggttaagaaccatctgccttggaagatttaagggaaacatataaacttgtacaaaggacacmgaagcagtcagtttt

SEQ ID NO: 6338 - DNA, 1117 bp, Homo sapiens
agctcgtgcgcctccccgtgggtttgcgacgtttagcgactattgcgcctgcgccagcgccggctgcgagactggggccgtggctgctggtcccgggtgatgctaggcggctccctgggctccaggctgttgcggggtgtaggtgggagtcacggacggttcggggcccgaggtgtccgcgaaggtggcgcagccatggcggcaggggagagcatggctcagcggatggtctgggtggacctggagatgacaggattggacattgagaaggaccagattattgagatggcctgtctgataactgactctgatctcaacattttggctgaaggtcctaacctgattataaaacaaccagatgagttgctggacagcatgtcagattggtgtaaggagcatcacgggaagtctggccttaccaaggcagtgaaggagagtacaattacattgcagcaggcagagtatgaatttctgtcctttgtacgacagcagactcctccagggctctgtccacttgcaggaaattcagttcatgaagataagaagtttcttgacaaatacatgccccagttcatgaaacatcttcattatagaataattgatgtgagcactgttaaagaactgtgcagacgctggtatccagaagaatatgaatttgcaccaaagaaggctgcttctcatagggcacttgatgacattagtgaaagcatcaaagagcttcagttttaccgaaataacatcttcaagaaaaaaatagatgaaaagaagaggaaaattatagaaaatggggaaaatgagaagaccgtgagttgatgccagttatcatgctgccactacatcgttatctggaggcaacttctggtggtttttttttctcacgctgatggcttggcagagcaccttcggttaacttgcatctccagattgattactcaagcagacagcacacgaaatactatttttctcctaatatgctgtttccattatgacacagcagctcctttgtaagtaccaggtcatgtccatcccttggtacatrtatgcatttgcttttaaaccatttyttttgtttaaataaataaataagtaaataaagctagttctattgaaatgcaaa

SEQ ID NO: 6339 - DNA, 1137 bp, Homo sapiens
agctcgtgcgcctccccgtgggtttgcgacgtttagcgactattgcgcctgcgccagcgccggctgcgagactggggccgtggctgctggtcccgggtgatgctaggcggctccctgggctccaggctgttgcggggtgtaggtgggagtcacggacggttcggggcccgaggtgtccgcgaaggtggcgcagccatggcggcaggggagagcatggctcagcggatggtctgggtggacctggagatgacaggattggacattgagaaggaccagattattgagatggcctgtctgataactgactctgatctcaacattttggctgaaggtcctaacctgattataaaacaaccagatgagttgctggacagcatgtcagattggtgtaaggagcatcacgggaagtctggccttaccaaggcagtgaaggagagtacaattacattgcagcaggcagagtatgaatttctgtcctttgtacgacagcagactcctccagggctctgtccacttgcaggaaattcagttcatgaagataagaagtttcttgacaaatacatgccccagttcatgaaacatcttcattatagaataattgatgtgagcactgttaaagaactgtgcagcttcctttgagagttccatttctgctgtgtatagacgctggtatccagaagaatatgaatttgcaccaaagaaggctgcttctcatagggcacttgatgacattagtgaaagcatcaaagagcttcagttttaccgaaataacatcttcaagaaaaaaatagatgaaaagaagaggaaaattatagaaaatggggaaaatgagaagaccgtgagttgatgccagttatcatgctgccactacatcgttatctggaggcaacttctggtggtttttttttctcacgctgatggcttggcagagcaccttcggttaacttgcatctccagattgattactcaagcagacagcacacgaaatactatttttctcctaatatgctgtttccattatgacacagcagctcctttgtaagtaccaggtcatgtccatcccttggtacatrtatgcatttgcttttaaaccatttyttttgtttaaataaataaataagtaaataaagctagttc

SEQ ID NO: 6340 - DNA, 1426 bp, Homo sapiens
aaaaaaaaaaaagaaaaaagaaaaagagaaacgagggtcttgcyctattgccsaggttggactcctgggctgaagtgatccctctccttctcaatagctggggctacaggagtgcgtcaccacgcccgcctggctcaattcctgctccttttggtctataaagcggactgtggccctggggttcatccgattgagtcaccagtcactggagctttacaggagagagtgggagaggaggctcagagaggtcactcaggacccaaagtgtgcccagacgggccctaactacgtggcgtgacctcaggcggggcaaacagatcaaggacacagggtccccacccaccctgaccactccagggtatgcttaggtatcccaaatcttgctctccgaagagattcagatagcgagagacacccttaactgtctcccgaggccgggattggccagagcggaagcggagacgcacttcctaggggcgcgtctggcacgcactgcgcagccgcggtgggaggaggcaccggccgcgcggcgggaggaggtgccggccgagcaccgcagacagcgccgggaagatgagcacggaaggtggtggccgtcgctgccaggcacaagtgtcccgccgcatctccttcagcgcgagccacsrattktacagtaaatttctaagtgatgaagraaacttgaaactgtttgggaaatgcaacaatccaaatggccatgggcacaattataaagttrtggtgacagtacatggagagattgaccctgctacgggaatggttatgaatctggctgatctcaaaaaatatatggaggaggcgattatgcagyyccttgatcataagaatctggatatggatgtgccatrckttgcagatgtggtgagcaygactgaaaatgtagctgtttatatctgggacaacctccagaaagttcttcctktaggagttctttatraagtaaaagtatacgaaacygdcaataatattgtggtttataaasgagaatagctattggggttagcattgcacaaagcccagtttctttctgtgtttgaaaaagattttgatccccttggaatattaagaggtcaacacgtgattgttgtacgtacacattgtgctctggagtgcctatttattgaaatcattgtaagacctgttataaatttaagtctatttaaaactaaacttgtaatatacatcctgaaaatcatttagagagtcttttatttataaattaaaaatcacttcattttcamaaaatgttttggtgtgggattatttgaaagcaaaagaaatctaattttgttttctccattacctcattttagtattaatttttacttggtataatatacatggttaaaatgcttatgtgacttcgagtaggtgaatcttaaagaaataaaattcaagtgaccac

SEQ ID NO: 6341 - DNA, 2934 bp, Homo sapiens
ctctggatgtgtctgctgccgccattgtgcggcgctggtcccctcagagggttcctgctgctgccggtgccttggaccctccccctcgcttctcgttctactgccccaggagcccggcgggtccgggactcccgtccgtgccggtgcgggcgccggcatgtggctgtgggaggaccagggcggcctcctgggccctttctccttcctgctgctagtgctgctgctggtgacgcggagcccggtcaatgcstgcctcctcaccggcagcctcttcgttctactgcgcgtcttcagctttgagccggtgccctcttgcagggccctgcaggtgctcaagccccgggaccgcatttctgccatcgcccaccgtggcggcagccacgacgcgcccgagaacacgctggcggccattcggcaggcagctaagaatggagcaacaggcgtggagttggacattgagtttacttctgacgggattcctgtcttaatgcacgataacacagtagataggacgactgatgggactgggcgattgtgtgatttgacatttgaacaaattaggaagctgaatcctgcagcaaaccacagactcaggaatgatttccctgatgaaaagatccctaccctaagggaagctgttgcagagtgcctaaaccataacctcacaatcttctttgatgtcaaaggccatgcacacaaggctactgaggctctaaagaaaatgtatatggaatttcctcaactgtataataatagtgtggtctgttctttcttgccagaagttatctacaagatgagacaaacagatcrggatgtaataacagcattaactcacagaccttggagcctaagccatacaggagatgggaaaccacgctatgatactttctggaaacattttatatttgttatgatggacattttgctcgattggagcatgcataatatcttgtggtacctgtgtggaatttcagctttcctcatgcaaaaggattttgtatccccggcctacttgaagaagtggtcagctaaaggaatccaggttgttggttggactgttaatacctttgatgaaaagagttactacgaatcccatcttggttccagctatatcactgacagcatggtagaagactgcraacctcacttctagactttcacggtgggacgaaacgggttcagaaactgccaggggcctcatacagggatatcaaaataccctttgtgctagcccaggccctggggaatcaggtgactcacacaaatgcaatagttggtcactgcatttttacctgaaccaaagctaaacccggtgttgccaccatgcaccatggcatgccagagttcaacactgttgctcttgaaaatctgggtctgaaaaaacgcacaagagcccctgccctgccctagctgaggcacacagggagacccagtgaggataagcacagattgaattgtacartttgcagatgcagatgtaaatgcatgggacatgcatgataactcagagttgacattttaaaacttgccacacttatttcaaatatttgtactcagctatgttaacatgtactgtagacatcaaacttgtggccatactaataaaattattaaaaggagcactaaaggaaaactgtgtgccaagcatcatatcctaaggcatacggaatttggggaagccaccatgcaatccagtgaggcttcagtgtacagcaaccaaaatggtagggaggtcttgaagccaatgagggatttatagcatcttgaatagagagctgcaaaccaccagggggcagagttgcayttttccaggctttttaggaagctctgcaacagatgtgatctgatcataggcaattagaactggaagaaacttccaaaaatatctaggtttgtcctcattttacaaatgaggaaactaaactctgtggaagggaaggggttgcctcaaaagtcacagcttagctgggcacagtggctcatgccgataatcccagcaattcagaaagctgaggcaggaggattacttgaggccagactgggcaatatrgcaagaccccatctctaaaaaattaggcatggtggtgcatgcctgtattcccagctrctcrggaggttgaggtgggaggatcacttgagcccagaagttcaaggctgcaatgagccatgattacaccacggcactacaaccttggtggcacagtgagaacctgactcttaaaaaaaaaaaaaaaaaaaaaaaaaaaaagataactagaacttctagaacatcttgtttacagttagccagaaactatacaagtggtttaacatgcattatcttactcaatccatacaaaagtcttatggaggtgttagcactctttctactgatgaagaactgaggtacttcataaaaccacttacccaaggtgtcttgagtctggtacaactggcattcaaatctaggtcagtctgcccccagagccactacccttacccctcactgaatctgcctttatattgttgagcccatgaccccaaactgctctttccaatttgaacttccagggattttattgtgaacttacatagcaacattaaaatgaagttgaattgtttttaatggcaaygccgtctgtctcctctagcttaccgcttctcacctttcaaccccatctgtggcctttgtccaggcccacagcttagccatggcttccctcctgcatccctgcygtgggttgctggcctcacacttgcagcagctggacagtgattttagaaggccaccagtccccrtagctatgtgacaatgagaagcaaacttttttgtgacagattgtattggcataggcatgatagatggggattggtacgttttgaatcagcatttgcaaaaaaattgtcttgaattttaaaataaacaacaaagatttgttcattgagtgcaacaaa

SEQ ID NO: 6342 - DNA, 2880 bp, Homo sapiens
acaaggcacactcccggcccttgatcgctcccagtgtctagggatctccggacttgaggttttatatttacagaagacagcagatatgtatatagtttctgtgcgcctgacgctaaggttacatacagccaggaacaaggtcaaaagtgtccctggtttacagagtrtacatcggaatgggggaggcaagccttaaacaagtaaacacataaatgagataactttaagagagtgaaaggtgcaatgaagaaatcgggggaactcgaaggaaagagktacgctattttatttagatggaatagtcaagagaaatcgtctccgaagaagcracatttgaacagaaaccggaattataaggagccaggcagctaagaatggagcaacaggcgtggagttggacattgagtttacttctgacgggattcctgtcttaatgcacgataacacagtagataggacgactgatgggactgggcgattgtgtgatttgacatttgaacaaattaggaagctgaatcctgcagcaaaccacagactcaggaatgatttccctgatgaaaagatccctaccctaagggaagctgttgcagagtgcctaaaccataacctcacaatcttctttgatgtcaaaggccatgcacacaaggctactgaggctctaaagaaaatgtatatggaatttcctcaactgtataataatagtgtggtctgttctttcttgccagaagttatctacaagatgagacaaacagatcrggatgtaataacagcattaactcacagaccttggagcctaagccatacaggagatgggaaaccacgctatgatactttctggaaacattttatatttgttatgatggacattttgctcgattggagcatgcataatatcttgtggtacctgtgtggaatttcagctttcctcatgcaaaaggattttgtatccccggcctacttgaagaagtggtcagctaaaggaatccaggttgttggttggactgttaatacctttgatgaaaagagttactacgaatcccatcttggttccagctatatcactgacagcatggtagaagactgcraacctcacttctagactttcacggtgggacgaaacgggttcagaaactgccaggggcctcatacagggatatcaaaataccctttgtgctagcccaggccctggggaatcaggtgactcacacaaatgcaatagttggtcactgcatttttacctgaaccaaagctaaacccggtgttgccaccatgcaccatggcatgccagagttcaacactgttgctcttgaaaatctgggtctgaaaaaacgcacaagagcccctgccctgccctagctgaggcacacagggagacccagtgaggataagcacagattgaattgtacartttgcagatgcagatgtaaatgcatgggacatgcatgataactcagagttgacattttaaaacttgccacacttatttcaaatatttgtactcagctatgttaacatgtactgtagacatcaaacttgtggccatactaataaaattattaaaaggagcactaaaggaaaactgtgtgccaagcatcatatcctaaggcatacggaatttggggaagccaccatgcaatccagtgaggcttcagtgtacagcaaccaaaatggtagggaggtcttgaagccaatgagggatttatagcatcttgaatagagagctgcaaaccaccagggggcagagttgcayttttccaggctttttaggaagctctgcaacagatgtgatctgatcataggcaattagaactggaagaaacttccaaaaatatctaggtttgtcctcattttacaaatgaggaaactaaactctgtggaagggaaggggttgcctcaaaagtcacagcttagctgggcacagtggctcatgccgataatcccagcaattcagaaagctgaggcaggaggattacttgaggccagactgggcaatatrgcaagaccccatctctaaaaaattaggcatggtggtgcatgcctgtattcccagctrctcrggaggttgaggtgggaggatcacttgagcccagaagttcaaggctgcaatgagccatgattacaccacggcactacaaccttggtggcacagtgagaacctgactcttaaaaaaaaaaaaaaaaaaaaaaaaaaaaagataactagaacttctagaacatcttgtttacagttagccagaaactatacaagtggtttaacatgcattatcttactcaatccatacaaaagtcttatggaggtgttagcactctttctactgatgaagaactgaggtacttcataaaaccacttacccaaggtgtcttgagtctggtacaactggcattcaaatctaggtcagtctgcccccagagccactacccttacccctcactgaatctgcctttatattgttgagcccatgaccccaaactgctctttccaatttgaacttccagggattttattgtgaacttacatagcaacattaaaatgaagttgaattgtttttaatggcaaygccgtctgtctcctctagcttaccgcttctcacctttcaaccccatctgtggcctttgtccaggcccacagcttagccatggcttccctcctgcatccctgcygtgggttgctggcctcacacttgcagcagctggacagtgattttagaaggccaccagtccccrtagctatgtgacaatgagaagcaaacttttttgtgacagattgtattggcataggcatgatagatggggattggtacgttttgaatcagcatttgcaaaaaaattgtcttgaattttaaaataaacaacaaagatttgttcattgagtgcaacaaa

SEQ ID NO: 6343 - DNA, 2841 bp, Homo sapiens
ctctggatgtgtctgctgccgccattgtgcggcgctggtcccctcagagggttcctgctgctgccggtgccttggaccctccccctcgcttctcgttctactgccccaggagcccggcgggtccgggactcccgtccgtgccggtgcgggcgccggcatgtggctgtgggaggaccagggcggcctcctgggccctttctccttcctgctgctagtgctgctgctggtgacgcggagcccggtcaatgcstgcctcctcaccggcagcctcttcgttctactgcgcgtcttcagctttgagccggtgccctcttgcagggccctgcaggtgctcaagccccgggaccgcatttctgccatcgcccaccgtggcggcagccacgacgcgcccgagaacacgctggcggccattcggcaggcagctaagaatggagcaacaggcgtggagttggacattgagtttacttctgacgggattcctgtcttaatgcacgataacacagtagataggacgactgatgggactgggcgattgtgtgatttgacatttgaacaaattaggaagctgaatcctgcagcaaaccacagactcaggaatgatttccctgatgaaaagatccctaccctaagggaagctgttgcagagtgcctaaaccataacctcacaatcttctttgatgtcaaaggccatgcacacaagatgagacaaacagatcrggatgtaataacagcattaactcacagaccttggagcctaagccatacaggagatgggaaaccacgctatgatactttctggaaacattttatatttgttatgatggacattttgctcgattggagcatgcataatatcttgtggtacctgtgtggaatttcagctttcctcatgcaaaaggattttgtatccccggcctacttgaagaagtggtcagctaaaggaatccaggttgttggttggactgttaatacctttgatgaaaagagttactacgaatcccatcttggttccagctatatcactgacagcatggtagaagactgcraacctcacttctagactttcacggtgggacgaaacgggttcagaaactgccaggggcctcatacagggatatcaaaataccctttgtgctagcccaggccctggggaatcaggtgactcacacaaatgcaatagttggtcactgcatttttacctgaaccaaagctaaacccggtgttgccaccatgcaccatggcatgccagagttcaacactgttgctcttgaaaatctgggtctgaaaaaacgcacaagagcccctgccctgccctagctgaggcacacagggagacccagtgaggataagcacagattgaattgtacartttgcagatgcagatgtaaatgcatgggacatgcatgataactcagagttgacattttaaaacttgccacacttatttcaaatatttgtactcagctatgttaacatgtactgtagacatcaaacttgtggccatactaataaaattattaaaaggagcactaaaggaaaactgtgtgccaagcatcatatcctaaggcatacggaatttggggaagccaccatgcaatccagtgaggcttcagtgtacagcaaccaaaatggtagggaggtcttgaagccaatgagggatttatagcatcttgaatagagagctgcaaaccaccagggggcagagttgcayttttccaggctttttaggaagctctgcaacagatgtgatctgatcataggcaattagaactggaagaaacttccaaaaatatctaggtttgtcctcattttacaaatgaggaaactaaactctgtggaagggaaggggttgcctcaaaagtcacagcttagctgggcacagtggctcatgccgataatcccagcaattcagaaagctgaggcaggaggattacttgaggccagactgggcaatatrgcaagaccccatctctaaaaaattaggcatggtggtgcatgcctgtattcccagctrctcrggaggttgaggtgggaggatcacttgagcccagaagttcaaggctgcaatgagccatgattacaccacggcactacaaccttggtggcacagtgagaacctgactcttaaaaaaaaaaaaaaaaaaaaaaaaaaaaagataactagaacttctagaacatcttgtttacagttagccagaaactatacaagtggtttaacatgcattatcttactcaatccatacaaaagtcttatggaggtgttagcactctttctactgatgaagaactgaggtacttcataaaaccacttacccaaggtgtcttgagtctggtacaactggcattcaaatctaggtcagtctgcccccagagccactacccttacccctcactgaatctgcctttatattgttgagcccatgaccccaaactgctctttccaatttgaacttccagggattttattgtgaacttacatagcaacattaaaatgaagttgaattgtttttaatggcaaygccgtctgtctcctctagcttaccgcttctcacctttcaaccccatctgtggcctttgtccaggcccacagcttagccatggcttccctcctgcatccctgcygtgggttgctggcctcacacttgcagcagctggacagtgattttagaaggccaccagtccccrtagctatgtgacaatgagaagcaaacttttttgtgacagattgtattggcataggcatgatagatggggattggtacgttttgaatcagcatttgcaaaaaaattgtcttgaattttaaaataaacaacaaagatttgttcattgagtgcaacaaa

SEQ ID NO: 6344 - DNA, 2105 bp, Homo sapiens
cgctcgggatcccgaccagtcctgaccgcacgggggccgcggccacggggcgcaggggccatggtgcgcggcaggatctyccggctctcggtccgggacgtgcgcttccccacgtcgcttgggggccacggcgcggacgccatgcacacggamcctgactactcggctgcctatgtcgtcatagaaactgatgcagaagatggaatcaaggggtgtggaattaccttcactctgggaaaaggcactgaagttgattggtccagaaaagggcgtggtgcacctggcgacagcggccgtcctaaacgcggtgtgggacttgtgggccaagcaggagggaaagcctgtctggaagttacttgtrgacatggatcccaggaygctggtatcctgcatagatttcaggtacatcactgatgtcctgactgaggaggatgccctagaaatactgcagaaaggtcaaattggtaaaaaagaaagagagaagcaaatgctggcacaaggataccctgcttacacgacatcgtgcgcctggctggggtactcagatgacacgttgaagcagctctgtgcccaggcgctgaaggatggctggaccaggtttaaagtaaaggtgggtgctgatctccaggatgacatgcgaagatgccaaatcatccgagacatgattggaccggaaaagactttgatgatggatgccaaccagcgctgggatgtgcctgaggcggtggagtggatgtccaagctsgccaagttcaagccattgtggattgaggagccaacctcccctgatgacattctggggcacgccaccatttccaaggcactggtcccattaggaattggcattgccacaggagaacagtgccacaatagagtgatatttaagcaactcctacaggcgaaggccctgcagttcctccagattgacagttgcagactgggcagtgtcaatgagaacctctcagtattgctgatggccaaaaagtttgaaattcctgtttgcccccatgctggtggagttggcctctgtgaactggtgcagcacctgattatatttgactacatatcagtttctgcaagccttgaaaatagggtgtgtgagtatgttgaccacctgcatgagcatttcaagtatcccgtgatgatccagcgggcttcctacatgcctcccaaggatcccggctactcaacagaaatgaaggaggaatctgtaaagaaacaccagtmtccagatggtgaagtttggaagaaactccttccygctcaagaaaattaagtgctcagccccaacaacttttttctttctgaagtgaaagggcttaaaatttcttggaaatagttttacaaaaatggatttaaaaaatcctaccgatcaagatgagttcagctagaagtcataccaccctcaggaatcagctaaagcaaaaagaacttttacctcggcatccagcccaacccctaaagactgacaatatccttcragctcctttgaaagcaccctaaacagccatttccattttaatagttggatgcggattgtacccttcaatctgaaagtcttcagctttgaagtcatcaattttctcaacttttcgaagaatcctgagctttgggaaaggtctgggttctcgctgaagctaaaaacaaaataaggccattaytttgccataattgtacgacctgttgtaattgctcctcatgtccrtgaaacaagtacacaggatgtgatcaacaaagttctattttacaggagtatgatcctgtcgataccttsscgtaggttatgtaacatgattggagcgcaaccagctgttctcttgcacagatcgagagtgaggggtattttgtgacattacacagcatcaggagcctggtgcctcatcaggtagctgggagtggagtgtgaccctggyactgcgcttcacagcagcgccacctacagcacgctgtggctcagcctcgaaagggagattaaagccacaacaaagcaatgggggcattttgtcccttgtcccaccgatgaacttcccattccccagcacgaacaccaaccatgcagctatctgccgatgacacagtatggaaagtgccaagcgcccagtaag

SEQ ID NO: 6345 - DNA, 2221 bp, Homo sapiens
cgctcgggatcccgaccagtcctgaccgcacgggggccgcggccacggggcgcaggggccatggtgcgcggcaggatctyccggctctcggtccgggacgtgcgcttccccacgtcgcttgggggccacggcgcggacgccatgcacacggamcctgactactcggctgcctatgtcgtcatagaaactgatgcagaagatggaatcaaggggtgtggaattaccttcactctgggaaaaggcactgaagttgttgtctgtgctgtgaatgccctcgcccaccatgtgctcaacaaggacctcaaggacattgttggtgacttcagaggcttctataggcagctcacaagtgatgggcagctcagatggattggtccagaaaagggcgtggtgcacctggcgacagcggccgtcctaaacgcggtgtgggacttgtgggccaagcaggagggaaagcctgtctggaagttacttgtrgacatggatcccaggaygctggtatcctgcatagatttcaggtacatcactgatgtcctgactgaggaggatgccctagaaatactgcagaaaggtcaaattggtaaaaaagaaagagagaagcaaatgctggcacaaggataccctgcttacacgacatcgtgcgcctggctggggtactcagatgacacgttgaagcagctctgtgcccaggcgctgaaggatggctggaccaggtttaaagtaaaggtgggtgctgatctccaggatgacatgcgaagatgccaaatcatccgagacatgattggaccggaaaagactttgatgatggatgccaaccagcgctgggatgtgcctgaggcggtggagtggatgtccaagctsgccaagttcaagccattgtggattgaggagccaacctcccctgatgacattctggggcacgccaccatttccaaggcactggtcccattaggaattggcattgccacaggagaacagtgccacaatagagtgatatttaagcaactcctacaggcgaaggccctgcagttcctccagattgacagttgcagactgggcagtgtcaatgagaacctctcagtattgctgatggccaaaaagtttgaaattcctgtttgcccccatgctggtggagttggcctctgtgaactggtgcagcacctgattatatttgactacatatcagtttctgcaagccttgaaaatagggtgtgtgagtatgttgaccacctgcatgagcatttcaagtatcccgtgatgatccagcgggcttcctacatgcctcccaaggatcccggctactcaacagaaatgaaggaggaatctgtaaagaaacaccagtmtccagatggtgaagtttggaagaaactccttccygctcaagaaaattaagtgctcagccccaacaacttttttctttctgaagtgaaagggcttaaaatttcttggaaatagttttacaaaaatggatttaaaaaatcctaccgatcaagatgagttcagctagaagtcataccaccctcaggaatcagctaaagcaaaaagaacttttacctcggcatccagcccaacccctaaagactgacaatatccttcragctcctttgaaagcaccctaaacagccatttccattttaatagttggatgcggattgtacccttcaatctgaaagtcttcagctttgaagtcatcaattttctcaacttttcgaagaatcctgagctttgggaaaggtctgggttctcgctgaagctaaaaacaaaataaggccattaytttgccataattgtacgacctgttgtaattgctcctcatgtccrtgaaacaagtacacaggatgtgatcaacaaagttctattttacaggagtatgatcctgtcgataccttsscgtaggttatgtaacatgattggagcgcaaccagctgttctcttgcacagatcgagagtgaggggtattttgtgacattacacagcatcaggagcctggtgcctcatcaggtagctgggagtggagtgtgaccctggyactgcgcttcacagcagcgccacctacagcacgctgtggctcagcctcgaaagggagattaaagccacaacaaagcaatgggggcattttgtcccttgtcccaccgatgaacttcccattccccagcacgaacaccaaccatgcagctatctgccgatgacacagtatggaaagtgccaagcgcccagtaag

SEQ ID NO: 6346 - DNA, 5286 bp, Homo sapiens
agcgcagtggcgggcacgcgcagccgagaagatgtctccgacgccgccgctcttcagtttgcccgaagcgcggacgcggtttacgaagtctaccagagaggccttgaacaacaaaaacatcaagccattgttaagtaccttcagccaggtacctggcagtgaaaatgaaaaaaaatgtacccttgaccaagctttcagaggtattctagaagaagaaattataaatcattcatcatgtgaaaacgttttagctattatttctcttgctattgggggagtaactgaaggtatttgtaccgcatctacaccttttgtattgttgggagatgttttggattgtcttcctttggatcagtgtgacacaatattcacttttgtggaaaaaaatgttgctacttggaaatcaaatacattctattctgctgggaaaaattacttactacgtatgtgcaatgatctcctaagaagattgtctaaatcccagaatacagtcttctgtggacggattcagctctttttggccaggcttttccctctgtctgagaaatcaggtcttaacttgcagagtcagtttaatctggaaaatgtcacwgttttcaatacaaatgagcaggaaagcaccctgggtcagaagcacactgaagatagagaagaaggaatggatgtagaagaaggcgaaatgggagaygaggaagctccaacaacgtgctctattccaattgattacaacctgtatcgaaaattctggtcacttcaggattacttcaggaaccctgtgcaatgctatgagaagatttcatggaaaacttttctcaagtattctgaagaagttttagctgtttttaagagttataaattagatgatactcaggcctcaagaaaaaagatggaagaattgaaaacaggaggagaacatgtatattttgcaaaatttttaacaagtgaaaagctgatggatttacaactgagtgacagtaactttcgtcgacacatcctgttgcagtatctcattttattccaatatctcaaggggcaggtcaaattcaaaagttcaaactatgttttaactgatgagcaatcactttggattgaagatactacaaaatcagtttatcaactactatctgaaaacccccccgatggagaaagattttcaaagatggtagagcatatattaaacactgaagaaaactggaactcgtggaaaaatgaaggttgcccaagttttgtgaaagaaagaacatcagataccaaacctacgagaataattcggaagagaacagcacccgaggacttcctagggaaaggacccaccaaaaaaattctgatgggaaatgaggagttaacaaggctttggaatctttgccctgataatatggaagcctgtaaatcagagacaagggaacacatgcccactttggaggaattctttgaagaagccattgaacaggcagaccctgaaaatatggtggaaaatgaatataaggctgtgaacaattcaaattatggttggagagccctgagactattagcacggagaagccctcacttcttccagccaaccaaccagcagtttaaaagtttaccagaatatcttgaaaatatggtaataaagctagccaaggaattaccgcctccttctgaagaaataaaaacaggtgaggatgaagatgaggaagataatgatgctctactgaaggaaaatgaaagtcctgatgttcggcgagacaaacctgtaacaggagaacaaatagaggtatttgccaacaagctgggtgaacaatggaagattctggctccctacttggaaatgaaagactcagaaattaggcagattgagtgtgacagtgaagacatgaagatgagagctaagcagctcctggttgcctggcaagatcaagagggagttcatgcaacacctgagaatctgattaatgcactgaataagtctggattaagtgaccttgcagaaagtctaactaatgacmatgagacaaatagttagcttcttttttttttctttttattaaaactgtgatagattttgttaccaagcagcatttgataagaggtccactggttttggtaaacaataaacatttttataacaattgttgtacagtcggctggtgctctgagaacaayagaacacatattggctcaaaccagagtttggggaggttgggttgagataatgacctaaacgaagtgacctcaagatcacaaaatatatttttttgttaagtagatgtatttataatgaagttaaataagcactatttagggatatgtcgtttcttataccaaattagtttcctgtgtgttgtttgttastagttttacaaaatttatcctgaaatcccagaataacactttctgaaaccatatgactgctctgttctcacttattcgtgctttcaagcagaggatcaacaaatgatggtttgttctgcctgccacgagtcttgatcattaaaattgtactggcacccagctgtgctcactcataactaactaactaactgtctatggctccagctacactataacaacagcaaagctaaggagctgcagcactttatagcctgcaaagcctgaaataatttacwatcaatchtcaatcaatcatcatctatctatctatctatctatctaatctatctatcttgtccattacagaaaatgtttgtttgccaactttaaaagaaatgaagtctaaaacctcacttttccttctagccttacaaaaattgcctgacctctcaagacttttaatcacttcagggattcttgtgacattcaaytgagatatatgtgaacacaccctatacacagcaaagcactargtagtagtagcagaagacagtaccaccgacttttcttgttcccacataagcatttccctttagggctctaagatgaggtcatcatcgtttttaatcctgaagaagggctactgagtgagtgcagattattcggtaaacactcttaggcctaacctagctagtcagtcaagcagtaatctagcacaactctaatgttgagatgatggcctcggtgtgagtggcacagcatataaggcacattcaggaatcaagacttttttttttttggcctactcctctcccttctcaaagaccttacaggcaaggctgaattctaaaatagccttattagttaaaaacaacactggtataactaactcccatttctacttgaaaaaattctttggaataatgcttttttagatcaaataaaaaaatcaagctttttataatgatgataaggaattaattacaatttttaaaattctaatatagtccatacaaggcttatatactttgctctaaacctagctcacctggtctagtagctacaacatttagtagctacagtcagaaaatctaaattctaattgttaaattcatgtcctcaataaaattgttctgaccaaatgagacaatgaataaaaaagactttgcaaagttacaagcatcatacaaawatacatgaatcattataattttcatggtctcatcctgcccattctattcttaatcccctccacaaagtagaaagtattgattgccaagtcaaagtttaggtgaggaagctatttacaaataagtttccctgcaatgcttattttatcccctcctagtgttcacagattgcatcacatcagatttgaaagtaaaatggctgttattttctatttttaatagttatcatcagtgttgtgctctgccgagcattaaaacaacatacacaaagatatgagatgttatgataatccccaaactttattataaataactcaaaatcagagccaaactggctggtattctatgctttatcctttccctagcatcagkcaagggtcctggaacaaagatgagtaactattaaaatgtaagaagcctatcatattgaaatacctcatatgcttggtattttctactatcactttaaaatcactaaaattctgaaacagacattaagatttgggaattttttctttttttttttgagacagagtctctctgtcacccaggctggagtgcagtggtgtgatctcagctcactgcaacttctgccttccaggttcaagcaattctcccacctcagcctcccaagtagctgggatcacaggtgtgcaccaccacatccagctaatttttatatctttagtagagacagggtttcaccatgtggccaggctggtctcgaactcaacctccagtgaaccacctgcctcagcctcccaaagtgctgggattacaggcgtgagccaccgtgcccagccaagatttggggaattaagaaaggaaatacaaacacaactgagccaaggaaagaatctgactgataacatcactgcattcagcatccaaagaaatccattacttttacaactttgtatttctttttaaaatacaggcaggcaaagaagataacaaatatttttaaatggatgcttaacagcacagtgttaataaccatcttcagaaattgtacagtattaaacatgtcttcagccaagctccaacactcagaagacaaaagacttgaggtcaaaagctattaatccctttttttttattattattaaatgtcctcattttctaaaaataagcaaccagagcttgtcaacattttcttaagactgattattacaaagccattccaaagttaaatgtacaatccacagtacatcagagagagacacaataataaatgtataatcaaaggtactattattgatyacaatttattttaaagtcaggaaaagcctgcaataggctggacaaatacttgattgtgcccatgtttccatgggatggacagcagcactgagtcacacaatgagagcaacacttccttttccaccttcctggaaaaatgtttgttagataaggcaaaggatgggtggctacagaatggtggtttgaaccatgcaagaacagcaaataataggtaataggtgtgcagtaaacatctgactgctgaatcttgggtgaaaaaggcagcaagaaaaatgaccacagaaggaaatggttgaaaggcatttcaactctgaactttttaaaataatgcaagaaataataagctttttaaaaatgtctttctgccacctttatatagggcagcacaatccaaagataattttctcttctctgtaattttttaggttggtgcacagagtggtctgcttctgtcctcttttgttccaaatgaggtgaaacataaacccacctatgtgtcttcctctaaagctctggatta

SEQ ID NO: 6347 - DNA, 5290 bp, Homo sapiens
agcgcagtggcgggcacgcgcagccgagaagatgtctccgacgccgccgctcttcagtttgcccgaagcgcggacgcggtttacgaagtctaccagagaggccttgaacaacaaaaacatcaagccattgttaagtaccttcagccaggtacctggcagtgaaaatgaaaaaaaatgtacccttgaccaagctttcagaggtattctagaagaagaaattataaatcattcatcatgtgaaaacgttttagctattatttctcttgctattgggggagtaactgaaggtatttgtaccgcatctacaccttttgtattgttgggagatgttttggattgtcttcctttggatcagtgtgacacaatattcacttttgtggaaaaaaatgttgctacttggaaatcaaatacattctattctgctgggaaaaattacttactacgtatgtgcaatgatctcctaagaagattgtctaaatcccagaatacagtcttctgtggacggattcagctctttttggccaggcttttccctctgtctgagaaatcaggtcttaacttgcagagtcagtttaatctggaaaatgtcacwgttttcaatacaaatgagcaggaaagcaccctgggtcagaagcacactgaagatagagaagaaggaatggatgtagaagaaggcgaaatgggagaygaggaagctccaacaacgtgctctattccaattgattacaacctgtatcgaaaattctggtcacttcaggattacttcaggaaccctgtgcaatgctatgagaagatttcatggaaaacttttctcaagtattctgaagaagttttagctgtttttaagagttataaattagatgatactcaggcctcaagaaaaaagatggaagaattgaaaacaggaggagaacatgtatattttgcaaaatttttaacaagtgaaaagctgatggatttacaactgagtgacagtaactttcgtcgacacatcctgttgcagtatctcattttattccaatatctcaaggggcaggtcaaattcaaaagttcaaactatgttttaactgatgagcaatcactttggattgaagatactacaaaatcagtttatcaactactatctgaaaacccccccgatggagaaagattttcaaagatggtagagcatatattaaacactgaagaaaactggaactcgtggaaaaatgaaggttgcccaagttttgtgaaagaaagaacatcagataccaaacctacgagaataattcggaagagaacagcacccgaggacttcctagggaaaggacccaccaaaaaaattctgatgggaaatgaggagttaacaaggctttggaatctttgccctgataatatggaagcctgtaaatcagagacaaggcaaggaacacatgcccactttggaggaattctttgaagaagccattgaacaggcagaccctgaaaatatggtggaaaatgaatataaggctgtgaacaattcaaattatggttggagagccctgagactattagcacggagaagccctcacttcttccagccaaccaaccagcagtttaaaagtttaccagaatatcttgaaaatatggtaataaagctagccaaggaattaccgcctccttctgaagaaataaaaacaggtgaggatgaagatgaggaagataatgatgctctactgaaggaaaatgaaagtcctgatgttcggcgagacaaacctgtaacaggagaacaaatagaggtatttgccaacaagctgggtgaacaatggaagattctggctccctacttggaaatgaaagactcagaaattaggcagattgagtgtgacagtgaagacatgaagatgagagctaagcagctcctggttgcctggcaagatcaagagggagttcatgcaacacctgagaatctgattaatgcactgaataagtctggattaagtgaccttgcagaaagtctaactaatgacmatgagacaaatagttagcttcttttttttttctttttattaaaactgtgatagattttgttaccaagcagcatttgataagaggtccactggttttggtaaacaataaacatttttataacaattgttgtacagtcggctggtgctctgagaacaayagaacacatattggctcaaaccagagtttggggaggttgggttgagataatgacctaaacgaagtgacctcaagatcacaaaatatatttttttgttaagtagatgtatttataatgaagttaaataagcactatttagggatatgtcgtttcttataccaaattagtttcctgtgtgttgtttgttastagttttacaaaatttatcctgaaatcccagaataacactttctgaaaccatatgactgctctgttctcacttattcgtgctttcaagcagaggatcaacaaatgatggtttgttctgcctgccacgagtcttgatcattaaaattgtactggcacccagctgtgctcactcataactaactaactaactgtctatggctccagctacactataacaacagcaaagctaaggagctgcagcactttatagcctgcaaagcctgaaataatttacwatcaatchtcaatcaatcatcatctatctatctatctatctatctaatctatctatcttgtccattacagaaaatgtttgtttgccaactttaaaagaaatgaagtctaaaacctcacttttccttctagccttacaaaaattgcctgacctctcaagacttttaatcacttcagggattcttgtgacattcaaytgagatatatgtgaacacaccctatacacagcaaagcactargtagtagtagcagaagacagtaccaccgacttttcttgttcccacataagcatttccctttagggctctaagatgaggtcatcatcgtttttaatcctgaagaagggctactgagtgagtgcagattattcggtaaacactcttaggcctaacctagctagtcagtcaagcagtaatctagcacaactctaatgttgagatgatggcctcggtgtgagtggcacagcatataaggcacattcaggaatcaagacttttttttttttggcctactcctctcccttctcaaagaccttacaggcaaggctgaattctaaaatagccttattagttaaaaacaacactggtataactaactcccatttctacttgaaaaaattctttggaataatgcttttttagatcaaataaaaaaatcaagctttttataatgatgataaggaattaattacaatttttaaaattctaatatagtccatacaaggcttatatactttgctctaaacctagctcacctggtctagtagctacaacatttagtagctacagtcagaaaatctaaattctaattgttaaattcatgtcctcaataaaattgttctgaccaaatgagacaatgaataaaaaagactttgcaaagttacaagcatcatacaaawatacatgaatcattataattttcatggtctcatcctgcccattctattcttaatcccctccacaaagtagaaagtattgattgccaagtcaaagtttaggtgaggaagctatttacaaataagtttccctgcaatgcttattttatcccctcctagtgttcacagattgcatcacatcagatttgaaagtaaaatggctgttattttctatttttaatagttatcatcagtgttgtgctctgccgagcattaaaacaacatacacaaagatatgagatgttatgataatccccaaactttattataaataactcaaaatcagagccaaactggctggtattctatgctttatcctttccctagcatcagkcaagggtcctggaacaaagatgagtaactattaaaatgtaagaagcctatcatattgaaatacctcatatgcttggtattttctactatcactttaaaatcactaaaattctgaaacagacattaagatttgggaattttttctttttttttttgagacagagtctctctgtcacccaggctggagtgcagtggtgtgatctcagctcactgcaacttctgccttccaggttcaagcaattctcccacctcagcctcccaagtagctgggatcacaggtgtgcaccaccacatccagctaatttttatatctttagtagagacagggtttcaccatgtggccaggctggtctcgaactcaacctccagtgaaccacctgcctcagcctcccaaagtgctgggattacaggcgtgagccaccgtgcccagccaagatttggggaattaagaaaggaaatacaaacacaactgagccaaggaaagaatctgactgataacatcactgcattcagcatccaaagaaatccattacttttacaactttgtatttctttttaaaatacaggcaggcaaagaagataacaaatatttttaaatggatgcttaacagcacagtgttaataaccatcttcagaaattgtacagtattaaacatgtcttcagccaagctccaacactcagaagacaaaagacttgaggtcaaaagctattaatccctttttttttattattattaaatgtcctcattttctaaaaataagcaaccagagcttgtcaacattttcttaagactgattattacaaagccattccaaagttaaatgtacaatccacagtacatcagagagagacacaataataaatgtataatcaaaggtactattattgatyacaatttattttaaagtcaggaaaagcctgcaataggctggacaaatacttgattgtgcccatgtttccatgggatggacagcagcactgagtcacacaatgagagcaacacttccttttccaccttcctggaaaaatgtttgttagataaggcaaaggatgggtggctacagaatggtggtttgaaccatgcaagaacagcaaataataggtaataggtgtgcagtaaacatctgactgctgaatcttgggtgaaaaaggcagcaagaaaaatgaccacagaaggaaatggttgaaaggcatttcaactctgaactttttaaaataatgcaagaaataataagctttttaaaaatgtctttctgccacctttatatagggcagcacaatccaaagataattttctcttctctgtaattttttaggttggtgcacagagtggtctgcttctgtcctcttttgttccaaatgaggtgaaacataaacccacctatgtgtcttcctctaaagctctggatta

SEQ ID NO: 6348 - DNA, 5220 bp, Homo sapiens
agcgcagtggcgggcacgcgcagccgagaagatgtctccgacgccgccgctcttcagtttgcccgaagcgcggacgcggtttacgaagtctaccagagaggccttgaacaacaaaaacatcaagccattgttaagtaccttcagccaggtacctggcagtgaaaatgaaaaaaaatgtacccttgaccaagctttcagaggtattctagaagaagaaattataaatcattcatcatgtgaaaacgttttagctattatttctcttgctattgggggagtaactgaaggtatttgtaccgcatctacaccttttgtattgttgggagatgttttggattgtcttcctttggatcagtgtgacacaatattcacttttgtggaaaaaaatgttgctacttggaaatcaaatacattctattctgctgggaaaaattacttactacgtatgtgcaatgatctcctaagaagattgtctaaatcccagaatacagtcttctgtggacggattcagctctttttggccaggcttttccctctgtctgagaaatcaggtcttaacttgcagagtcagtttaatctggaaaatgtcacwgttttcaatacaaatgagcaggaaagcaccctgggtcagaagcacactgaagatagagaagaaggaatggatgtagaagaaggcgaaatgggagaygaggaagctccaacaacgtgctctattccaattgattacaacctgtatcgaaaattctggtcacttcaggattacttcaggaaccctgtgcaatgctatgagaagatttcatggaaaacttttctcaagtattctgaagaagttttagctgtttttaagagttataaattagatgatactcaggcctcaagaaaaaagatggaagaattgaaaacaggaggagaacatgtatattttgcaaaatttttaacaagtgaaaagctgatggatttacaactgagtgacagtaactttcgtcgacacatcctgttgcagtatctcattttattccaatatctcaaggggcaggtcaaattcaaaagttcaaactatgttttaactgatgagcaatcactttggattgaagatactacaaaatcagtttatcaactactatctgaaaacccccccgatggagaaagattttcaaagatggtagagcatatattaaacactgaagaaaactggaactcgtggaaaaatgaaggttgcccaagttttgtgaaagaaagaacatcagataccaaacctacgagaataattcggaagagaacagcacccgaggacttcctagggaaaggacccaccaaaaaaattctgatgggaaaggaacacatgcccactttggaggaattctttgaagaagccattgaacaggcagaccctgaaaatatggtggaaaatgaatataaggctgtgaacaattcaaattatggttggagagccctgagactattagcacggagaagccctcacttcttccagccaaccaaccagcagtttaaaagtttaccagaatatcttgaaaatatggtaataaagctagccaaggaattaccgcctccttctgaagaaataaaaacaggtgaggatgaagatgaggaagataatgatgctctactgaaggaaaatgaaagtcctgatgttcggcgagacaaacctgtaacaggagaacaaatagaggtatttgccaacaagctgggtgaacaatggaagattctggctccctacttggaaatgaaagactcagaaattaggcagattgagtgtgacagtgaagacatgaagatgagagctaagcagctcctggttgcctggcaagatcaagagggagttcatgcaacacctgagaatctgattaatgcactgaataagtctggattaagtgaccttgcagaaagtctaactaatgacmatgagacaaatagttagcttcttttttttttctttttattaaaactgtgatagattttgttaccaagcagcatttgataagaggtccactggttttggtaaacaataaacatttttataacaattgttgtacagtcggctggtgctctgagaacaayagaacacatattggctcaaaccagagtttggggaggttgggttgagataatgacctaaacgaagtgacctcaagatcacaaaatatatttttttgttaagtagatgtatttataatgaagttaaataagcactatttagggatatgtcgtttcttataccaaattagtttcctgtgtgttgtttgttastagttttacaaaatttatcctgaaatcccagaataacactttctgaaaccatatgactgctctgttctcacttattcgtgctttcaagcagaggatcaacaaatgatggtttgttctgcctgccacgagtcttgatcattaaaattgtactggcacccagctgtgctcactcataactaactaactaactgtctatggctccagctacactataacaacagcaaagctaaggagctgcagcactttatagcctgcaaagcctgaaataatttacwatcaatchtcaatcaatcatcatctatctatctatctatctatctaatctatctatcttgtccattacagaaaatgtttgtttgccaactttaaaagaaatgaagtctaaaacctcacttttccttctagccttacaaaaattgcctgacctctcaagacttttaatcacttcagggattcttgtgacattcaaytgagatatatgtgaacacaccctatacacagcaaagcactargtagtagtagcagaagacagtaccaccgacttttcttgttcccacataagcatttccctttagggctctaagatgaggtcatcatcgtttttaatcctgaagaagggctactgagtgagtgcagattattcggtaaacactcttaggcctaacctagctagtcagtcaagcagtaatctagcacaactctaatgttgagatgatggcctcggtgtgagtggcacagcatataaggcacattcaggaatcaagacttttttttttttggcctactcctctcccttctcaaagaccttacaggcaaggctgaattctaaaatagccttattagttaaaaacaacactggtataactaactcccatttctacttgaaaaaattctttggaataatgcttttttagatcaaataaaaaaatcaagctttttataatgatgataaggaattaattacaatttttaaaattctaatatagtccatacaaggcttatatactttgctctaaacctagctcacctggtctagtagctacaacatttagtagctacagtcagaaaatctaaattctaattgttaaattcatgtcctcaataaaattgttctgaccaaatgagacaatgaataaaaaagactttgcaaagttacaagcatcatacaaawatacatgaatcattataattttcatggtctcatcctgcccattctattcttaatcccctccacaaagtagaaagtattgattgccaagtcaaagtttaggtgaggaagctatttacaaataagtttccctgcaatgcttattttatcccctcctagtgttcacagattgcatcacatcagatttgaaagtaaaatggctgttattttctatttttaatagttatcatcagtgttgtgctctgccgagcattaaaacaacatacacaaagatatgagatgttatgataatccccaaactttattataaataactcaaaatcagagccaaactggctggtattctatgctttatcctttccctagcatcagkcaagggtcctggaacaaagatgagtaactattaaaatgtaagaagcctatcatattgaaatacctcatatgcttggtattttctactatcactttaaaatcactaaaattctgaaacagacattaagatttgggaattttttctttttttttttgagacagagtctctctgtcacccaggctggagtgcagtggtgtgatctcagctcactgcaacttctgccttccaggttcaagcaattctcccacctcagcctcccaagtagctgggatcacaggtgtgcaccaccacatccagctaatttttatatctttagtagagacagggtttcaccatgtggccaggctggtctcgaactcaacctccagtgaaccacctgcctcagcctcccaaagtgctgggattacaggcgtgagccaccgtgcccagccaagatttggggaattaagaaaggaaatacaaacacaactgagccaaggaaagaatctgactgataacatcactgcattcagcatccaaagaaatccattacttttacaactttgtatttctttttaaaatacaggcaggcaaagaagataacaaatatttttaaatggatgcttaacagcacagtgttaataaccatcttcagaaattgtacagtattaaacatgtcttcagccaagctccaacactcagaagacaaaagacttgaggtcaaaagctattaatccctttttttttattattattaaatgtcctcattttctaaaaataagcaaccagagcttgtcaacattttcttaagactgattattacaaagccattccaaagttaaatgtacaatccacagtacatcagagagagacacaataataaatgtataatcaaaggtactattattgatyacaatttattttaaagtcaggaaaagcctgcaataggctggacaaatacttgattgtgcccatgtttccatgggatggacagcagcactgagtcacacaatgagagcaacacttccttttccaccttcctggaaaaatgtttgttagataaggcaaaggatgggtggctacagaatggtggtttgaaccatgcaagaacagcaaataataggtaataggtgtgcagtaaacatctgactgctgaatcttgggtgaaaaaggcagcaagaaaaatgaccacagaaggaaatggttgaaaggcatttcaactctgaactttttaaaataatgcaagaaataataagctttttaaaaatgtctttctgccacctttatatagggcagcacaatccaaagataattttctcttctctgtaattttttaggttggtgcacagagtggtctgcttctgtcctcttttgttccaaatgaggtgaaacataaacccacctatgtgtcttcctctaaagctctggatta

SEQ ID NO: 6349 - DNA, 5483 bp, Homo sapiens
agcgcagtggcgggcacgcgcagccgagaagatgtctccgacgccgccgctcttcagtttgcccgaagcgcggacgcggtttacgaagtctaccagagaggccttgaacaacaaaaacatcaagccattgttaagtaccttcagccaggtacctggcagtgaaaatgaaaaaaaatgtacccttgaccaagctttcagaggtattctagaagaagaaattataaatcattcatcatgtgaaaacgttttagctattatttctcttgctattgggggagtaactgaaggtatttgtaccgcatctacaccttttgtattgttgggagatgttttggattgtcttcctttggatcagtgtgacacaatattcacttttgtggaaaaaaatgttgctacttggaaatcaaatacattctattctgctgggaaaaattacttactacgtatgtgcaatgatctcctaagaagattgtctaaatcccagaatacagtcttctgtggacggattcagctctttttggccaggcttttccctctgtctgagaaatcaggtcttaacttgcagagtcagtttaatctggaaaatgtcacwgttttcaatacaaatgagcaggaaagcaccctgggtcagaagcacactgaagatagagaagaaggaatggatgtagaagaaggcgaaatgggagaygaggaagctccaacaacgtgctctattccaattgattacaacctgtatcgaaaattctggtcacttcaggattacttcaggaaccctgtgcaatgctatgagaagatttcatggaaaacttttctcaagtattctgaagaagttttagctgtttttaagagttataaattagatgatactcaggcctcaagaaaaaagatggaagaattgaaaacaggaggagaacatgtatattttgcaaaatttttaacaagtgaaaagctgatggatttacaactgagtgacagtaactttcgtcgacacatcctgttgcagtatctcattttattccaatatctcaaggggcaggtcaaattcaaaagttcaaactatgttttaactgatgagcaatcactttggattgaagatactacaaaatcagtttatcaagtaagttcaacacgcaacaaacccatgattgaaaaaatggaaatttaggattttctttgtttcagccccaaataggaaaataaggataaagttaagctcaggtacaagaccacaaacactccttggttctctgcctacaaaccactcctatgatgcagaaagttgttgaaagcttagtatattctttctaatcacagctactatctgaaaacccccccgatggagaaagattttcaaagatggtagagcatatattaaacactgaagaaaactggaactcgtggaaaaatgaaggttgcccaagttttgtgaaagaaagaacatcagataccaaacctacgagaataattcggaagagaacagcacccgaggacttcctagggaaaggacccaccaaaaaaattctgatgggaaatgaggagttaacaaggctttggaatctttgccctgataatatggaagcctgtaaatcagagacaagggaacacatgcccactttggaggaattctttgaagaagccattgaacaggcagaccctgaaaatatggtggaaaatgaatataaggctgtgaacaattcaaattatggttggagagccctgagactattagcacggagaagccctcacttcttccagccaaccaaccagcagtttaaaagtttaccagaatatcttgaaaatatggtaataaagctagccaaggaattaccgcctccttctgaagaaataaaaacaggtgaggatgaagatgaggaagataatgatgctctactgaaggaaaatgaaagtcctgatgttcggcgagacaaacctgtaacaggagaacaaatagaggtatttgccaacaagctgggtgaacaatggaagattctggctccctacttggaaatgaaagactcagaaattaggcagattgagtgtgacagtgaagacatgaagatgagagctaagcagctcctggttgcctggcaagatcaagagggagttcatgcaacacctgagaatctgattaatgcactgaataagtctggattaagtgaccttgcagaaagtctaactaatgacmatgagacaaatagttagcttcttttttttttctttttattaaaactgtgatagattttgttaccaagcagcatttgataagaggtccactggttttggtaaacaataaacatttttataacaattgttgtacagtcggctggtgctctgagaacaayagaacacatattggctcaaaccagagtttggggaggttgggttgagataatgacctaaacgaagtgacctcaagatcacaaaatatatttttttgttaagtagatgtatttataatgaagttaaataagcactatttagggatatgtcgtttcttataccaaattagtttcctgtgtgttgtttgttastagttttacaaaatttatcctgaaatcccagaataacactttctgaaaccatatgactgctctgttctcacttattcgtgctttcaagcagaggatcaacaaatgatggtttgttctgcctgccacgagtcttgatcattaaaattgtactggcacccagctgtgctcactcataactaactaactaactgtctatggctccagctacactataacaacagcaaagctaaggagctgcagcactttatagcctgcaaagcctgaaataatttacwatcaatchtcaatcaatcatcatctatctatctatctatctatctaatctatctatcttgtccattacagaaaatgtttgtttgccaactttaaaagaaatgaagtctaaaacctcacttttccttctagccttacaaaaattgcctgacctctcaagacttttaatcacttcagggattcttgtgacattcaaytgagatatatgtgaacacaccctatacacagcaaagcactargtagtagtagcagaagacagtaccaccgacttttcttgttcccacataagcatttccctttagggctctaagatgaggtcatcatcgtttttaatcctgaagaagggctactgagtgagtgcagattattcggtaaacactcttaggcctaacctagctagtcagtcaagcagtaatctagcacaactctaatgttgagatgatggcctcggtgtgagtggcacagcatataaggcacattcaggaatcaagacttttttttttttggcctactcctctcccttctcaaagaccttacaggcaaggctgaattctaaaatagccttattagttaaaaacaacactggtataactaactcccatttctacttgaaaaaattctttggaataatgcttttttagatcaaataaaaaaatcaagctttttataatgatgataaggaattaattacaatttttaaaattctaatatagtccatacaaggcttatatactttgctctaaacctagctcacctggtctagtagctacaacatttagtagctacagtcagaaaatctaaattctaattgttaaattcatgtcctcaataaaattgttctgaccaaatgagacaatgaataaaaaagactttgcaaagttacaagcatcatacaaawatacatgaatcattataattttcatggtctcatcctgcccattctattcttaatcccctccacaaagtagaaagtattgattgccaagtcaaagtttaggtgaggaagctatttacaaataagtttccctgcaatgcttattttatcccctcctagtgttcacagattgcatcacatcagatttgaaagtaaaatggctgttattttctatttttaatagttatcatcagtgttgtgctctgccgagcattaaaacaacatacacaaagatatgagatgttatgataatccccaaactttattataaataactcaaaatcagagccaaactggctggtattctatgctttatcctttccctagcatcagkcaagggtcctggaacaaagatgagtaactattaaaatgtaagaagcctatcatattgaaatacctcatatgcttggtattttctactatcactttaaaatcactaaaattctgaaacagacattaagatttgggaattttttctttttttttttgagacagagtctctctgtcacccaggctggagtgcagtggtgtgatctcagctcactgcaacttctgccttccaggttcaagcaattctcccacctcagcctcccaagtagctgggatcacaggtgtgcaccaccacatccagctaatttttatatctttagtagagacagggtttcaccatgtggccaggctggtctcgaactcaacctccagtgaaccacctgcctcagcctcccaaagtgctgggattacaggcgtgagccaccgtgcccagccaagatttggggaattaagaaaggaaatacaaacacaactgagccaaggaaagaatctgactgataacatcactgcattcagcatccaaagaaatccattacttttacaactttgtatttctttttaaaatacaggcaggcaaagaagataacaaatatttttaaatggatgcttaacagcacagtgttaataaccatcttcagaaattgtacagtattaaacatgtcttcagccaagctccaacactcagaagacaaaagacttgaggtcaaaagctattaatccctttttttttattattattaaatgtcctcattttctaaaaataagcaaccagagcttgtcaacattttcttaagactgattattacaaagccattccaaagttaaatgtacaatccacagtacatcagagagagacacaataataaatgtataatcaaaggtactattattgatyacaatttattttaaagtcaggaaaagcctgcaataggctggacaaatacttgattgtgcccatgtttccatgggatggacagcagcactgagtcacacaatgagagcaacacttccttttccaccttcctggaaaaatgtttgttagataaggcaaaggatgggtggctacagaatggtggtttgaaccatgcaagaacagcaaataataggtaataggtgtgcagtaaacatctgactgctgaatcttgggtgaaaaaggcagcaagaaaaatgaccacagaaggaaatggttgaaaggcatttcaactctgaactttttaaaataatgcaagaaataataagctttttaaaaatgtctttctgccacctttatatagggcagcacaatccaaagataattttctcttctctgtaattttttaggttggtgcacagagtggtctgcttctgtcctcttttgttccaaatgaggtgaaacataaacccacctatgtgtcttcctctaaagctctggatta

SEQ ID NO: 6350 - DNA, 1563 bp, Homo sapiens
ctcgcagccctccttcggaccctcgatccgagagcgccccagccagagcttgtgcccatgcccctgtcccgcaggggaaggggatcccgcctggccggctctcgagcggcgactagtaacctcccgcgggcgacagccctctccccaaagccacgcgcaactcctcacccggcggcgccattcctccgagcaggtcccgccggagtccgagccgcgggctgasttccgctcgggaaagtggctccaagagcccgccacaggggacgccagggactcgcggcaggctctgcgggccaggatgagttctaagcacaggtactggtacaagaggaacgcccgcattctctgtccagttccatgcgccaggaggtctttgtcaccatcgctgatctcagttaccaagatgtccatttgctgttgggctctgaagatcgagctgagttgttcagtcttaccatcaagagtataatcactctgccctctgtaaggacccttacccagatacaggaaatcatgcccaatgggacctgcaacacagagtgtctttacaggcagacgtttcaggcattctctgagatgctccagagtttggtggtaaaagacccacatttggaaaatcttgacaccattattaagcttccactgcgattccaaagacttggacacctagtggctctgatggcactgctctgtggggacccacaggaaaaggtggctgaggaggctgcagagggcattcactccctgctgcatatcaccctgaggctgaagtatatcactcatgacaagaaagatcagcaaaacttgaaaagagcattgacaaaatgtcgagaattcctggagctccacagctctgccgctaaatgcttctacaactgtcccttcagaattgcccaggtctttgaaggttttcttgattcaaatgagctctgccagtttataatgactacatttgataccctgaaaamcctgaaacatccctgcatccagcgatcagcaggagaattactgctaactttggcraaaaatacagagtcccaatttgagaaggtgccagaaattatgggagttatctgtgcccagttayccataatcagccagcctagagtccgccaacaaatcataaataccgtgagtttatttatatccagacccaagtacacagatatagtgctcagcttccttctgtgtyatccagtgccgtataacaggcacctggctgaggtgtggagaatgctgtcggtggagcttcccagcacgacctggattctgtggaggctcctgaggaagctgcagaaatgccataatgagcctgcacaggagaagatggcatatgtggctgtggctgcaacagatgccctttatgaggtgtttttgggaaacaggcttcgagcagctacgttccgactctttcctcagcttctcatgacactgcttatccagattcatcacagcatcggcctcaccatgtctgatgtcracatcccaagtggcctgtacacagaacaggaagtgccttcagaggtcacccctttgtggtactgcccatcattatttcattga

SEQ ID NO: 6351 - DNA, 1735 bp, Homo sapiens
ccggagtccgagccgcgggctgasttccgctcgggaaagtggctccaagagcccgccacaggggacgccagggactcgcggcaggctctgcgggccaggatgagttctaagcacagacttggacatccctgacatccctggactccattgtgagcccctgtcacatagccccagacacctgacccaacaggacccgctcagtgaggccattgttgagaaactgatccagtccatccagaaggttttcaatggtgagctaaagggtgaacttgaaaagctgaaattcctaggagatctgtcttctctcagccaagctttaccttatgatgaaaccgcaaaatcattcattcacagccacatagcagacrttgtgcataccttaaatgtactggtacaagaggaacgcccgcattctctgtccagttccatgcgccaggaggtctttgtcaccatcgctgatctcagttaccaagatgtccatttgctgttgggctctgaagatcgagctgagttgttcagtcttaccatcaagagtataatcactctgccctctgtaaggacccttacccagatacaggaaatcatgcccaatgggacctgcaacacagagtgtctttacaggcagacgtttcaggcattctctgagatgctccagagtttggtggtaaaagacccacatttggaaaatcttgacaccattattaagcacttggtcccctggttacagtcagtcaaagaccatgagcgggaacgggccacggccagcatggctcaagttctgargtgcctatccaaacatctcaacttgaagcttccactgcgattccaaagacttggacacctagtggctctgatggcactgctctgtggggacccacaggaaaaggtggctgaggaggctgcagagggcattcactccctgctgcatatcaccctgaggctgaagtatatcactcatgacaagaaagatcagcaaaacttgaaaagagcattgacaaaatgtcgagaattcctggagctccacagctctgccgctaaatgcttctacaactgtcccttcagaattgcccaggtctttgaaggttttcttgattcaaatgagctctgccagtttataatgactacatttgataccctgaaaamcctgaaacatccctgcatccagcgatcagcaggagaattactgctaactttggcraaaaatacagagtcccaatttgagaaggtgccagaaattatgggagttatctgtgcccagttayccataatcagccagcctagagtccgccaacaaatcataaataccgtgagtttatttatatccagacccaagtacacagatatagtgctcagcttccttctgtgtyatccagtgccgtataacaggcacctggctgaggtgtggagaatgctgtcggtggagcttcccagcacgacctggattctgtggaggctcctgaggaagctgcagaaatgccataatgagcctgcacaggagaagatggcatatgtggctgtggctgtaagcccttgagctttgcccctctaatgtcagcccctcccaggatgactgaccccacaccccagtggagagtgttccttttggtccctctcaaagcctgcatctgtcatccatttataagtctacagtgtttctgccaagggattgacatggagggagctggggagagtgaaggagtcagaatgccttaatacaaactcgtccaacctgcct

SEQ ID NO: 6352 - DNA, 2097 bp, Homo sapiens
aggcaccaaccccgccaggtcgcgggcactcccaccagctcgcagccctccttcggaccctcgatccgagagcgccccagccagagcttgtgcccatgcccctgtcccgcaggggaaggggatcccgcctggccggctctcgagcggcgactagtaacctcccgcgggcgacagccctctccccaaagccacgcgcaactcctcacccggcggcgccattcctccgagcaggtcccgccggagtccgagccgcgggctgasttccgctcgggaaagtggctccaagagcccgccacaggggacgccagggactcgcggcaggctctgcgggccaggatgagttctaagcacaggatctgtagtcaggaagaagtagtgatcccctgtgcctatgacagtgattcagaaagtgtggatttggagctgagcaacttagagattattaaaaaaggctcaagtagcattgaactgacagacttggacatccctgacatccctggactccattgtgagcccctgtcacatagccccagacacctgacccaacaggacccgctcagtgaggccattgttgagaaactgatccagtccatccagaaggttttcaatggtgagctaaagggtgaacttgaaaagctgaaattcctaggagatctgtcttctctcagccaagctttaccttatgatgaaaccgcaaaatcattcattcacagccacatagcagacrttgtgcataccttaaatgtactggtacaagaggaacgcccgcattctctgtccagttccatgcgccaggaggtctttgtcaccatcgctgatctcagttaccaagatgtccatttgctgttgggctctgaagatcgagctgagttgttcagtcttaccatcaagagtataatcactctgccctctgtaaggacccttacccagatacaggaaatcatgcccaatgggacctgcaacacagagtgtctttacaggcagacgtttcaggcattctctgagatgctccagagtttggtggtaaaagacccacatttggaaaatcttgacaccattattaagcacttggtcccctggttacagtcagtcaaagaccatgagcgggaacgggccacggccagcatggctcaagttctgargtgcctatccaaacatctcaacttgaagcttccactgcgattccaaagacttggacacctagtggctctgatggcactgctctgtggggacccacaggaaaaggtggctgaggaggctgcagagggcattcactccctgctgcatatcaccctgaggctgaagtatatcactcatgacaagaaagatcagcaaaacttgaaaagagcattgacaaaatgtcgagaattcctggagctccacagctctgccgctaaatgcttctacaactgtcccttcagaattgcccaggtctttgaaggttttcttgattcaaatgagctctgccagtttataatgactacatttgataccctgaaaamcctgaaacatccctgcatccagcgatcagcaggagaattactgctaactttggcraaaaatacagagtcccaatttgagaaggtgccagaaattatgggagttatctgtgcccagttayccataatcagccagcctagagtccgccaacaaatcataaataccgtgagtttatttatatccagacccaagtacacagatatagtgctcagcttccttctgtgtyatccagtgccgtataacaggcacctggctgaggtgtggagaatgctgtcggtggagcttcccagcacgacctggattctgtggaggctcctgaggaagctgcagaaatgccataatgagcctgcacaggagaagatggcatatgtggctgtggctgcaacagatgccctttatgaggtgtttttgggaaacaggcttcgagcagctacgttccgactctttcctcagcttctcatgacactgcttatccagattcatcacagcatcggcctcaccatgtctgatgtcracatcccaagtggcctgtacacagaacaggaagtgccttcagaggtcacccctttgtggtactgcccatcattatttcattga

SEQ ID NO: 6353 - DNA, 1560 bp, Homo sapiens
ctcgcagccctccttcggaccctcgatccgagagcgccccagccagagcttgtgcccatgcccctgtcccgcaggggaaggggatcccgcctggccggctctcgagcggcgactagtaacctcccgcgggcgacagccctctccccaaagccacgcgcaactcctcacccggcggcgccattcctccgagcaggtcccgccggagtccgagccgcgggctgasttccgctcgggaaagtggctccaagagcccgccacaggggacgccagggactcgcggcaggctctgcgggccaggatgagttctaagcacaggtactggtacaagaggaacgcccgcattctctgtccagttccatgcgccaggaggtctttgtcaccatcgctgatctcagttaccaagatgtccatttgctgttgggctctgaagatcgagctgagttgttcagtcttaccatcaagagtataatcactctgccctctgtaaggacccttacccagatacaggaaatcatgcccaatgggacctgcaacacagagtgtctttacaggcagacgtttcaggcattctctgagatgctccagagtttggtggtaaaagacccacatttggaaaatcttgacaccattattaagcttccactgcgattccaaagacttggacacctagtggctctgatggcactgctctgtggggacccacaggaaaaggtggctgaggaggctgcagagggcattcactccctgctgcatatcaccctgaggctgaagtatatcactcatgacaagaaagatcagcaaaacttgaaaagagcattgacaaaatgtcgagaattcctggagctccacagctctgccgctaaatgcttctacaactgtcccttcagaattgcccaggtctttgaaggttttcttgattcaaatgagctctgccagtttataatgactacatttgataccctgaaaamcctgaaacatccctgcatccagcgatcagcaggagaattactgctaactttggcraaaaatacagagtcccaatttgagaaggtgccagaaattatgggagttatctgtgcccagttayccataatcagccagcctagagtccgccaacaaatcataaataccgtgagtttatttatatccagacccaagtacacagatatagtgctcagcttccttctgtgtyatccagtgccgtataacaggcacctggctgaggtgtggagaatgctgtcggtggagcttcccagcacgacctggattctgtggaggctcctgaggaagctgcagaaatgccataatgagcctgcacaggagaagatggcatatgtggctgtggctgtaagcccttgagctttgcccctctaatgtcagcccctcccaggatgactgaccccacaccccagtggagagtgttccttttggtccctctcaaagcctgcatctgtcatccatttataagtctacagtgtttctgccaagggattgacatggagggagctggggagagtgaaggagtcagaatgccttaatacaaactcgtccaacctgcct

SEQ ID NO: 6354 - DNA, 1738 bp, Homo sapiens
ccggagtccgagccgcgggctgasttccgctcgggaaagtggctccaagagcccgccacaggggacgccagggactcgcggcaggctctgcgggccaggatgagttctaagcacagacttggacatccctgacatccctggactccattgtgagcccctgtcacatagccccagacacctgacccaacaggacccgctcagtgaggccattgttgagaaactgatccagtccatccagaaggttttcaatggtgagctaaagggtgaacttgaaaagctgaaattcctaggagatctgtcttctctcagccaagctttaccttatgatgaaaccgcaaaatcattcattcacagccacatagcagacrttgtgcataccttaaatgtactggtacaagaggaacgcccgcattctctgtccagttccatgcgccaggaggtctttgtcaccatcgctgatctcagttaccaagatgtccatttgctgttgggctctgaagatcgagctgagttgttcagtcttaccatcaagagtataatcactctgccctctgtaaggacccttacccagatacaggaaatcatgcccaatgggacctgcaacacagagtgtctttacaggcagacgtttcaggcattctctgagatgctccagagtttggtggtaaaagacccacatttggaaaatcttgacaccattattaagcacttggtcccctggttacagtcagtcaaagaccatgagcgggaacgggccacggccagcatggctcaagttctgargtgcctatccaaacatctcaacttgaagcttccactgcgattccaaagacttggacacctagtggctctgatggcactgctctgtggggacccacaggaaaaggtggctgaggaggctgcagagggcattcactccctgctgcatatcaccctgaggctgaagtatatcactcatgacaagaaagatcagcaaaacttgaaaagagcattgacaaaatgtcgagaattcctggagctccacagctctgccgctaaatgcttctacaactgtcccttcagaattgcccaggtctttgaaggttttcttgattcaaatgagctctgccagtttataatgactacatttgataccctgaaaamcctgaaacatccctgcatccagcgatcagcaggagaattactgctaactttggcraaaaatacagagtcccaatttgagaaggtgccagaaattatgggagttatctgtgcccagttayccataatcagccagcctagagtccgccaacaaatcataaataccgtgagtttatttatatccagacccaagtacacagatatagtgctcagcttccttctgtgtyatccagtgccgtataacaggcacctggctgaggtgtggagaatgctgtcggtggagcttcccagcacgacctggattctgtggaggctcctgaggaagctgcagaaatgccataatgagcctgcacaggagaagatggcatatgtggctgtggctgcaacagatgccctttatgaggtgtttttgggaaacaggcttcgagcagctacgttccgactctttcctcagcttctcatgacactgcttatccagattcatcacagcatcggcctcaccatgtctgatgtcracatcccaagtggcctgtacacagaacaggaagtgccttcagaggtcacccctttgtggtactgcccatcattatttcattga

SEQ ID NO: 6355 - DNA, 3308 bp, Homo sapiens
ttttaccccaacatggctgcgcccgtgggaccggtgaagttctggcgacccggtacagaggggccaggtgtaagcatctctgaagagagacaaagtctggctgaaaactctgggacaacggttgtttacaacccttatgctgccctttccatagagcagcagaggcagaagctgccggtattcaagcttaggaatcatattttatacttgatagaaaattatcagacrgtggtgattgttggtgaaacaggatgtgggaagagcacacagattcctcagtaccttgcagaagccggctggacagctgaaggaagagtggtaggagtgacccagcctcgaagagtggctgctgttacagttgcagggagagtagctgaagaaaggggtgcagtgctgggccacgaggtgggctactgcatccgctttgatgactgcacygaccagctggccacgagaattaagtttcttactgatggaatgctggtcagggaaatgatggttgatccgttgttaacaaaatatagtgtcatcatgctggatgaagcccacgagaggaccttgtacactgacattgccaytggcttgctaaaaaagattcagaaaaagcgaggggatcttcgattgattgtagcttcagccactctggatgcagacaaattccgggatttctttaatcaaaatgaaaccagtgatccagcaagggatacatgtgtgatccttacagtggaagggagaacatttccggtggatatcttttatctacaaagtcctgttccagattatatcaaatcaactgtcgaaactgtggtgaaaattcaccagacagagggagacggagacgttttagcatttcttactggccaggaagaggtagaaactgttgtgtcgatgctcatcgagcaggctcgagcactagctcgcactgggatgaagagacacctccgagttctccccatgtatgcaggactgccttcctttgagcaaatgaaagtgtttgaaagggtgtcacgcagtgtcagaaaggtgatagtggccaccaatgtggcagaaacctctatcacaatcagcggcattgtgtatgtgatcgactgtggctttgtgaaactccgagcctacaatcccaggacagctattgaatgcttggtggtggtgccagtctcccaggcatcagctaatcagcgagcaggacgtggtggtcgtagtcgctcgggaaaatgttatcgcctttatacagaggaagcctttgacaagttgcctcagtctacggttcctgagatgcagcgtagtaatttggcacctgtcatcctgcagctgaaagcactaggaattgacaatgtcctcaggttccacttcatgtcgccccctccagcacagtcgatggttcaagccttggagttactgtatgctctgggaggtctggacaaagactgtcgyctaactgaaccgcttggyatgagaattgcagagtttcctttgaatcccatgtttgccaaaatgctgcttgaatcaggaaacttcggctgttctcaggaaattctaagcatcgctgccatgatgcagatccagaatatctttgtggtccccccaaaccagaagtctcacgcaattcgagtgcaccgtaaatttgctgtggaggagggcgaccacctcactatgctcaatatatatgaagcatttatcaaacacaataaggactctaaatggtgtcaggaacatttcctgaattacaagggtcttgtcagagctgcgactgtaagagaacaattgaaaaagcttcttgtcaagtttcaagtgcccaggaagtctagtgaaggtgacccggatctggttctgaggtgcattgtctccggcttcttcgccaatgcagcgaggtttcattctactggagcttataggaccatccgtgatgaccatgagctgcacatacaccctgygtcagtcctctatgcagagaagccgcctcgctgggtcatctataacgaagttatacagacctccaagtactacatgagagatgtgactgccattgaatcggcctggctgttggagctggctccacacttttatcaacaaggaacgcacctgtctctgaaagccaaaagggccaaggtccaggaccygtgagaggagcccacagctacagctgcagggactgctggygtcctctcctccatgctgctgcccctggtcccaggtggggtgagctggcaccagctcctgtggaatgtttggttgctctgaagtgggctgcggcctgttcattagtcctttcttcccgctgcccacagcatttgcatccttgctgggatcctggaggactttgtgcatgggcaggcatccttctgtgctgcagcgggcagagtgggagttggctcactcagcacgctcactaacccagcatgccacttccagcaggcatgcagtcctggcccagctctatgggaaacaaggaggaaagttagccactgaaggccaaaacaccatgtggggtggacagagggtttgctgggctggctttgctttccctgctggggccacagctgtgttaaccaatgaggtctgctgccaggtgtgaacaagcatgtctctacgaatgaacgaaacattggggatctctgccgaaaccaccaaagggcatgtctgatgggcacagggtctcccaaacccagtggcttctgtctgtcctcagcccttgtccctgtttatctgcagccaggagacttgcaagggattggtgattgacagagaggactcgtgcgctgttttgtgttagcagaggatttgtgtttcacaggtaggcttagcgtcctctcagagtgtagtgccaggtcctggtgccacgctagctgagcactcaggagagttcatcagctcagatcccacagggcctcctctttagcaggaattcacaacagtttggatgccctaaacttctgtagctcaggaacatcactggtgtatttgtttttttgtttgtttgcttgggttcttgcaagagcgcgtggggacagttcttccagcaggcactggttttgttgccccagggctgctttgctgtgatgatgattgcatttcaacacatgccagatgcagattttttcccccttactgtttcaatgacctttattttaaaaacacatagcttgaaaatttatttttatactgatattagtttggatgtgccacttttggcaccaaacgtgtatgtcrtttttatttccattttataaacatgtaaataatagtgataacttgttaataatagtaaacctttatacctaaagtaaatgtcttccctcccamacctg

SEQ ID NO: 6356 - DNA, 3451 bp, Homo sapiens
ttttaccccaacatggctgcgcccgtgggaccggtgaagttctggcgacccggtacagaggggccaggtgtaagcatctctgaagagagacaaagtctggctgaaaactctgggacaacggttgtttacaacccttatgctgccctttccatagagcagcagaggcagaagctgccggtattcaagcttaggaatcatattttatacttgatagaaaattatcagacrgtggtgattgttggtgaaacaggatgtgggaagagcacacagattcctcagtaccttgcagaagccggctggacagctgaaggaagagtggtaggagtgacccagcctcgaagagtggctgctgttacacatgatctttcttcccaaaggttgcagggagagtagctgaagaaaggggtgcagtgctgggccacgaggtgggctactgcatccgctttgatgactgcacygaccagctggccacgagaattaagtttcttactgatggaatgctggtcagggaaatgatggttgatccgttgttaacaaaatatagtgtcatcatgctggatgaagcccacgagaggaccttgtacactgacattgccaytggcttgctaaaaaagattcagaaaaagcgaggggatcttcgattgattgtagcttcagccactctggatgcagacaaattccgggatttctttaatcaaaatgaaaccagtgatccagcaagggatacatgtgtgatccttacagtggaagggagaacatttccggtggatatcttttatctacaaagtcctgttccagattatatcaaatcaactgtcgaaactgtggtgaaaattcaccagacagagggagacggagacgttttagcatttcttactggccaggaagaggtagaaactgttgtgtcgatgctcatcgagcaggctcgagcactagctcgcactgggatgaagagacacctccgagttctccccatgtatgcaggactgccttcctttgagcaaatgaaagtgtttgaaagggtgtcacgcagtgtcagaaaggtgatagtggccaccaatgtggcagaaacctctatcacaatcagcggcattgtgtatgtgatcgactgtggctttgtgaaactccgagcctacaatcccaggacagctattgaatgcttggtggtggtgccagtctcccaggcatcagctaatcagcgagcaggacgtggtggtcgtagtcgctcgggaaaatgttatcgcctttatacagaggaagcctttgacaagttgcctcagtctacggttcctgagatgcagcgtagtaatttggcacctgtcatcctgcagctgaaagcactaggaattgacaatgtcctcaggttccacttcatgtcgccccctccagcacagtcgatggttcaagccttggagttactgtatgctctgggaggtctggacaaagactgtcgyctaactgaaccgcttggyatgagaattgcagagtttcctttgaatcccatgtttgccaaaatgctgcttgaatcaggaaacttcggctgttctcaggaaattctaagcatcgctgccatgatgcagatccagaatatctttgtggtccccccaaaccagaagtctcacgcaattcgagtgcaccgtaaatttgctgtggaggagggcgaccacctcactatgctcaatatatatgaagcatttatcaaacacaataaggactctaaatggtgtcaggaacatttcctgaattacaagggtcttgtcagagctgcgactgtaagagaacaattgaaaaagcttcttgtcaagtttcaagtgcccaggaagtctagtgaaggtgacccggatctggttctgaggtgcattgtctccggcttcttcgccaatgcagcgaggtttcattctactggagcttatagatggagtttcgctcttgttgcccatgctagagtgcaatggggtgatcttggctcatcgcaacctttgcctcccagtttcaagcgattctcctgcctcagcctccggagtagctgggattacaggaccatccgtgatgaccatgagctgcacatacaccctgygtcagtcctctatgcagagaagccgcctcgctgggtcatctataacgaagttatacagacctccaagtactacatgagagatgtgactgccattgaatcggcctggctgttggagctggctccacacttttatcaacaaggaacgcacctgtctctgaaagccaaaagggccaaggtccaggaccygtgagaggagcccacagctacagctgcagggactgctggygtcctctcctccatgctgctgcccctggtcccaggtggggtgagctggcaccagctcctgtggaatgtttggttgctctgaagtgggctgcggcctgttcattagtcctttcttcccgctgcccacagcatttgcatccttgctgggatcctggaggactttgtgcatgggcaggcatccttctgtgctgcagcgggcagagtgggagttggctcactcagcacgctcactaacccagcatgccacttccagcaggcatgcagtcctggcccagctctatgggaaacaaggaggaaagttagccactgaaggccaaaacaccatgtggggtggacagagggtttgctgggctggctttgctttccctgctggggccacagctgtgttaaccaatgaggtctgctgccaggtgtgaacaagcatgtctctacgaatgaacgaaacattggggatctctgccgaaaccaccaaagggcatgtctgatgggcacagggtctcccaaacccagtggcttctgtctgtcctcagcccttgtccctgtttatctgcagccaggagacttgcaagggattggtgattgacagagaggactcgtgcgctgttttgtgttagcagaggatttgtgtttcacaggtaggcttagcgtcctctcagagtgtagtgccaggtcctggtgccacgctagctgagcactcaggagagttcatcagctcagatcccacagggcctcctctttagcaggaattcacaacagtttggatgccctaaacttctgtagctcaggaacatcactggtgtatttgtttttttgtttgtttgcttgggttcttgcaagagcgcgtggggacagttcttccagcaggcactggttttgttgccccagggctgctttgctgtgatgatgattgcatttcaacacatgccagatgcagattttttcccccttactgtttcaatgacctttattttaaaaacacatagcttgaaaatttatttttatactgatattagtttggatgtgccacttttggcaccaaacgtgtatgtcrtttttatttccattttataaacatgtaaataatagtgataacttgttaataatagtaaacctttatacctaaagtaaatgtcttccctcccamacctg

SEQ ID NO: 6357 - DNA, 2118 bp, Homo sapiens
ttttaccccaacatggctgcgcccgtgggaccggtgaagttctggcgacccggtacagaggggccaggtgtaagcatctctgaagagagacaaagtctggctgaaaactctgggacaacggttgtttacaacccttatgctgccctttccatagagcagcagaggcagaagctgccggtattcaagcttaggaatcatattttatacttgatagaaaattatcagacrgtggtgattgttggtgaaacaggatgtgggaagagcacacagattcctcagtaccttgcagaagccggctggacagctgaaggaagagtggtaggagtgacccagcctcgaagagtggctgctgttacagtgaggagagtagctgaagaaaggggtgcagtgctgggccacgaggtgggctactgcatccgctttgatgactgcacygaccagctggccacgagaattaagtttcttactgatggaatgctggtcagggaaatgatggttgatccgttgttaacaaaatataggctcactgagagcttctctttgattcttagtgtcatcatgctggatgaagcccacgagaggaccttgtacactgacattgccaytggcttgctaaaaaagattcagaaaaagcgaggggatcttcgattgattgtagcttcagccactctggatgcagacaaattccgggatttctttaatcaaaatgaaaccagtgatccagcaagggatacatgtgtgatccttacagtggaagggagaacatttccggtggatatcttttatctacaaagtcctgttccagattatatcaaatcaactgtcgaaactgtggtgaaaattcaccagacagagggagacggagacgttttagcatttcttactggccaggaagaggtagaaactgttgtgtcgatgctcatcgagcaggctcgagcactagctcgcactgggatgaagagacacctccgagttctccccatgtatgcaggactgccttcctttgagcaaatgaaagtgtttgaaagggtgtcacgcagtgtcagaaaggtgatagtggccaccaatgtggcagaaacctctatcacaatcagcggcattgtgtatgtgatcgactgtggctttgtgaaactccgagcctacaatcccaggacagctattgaatgcttggtggtggtgccagtctcccaggcatcagctaatcagcgagcaggacgtggtggtcgtagtcgctcgggaaaatgttatcgcctttatacagaggaagcctttgacaagttgcctcagtctacggttcctgagatgcagcgtagtaatttggcacctgtcatcctgcagctgaaagcactaggaattgacaatgtcctcaggttccacttcatgtcgccccctccagcacagtcgatggttcaagccttggagttactgtatgctctgggaggtctggacaaagactgtcgyctaactgaaccgcttggyatgagaattgcagagtttcctttgaatcccatgtttgccaaaatgctgcttgaatcaggaaacttcggctgttctcaggaaattctaagcatcgctgccatgatgcagatccagaatatctttgtggtccccccaaaccagaagtctcacgcaattcgagtgcaccgtaaatttgctgtggaggagggcgaccacctcactatgctcaatatatatgaagcatttatcaaacacaataaggactctaaatggtgtcaggaacatttcctgaattacaagggtcttgtcagagctgcgactgtaagagaacaattgaaaaagcttcttgtcaagtttcaagtgcccaggaagtctagtgaaggtgacccggatctggttctgaggtgcattgtctccggcttcttcgccaatgcagcgaggtttcattctactggagcttataggaccatccgtgatgaccatgagctgcacatacaccctgygtcagtcctctatgcagagaagccgcctcgctgggtcatctataacgaagttatacagacctccaagtactacatgagagatgtgactgccattgaatcggcctggctgttggagctggctccacacttttatcaacaaggaacggtargaatgaac

SEQ ID NO: 6358 - DNA, 1896 bp, Homo sapiens
tctccaaggggtaagtattattacccctagttccacgtgtggaaaatgaattccaatctggtcttacattaaaaaccattgatgtggcgcctgcctcgcgcactgtgtgtgcacgctgcaaagaccagcaagctccttggaccttggagcaggcctgctgccttcatgtccactctcctcatcaatcagccccagtatgcatggctgaaagaggtggggctccgagaggaaaatgagggcgtgtataatggaagctggggaggccggggagaggttattatgacctgttgctctgctaacaactagccaatagcaagagtccgacaggccagtgtggcagactatgaagaaactgtaaagaaagcaacagaagcatggaaaatctgggcagatattcctgctccaaaacgaggagaaatagtaagacagattgacgatgccttgtrggagaagatccaagtactaggaagcttggtgtctttggagatggggaaaatcttagtggaaggtgtgggtgaagttcaggagtatgtggatatctgtgactatgctgttggtttatcaaggatgattggaggacctatcttgccttctgaaagacctggccatgcactgattgagcagtggaatcctgtaggcctggttggaatcatcacggcattcaatttccctgtggcagtgtatggttggaacaacgccattgtcatgatctgtggaaatgtctgcctctggaaaggagctccaaccacttccctcattagtgtggctgtcacaaagataatagccaaggttctggaggacaacaagctgcttggtgcaatttgttccttgacttgtggtggagcagataccggcacagcaatggccaaagatgaacgagtgaacctgctgtccttcaccgggagcactcaggtgggaaaacagatggccctgatggtgcaggagaggtttgggagaagtttgttggaacttggaggaaacagtaccattattgcctttgaagatgcagacctcagcttagttgttccatcagctctcttcactgctgtgggaatagctggccagargtgtaccactgcgaggcgactgtttgtacatgaaagcatccatcatgaggttgtaaacagacttaaaaaggcctacgcacagatccgagttgggaacccatgggaccctaatgttctctatgggccactccacaccaagcaggcagtgagcatgtttcttggagcagcggaagaagcaaagaaagaaggtagcacagtggtctatgggggcaaggttatggatcgccctggaaattatgtagaaccgacaattgtgacaggtcttgcccacgatgcatccattgcacacacagagacttttgctccgattctgtatgtctttaaattcaagaatgaagaagaggtctttgcatggaatactgaagtaaaacagagactttcaagtagcaactttaccaaagatctgggcagaatctttcgctggcttggacctaaaggatcagactgtggcactgtaaatgtcaacattccaacaagtggggctgagattggaggtgcctttgkaggagaaaagcacactggtggtggcagggaatctggcagtgatgcctggaaacagtacatgagaaggtctacttgtactatcaactacagtaaagactttcctctggcccaaggaatcaagtttcagtaaaggtgttttagatgaacatcccttaatttgaggtgttcggcagctgtttttgaagaagacaaagaarattaaagttttccttgaataaatgcattattatgactgtgacagtgactaatccccctatgaccccaaagccctgattaaatcaaaagactccttttttaaaaatcaaaataaaattgttacaacatt

SEQ ID NO: 6359 - DNA, 5243 bp, Homo sapiens
aagtattacctcctctttctcaacttcaaacaggtgtcttctgcggaggtgcgcatcgggcccatgagactgacgcaggaccctattcagtgcaagacctggaacattaccagtgctacggtataccccattgatttccctcatatacagattttattattcaggtatggttttgctgatctttgcaaaggaagatagtcagagcgatggcttctggtgggcctgcgacagagctggttatagatgcaatattgctcggactccagagtcagcccttgaatgctttcttgataagcatcatgaaattattgtaattgatcayagacaaactcagaacttcgatgcagaagcagtgtgcaggtcgatccgggccacaaatccctccgagcacacggtgatcctcgcagtggtttcgcgagtatcggatgaccatgaagaggcgtcagtccttcctcttctccacgcaggcttcaacaggagatttatggagaatagcagcataattgcttgctataatgaactgattcaaatagaacatggggaagttcgctcccagttcaaattacgggcctgtaattcagtgtttacagcattagatcactgtcatgaagccatagaaataacaagcgatgaccacgtgattcagtatgtcaacccagccttcgaaaggatgatgggctaccacaaaggtgagctcctgggaaaagaactcgctgatctgcccaaaagcgataagaaccgggcagaccttctcgacaccatcaatacatgcatcaagaagggaaaggagtggcagggggtttactatgccagacggaaatccggggacagcatccaacagcacgtgaagatcaccccagtgattggccaaggagggaaaattaggcattttgtctcgctcaagaaactgtgttgtaccactgacaataataagcagattcacaagattcatcgtgattcaggagacaattctcagacagagcctcattcattcagatataagaacaggaggaaagagtccattgacgtgaaatcgrtatcatctcgaggcagtgatgcaccaagcctgcagaatcgtcgctatccgtccatggcgaggatccactccatgaccatcgaggctcccatcacaaaggttataaatataatcaatgcagcccaagaaaacagcccagtcacagtagcggaagccttggacagagttctagagattttacggaccacagaactgtactcccctcagctgggtaccaaagatgaagatccycacaccagtgatcttgttggaggcctgatgactgacggcttgagaagactgtcaggaaacgagtatgtgtttactaagaatgtgcaccagagtcacagtcaccttgcaatgccaataaccatcaatgatgttcccccttgtatctctcaattacttgataatgaggagagttgggacttcaacatctttgaattggaagccattacgcataaaaggccattggtttatctgggcttaaaggtcttctctcggtttggagtatgtgartttttaaactgttctgaaaccactcttcgggcctggttccaagtgatcgaagccaactaccactcttccaatgcctaccacaactccacccatgctgccgacgtcctgcacgccaccgctttctttcttggaaaggaaagagtaaagggaagcctcgatcagttggatgaggtggcagccctcattgctgccacagtccatgacgtggatcacccgggaaggaccaactctttcctctgcaatgcaggcagtgagcttgctgtgctctacaatgacactgctgttctggagagtcaccacaccgccctggccttccagctcacggtcaaggacaccaaatgcaacattttcaagaatattgacaggaaccattatcgaacgctgcgccaggctattattgacatggttttggcaacagagatgacaaaacactttgaacatgtgaataagtttgtgaacagcatcaacaagccaatggcagctgagattgaaggcagcgactgtgaatgcaaccctgctgggaagaacttccctgaaaaccaaatcctgatcaaacgcatgatgattaagtgtgctgacgtggccaacccatgccgccccttggacctgtgcattgaatgggctgggaggatctctgaggagtattttgcacagactgatgaagagaagagacagggactacctgtggtgatgccagtgtttgaccggaatacctgtagcatccccaagtctcagatctctttcattgactacttcataacagacatgtttgatgcttgggatgcctttgcacatctgccagccctgatgcaacatttggctgacaactacaaacactggaagacactagatgacctraagtgcaaaagtttgaggcttccatctgacagctaaagccaagccacagagggggcctcttgaccgacaaaggacactgtgaatcacagtagcgtaaayragaggccttcctttctaatgacaatgacaggtattggtgaaggagctaatgtttaatatttgaccttgaatcattcaagtccccaaatttcattcttagaaagttatgttccatgaagaaaaatatatgttcttttgaatacttaatgacagaacaaatacttggcaaactcctttgctctgctgtcatcctgtgtacccttgtcaatccatggagctggttcactgtaactagcaggccacaggaagcaaagccttggtgcctgtgagctcatctcccaggatggtgactaagtagcttagctagtgatcagctcatcctttaccataaaagtcatcattgctgtttagcttgactgttttcctcaagaacrtcgatctgaaggattcataaggagcttatctgaacagatttatctaagaaaaaaaaaaaamgacataaaataagygaarcaactaggaccaaattacagataaactagttagcttcacagcctctatggctacatggttcttctggccgatggtatgacacctaagttagaacacagccttggctggtgggtgccctctctagactggtatcagcagcctgtgtaacccctttcctgtaaaaggggttcatcttaacaaagtcatccatgatgagggaaaaagtggcatttcatttttggggaatccatgagcttcctttatttctggctcacagaggcagccacgaggcactacaccaagtattatataaaagccattaaatttgaatgcccttggacaagcttttcttaaaaaaaaaaaaaaagtttatatacatgtttaaaatttttattaaaatccaaattttctgggtgtaagcccatgcagtatgttgtgccatgcaccatctatacgtaatattttgggaggggataggggaagtttcaaggttcagatatttttaaccagtctatatttgaaatcatgccattagctttaacaatgttaaaattgtgtggtgtaaatatatcagaaaataggcatatggggaggcagtaaatactattttaagctattaattgtatgctaaaagcttctaaagcacaagtgcatatttttatactgctcttttcacaactccctgtgatctacataaagtcagactcgagattttcctttctcttttaccagctgatccttcctatgtattataaatattagactccgtaaacaaacttcatttttctttctctgtacttcatgctgcatttttaaaaggtataaacaaacagagactgaattaattgaatcagtaattacttttttccaatacaaattggaatgcagaatacttggaacttgtacatggggaaaaaatgacttatcactacataatgtgccaatgtttttttctatgttttgtaccaaaaatggaaaaatatgacaattccatgcaaagaaatgtatctaaattatttttgttagatgataagagaacttgcttggtcaggacagcagccagctttgtattgtaatgctatattatgtaaawgtgatgaaaatgtttttgtgaagtacttgtaactaaattcctacagccatttttcactcccaacagctgtttttattttacctctttggcctaaagttttcataatttcaaatttggggtttagtgtcctttatttcatgagtcacacactttgttttcagagcacattaaaatcaggatgccagaatcccatattaaggacctagctaacttgcctaggcttcagaagcttgcttgaggcaaggacaatctttttctgatcatctcactttcagttctatttggtaagtaacatttatcaggtgtcagacatcttctatatgaaatatttacagcttactcagttttatgtcaaatttcttgttaacttcaaactttttattagtaatgtgcaaatgtttaaaaatgctttaagacagctaggtactaaagcgtcaacaatttctgctctttaccagtgtaatctacggtataatcttctggcctgcgaactagtctattcttccacatagtcaacttgttagaaatacaggctttcagatgatatgtgtatcagatagtttatattatataaactattataactgcctcttacacagagttgtttacttaaatgtcatgtgctgaggrgggccgtattaggaaaatgcaacactctctaataatttccgtgactagtaagagaaggaagccagttataaaacactgctggaccagaatgaccctataatttcctaagatcattctttatttctaatttaagatttttaaatttacttgccctccatgtcaggactggttagcattctgggcaaaaaaaaaacaagcctgtcagttcactcagaacctactcagctttagagagagaaacagaagggatgatcttgtgcccttgcgctatgtgaatatagccagagactgaggtaataaatatattttaaaataaaaatgacaagggatttgtacactgtaacactatgtagtgttacttctgctgttgcaagtatcttaactgttgaaagctaaactcaggaaatggagaaaatgtacataatatacattgacccattattttattctaaattgaaagtccaacttttagcagcagtctacctgcaactactgaacaccatcaggtttgagtccctaccagaatctcccatcatactgttatcccccatctctgtgaccttagggcatgcatgaaaacaaaagcaatctagtccc

SEQ ID NO: 6360 - DNA, 2904 bp, Homo sapiens
agcgagggagggaggggacgggcgcagaccgaaagtggggaaagaagagcggcgtgatctactgccgggactcggacgagtccagctcgccccgccagaccaccagcgtgtcgcagggcccggcggcacccctgcccggcctcttcgtccagaccgacgccgccgacgccatccccccgagccgcgcgtcgggaccccccagcgtagcccgcgtccgcagggcccgcaccgagctgggcagcggtagcagcgcgggttccgcagcccccgccgcgaccaccagcaggggccggaggcgccactgctgcagcagcgccgaggccgagactcagacctgctacaccagcgtgaagcaggtgtcttctgcggaggtgcgcatcgggcccatgagactgacgcaggaccctattcaggttttgctgatctttgcaaaggaagatagtcagagcgatggcttctggtgggcctgcgacagagctggttatagatgcaatattgctcggactccagagtcagcccttgaatgctttcttgataagcatcatgaaattattgtaattgatcayagacaaactcagaacttcgatgcagaagcagtgtgcaggtcgatccgggccacaaatccctccgagcacacggtgatcctcgcagtggtttcgcgagtatcggatgaccatgaagaggcgtcagtccttcctcttctccacgcaggcttcaacaggagatttatggagaatagcagcataattgcttgctataatgaactgattcaaatagaacatggggaagttcgctcccagttcaaattacgggcctgtaattcagtgtttacagcattagatcactgtcatgaagccatagaaataacaagcgatgaccacgtgattcagtatgtcaacccagccttcgaaaggatgatgggctaccacaaaggtgagctcctgggaaaagaactcgctgatctgcccaaaagcgataagaaccgggcagaccttctcgacaccatcaatacatgcatcaagaagggaaaggagtggcagggggtttactatgccagacggaaatccggggacagcatccaacagcacgtgaagatcaccccagtgattggccaaggagggaaaattaggcattttgtctcgctcaagaaactgtgttgtaccactgacaataataagcagattcacaagattcatcgtgattcaggagacaattctcagacagagcctcattcattcagatataagaacaggaggaaagagtccattgacgtgaaatcgrtatcatctcgaggcagtgatgcaccaagcctgcagaatcgtcgctatccgtccatggcgaggatccactccatgaccatcgaggctcccatcacaaaggttataaatataatcaatgcagcccaagaaaacagcccagtcacagtagcggaagccttggacagagttctagagattttacggaccacagaactgtactcccctcagctgggtaccaaagatgaagatccycacaccagtgatcttgttggaggcctgatgactgacggcttgagaagactgtcaggaaacgagtatgtgtttactaagaatgtgcaccagagtcacagtcaccttgcaatgccaataaccatcaatgatgttcccccttgtatctctcaattacttgataatgaggagagttgggacttcaacatctttgaattggaagccattacgcataaaaggccattggtttatctgggcttaaaggtcttctctcggtttggagtatgtgartttttaaactgttctgaaaccactcttcgggcctggttccaagtgatcgaagccaactaccactcttccaatgcctaccacaactccacccatgctgccgacgtcctgcacgccaccgctttctttcttggaaaggaaagagtaaagggaagcctcgatcagttggatgaggtggcagccctcattgctgccacagtccatgacgtggatcacccgggaaggaccaactctttcctctgcaatgcaggcagtgagcttgctgtgctctacaatgacactgctgttctggagagtcaccacaccgccctggccttccagctcacggtcaaggacaccaaatgcaacattttcaagaatattgacaggaaccattatcgaacgctgcgccaggctattattgacatggttttggcaacagagatgacaaaacactttgaacatgtgaataagtttgtgaacagcatcaacaagccaatggcagctgagattgaaggcagcgactgtgaatgcaaccctgctgggaagaacttccctgaaaaccaaatcctgatcaaacgcatgatgattaagtgtgctgacgtggccaacccatgccgccccttggacctgtgcattgaatgggctgggaggatctctgaggagtattttgcacagactgatgaagagaagagacagggactacctgtggtgatgccagtgtttgaccggaatacctgtagcatccccaagtctcagatctctttcattgactacttcataacagacatgtttgatgcttgggatgcctttgcacatctgccagccctgatgcaacatttggctgacaactacaaacactggaagacactagatgacctraagtgcaaaagtttgaggcttccatctgacagctaaagccttcctttctaatgacaatgacaggtattggtgaaggagctaatgtttaatatttgaccttgaatcattcaagtccccaaatttcattcttagaaagttatgttccatgaagaaaaatatatgttcttttgaatacttaatgacagaacaaatacttggcaaactcctttgctctgctgtcatcctgtgtacccttgtcaatccatggagctggttcactgtaactagc

SEQ ID NO: 6361 - DNA, 2201 bp, Homo sapiens
gcaatcgccgcagccgcccccgccgtcggccgccgcaccccaagcgactgcccaaactaagcctccgtggctgggtacgggagcgctttggggacaaaaattctccctcaactgtggtctgcattccttcggcccgtgggcygatctggggcgggaagtattagcgtctcagttgcgctgcagccggggaggaaggaggaggccgagcctggggcggagtttgggctgactggggctggaccgggcaagacgccgccgctgcccggatgttgcgatggctgatcgggggaggccgagaaccgcagggactggccgagaaatctcctttacagacaataggtgaagaacaaacccagaatccctacactgaactgctagtactgaaggctcatcatgatattgtacgatttctggtacagttagatgactacagatttgcatctgctgrtgatgatggaattgtagttgtgtggaatgcccagacaggggaaaaacttttagaactgaatggacacactcaaaagataacagctattattacatttccttccttggaatcttgtgaagagaaaaatcaactcatcttgacagcctctgctgatagaacagttattgtgtgggatggtgatactaccagacaagttcagagaatatcatgcttccagtctactgtaaagtgtttaactgttcttcagagactagatgtttggctttctggtgggaatgacctgtgtgtrtggaaccgaaaattagatctcctgtgtaagactagccacctttctgatacaggtattagtgctttggttgaaatacctaagaactgtgttgtggcagcagttggcaaagaactgataattttcaggttggtagcacccacagaaggatcactagaatgggatattcttgaagttaagcgcctccttgatcaccaggataatattctctcattgattaatgtcaatgatttgagttttgtcaccggctcccacgtcggagagctgatcatctgggatgccctggactggaccatgcaggcctatgaacgcaacttctgggacccatctccacaactggacacccaacaagaaataaaactctgtcaaaaatcaaatgacatttctattcatcatttcacatgtgatgaagagaatgtatttgctgcagttggaaggggtttatacgtgtatagccttcaaatgaagcgtgtgattgcctgccagaaaactgcacatgactccaatgtcctgcacrttgccagacttccaaacaggcagttaatctcatgctcagaagatggcagtgtacrcatttgggagttaagagaaaaacagcagcttgcagctgagcctgtaccaacaggtttttttaacatgtggggatttggaagagtcagcaaacaagccagccaacctgttaaaaagcagcaagaaaatgctacttcatgttcactggagcttattggagatttgattggacactcatcatctgtggagatgtttctatactttgaagatcatggactagtgacgtgctccgctgatcatctcattattttgtggaaaaatggagagcgagaatytggattgcgcagtttaagattatttcaaaaattagaggagaatggtgacttataccttgctgtctagtttaaggaattaaaaatacacatgcatgaaccttgaacatcaaatatcgggtactactctgaaaaccattaatatattgatcacttaaattggtaattttttttgtcagtccataaaattctrcatgtttaaattttttgtggacctaccaaccaggaacatgttgcttctcaggtcctagtatatcctccaaagaatataccacaagtttttccatttgactttgagctgctgttgaagtgataaatctgttcagataagctccttatgaatccttcagatcgaygttcttgaggaaaacagtcaagctaaacagcaatgatgacttttatgagttttcctccaacgacagaaaaacactgcagtaagctttggcagcgtgtcctttgaagaggcagagactcgtttatcyagctatcaaaaatccatcaagtcttctgcacacaagcttctgtgccagctgctggggatgcaaagaatgcaccccaccccacttggccacaaaaagctgacagccacatttttaaaaatatattttgtttacctttaggctca

SEQ ID NO: 6362 - DNA, 7478 bp, Homo sapiens
atgacggacaacatcccgctgcagccggtgcgccagaagaagcggatggacagcaggccccgcgccgggtgctgcgagtggctgagatgctgcggtggaggggaggccaggccccgcactgtctggctggggcaccccgagaagagagaccagaggtatcctcggaatgtcatcaacaatcagaagtacaatttcttcacctttcttcctggggtgctgttcaaccagttcaaatactttttcaacctctatttcttacttcttgcctgctctcagtttgttcccgaaatgagacttggtgcactctatacctactgggttcccctgggcttcgtgctggccgtcactgtcatccgtgaggcggtggaggagatccgatgctacgtgcgggacaaggaagtcaactcccaggtctacagccggctcacagcacgaggtactgttgtgggtgttgttctttacactggcagagaactccggagtgtcatgaatacctcaaatccccgaagtaagatcggcctgttcgacttggaagtgaactgcctcaccaagatcctctttggtgccctggtggtggtctcgctggtcatggttgcccttcagcactttgcaggccgttggtacctgcagatcatccgcttcctcctcttgttttccaacatcatccccattagtttgcgygtgaacctggacatgggcaagatcgtgtacagctgggtgattcgaagggactcraaaatccccgggaccgtggttcgctccagcacgattcctgagcagctgggcaggatttcgtacttactcacagacaagacaggcactcttacccagaacgagatgattttcaaacggctccatctcggaacagtagcctacggcctcgactcaatggacgaagtacaaagccacattttcagcatttacacccagcaatcccaggacccaccggctcagaagggcccaacgctcaccactaaggtccggcggaccatgagcagccgcgtgcacgaagccgtgaaggccatcgcgctctgccacaacgtgactcccgtgtatgagtccaacggtgtgactgatcaggctgaggcygagaagcagtacgaagactcctgccgcgtataccaggcatcyagccccgatgaggtggccctggtacagtggacggaaagtgtgggcttaaccctggtgggccgagaccagtcttccatgcagctgaggacccctggcgaccagatcctgaacttcaccatcctacagatcttccctttcacctatgaaagcaaacgtatgggcatcatcgtgcgggatgaatcaactggagaaattacgttttacatgaagggagcagatgtggtcatggctggcattgtgcagtacaatgactggttggaggaagagtgtggcaacatggcccgagaagggctgcgggtgctcgtggtggcaaagaagtctcttgcagaggagcagtatcaggactttgaagcccgctacgtccaggccaagctgagtgtgcacgaccgctccctcaaagtggccacggtgatcgagagcctggagatggagatggaactgctgtgcctgacgggcgtggaggaccagctgcaggcagatgtgcggcccacgctggagaccctgaggaatgctggcatcaaggtttggatgctgacaggggacaagctggagacagctacgtgcacagcgaagaatgcacatctggtgaccagaaaccaagacatccacgtttttcggctggtgacyaaccgcggggaggctcacctcgagctgaacgccttccgcaggaagcatgattgtgccctggtcatctcgggagactccctggaggtttgcctcaagtactatgagtacgagttcatggagctggcctgccagtgcccggccgtagtctgctgccgatgtgcccccacccagaaggcccagatcgtgcgcctgcttcaggagcgcacgggcaagctcacctgtgcagtaggggacggaggcaatgacgtcagcatgattcaggaatctgactgcggcgtgggagtggaaggaaaggaaggaaaacaggcttcgttggctgcagacttctccatcactcaatttaagcatcttggccggttgcttatggtgcatggccggaacagctacaagcggtcagccgccctcagccagttcgtgattcacaggagcctctgtatcagcaccatgcaggctgtcttttcctccgtgttttactttgcctccgtccctctctatcaaggattcctcatcattgggtactccacaatttacaccatgtttcctgtgttttctctggtcctggacaaagatgtcaaatcggaagttgccatgctgtatcctgagctctacaaggatcttctcaagggacggccgttgtcctacaagacattcttaatatgggttttgattagcatctatcaagggagcaccatcatgtacggggcgctgctgctgtttgagtcggagttcgtgcacatcgtggccatctccttcacctcgctgatcctcaccgagctgctcatggtggcgctgaccatccagacctggcactggctcatgacagtggcggagctgctcagcctggcctgctacatcgcctccctggtgttcttacacgarttcatcgatgtgtacttcatcgccaccttgtcattcttgtggaaagtctccgtcatcactctggtcagctgcctccccctctatgtcctcaagtacctgcgaagacggttctctccccccagctactcaaagctcacatcataggccgtgcgttcgctggagggggccctggtcttggcgcttccctgatggacagagctcaagttccatttatattaaccgccacctgtggattttgcagtaattgctaacacatgcagttttaatgggaagyggctctgcgcctaaacggagtcctaacgctgcatcaacgggagggagggtcctgaaagagacccatctgggcctgtctgaacccctcgttcttcatgtttaggtgaatatgaatatgttaaagctggtggctcagctgggagatttatatgggtcactgtgcgagcttccttatgacttgaattttgttgtcacatgataaaagtttctgtgtagctgaaggttgtagaaggcttgtgtgtgtgtgtgtgtgtgtgtgtgtgtgtgtgtgtgtttttaaagagtcctaatgtgtatgtactctttatgtctttcttgctcttacaaagaggtgtcagaaaaatagaaagctcttggtgtcggtttgggaggaaaagacagtgacatttggtaaaaagttatccacacaataatctccattcggaaatgctcagtatcgtctccagccagccctgcttatccaggttacactggattcctgggatcgtaaccagtaaatgagaggagagggagagagagtgtcctaagtccaatctgttatccttgatctgattcagcatccatagtgtgtgagttaacttcacctgccacctcgtaaaagaatttcagaggtgtgatcccgctttattgggacctggtaacaatcacaaagccagtggctgtttgagaaggacctcagacattttcagcagagttgttttagcaggaaacgtgccactgaatggcccctaaatgtgtcgacagtgtgataagagactcaactaattctttaggcaacatggcagatgtgactcagatcctccaagaccaaagcggaaaggtcagggggctgggactcttctcttccatagaagcctgtttcctgttaggaggcataatggaagatgaccccacaaaggcagaggcatctttcggaacaacactggtggcagctttcagaacaaggaacccctggtgggaggacgcccaagctacagcgttgggatctgggatctgttccactgccggcagatttcaaggggaacttgctgaaaggcagccagtggtgaagatttctcccctcccaggatggactacatgccrgcatgtttcttataaagctgtggctgcttgtttcagaggaagggagtttgcagtcgcgggacgtggtagagcaaggcattcttgggttttcaagttgcttcttgcagaagccacatatgcatgccataagggttaagttggtggatctttaagagccaagtgtggttgagatcttggatttgcgtttacttcttgatgaatacatatccttcaaaccctctgcctggcgctacttctgtgtgcttcagagakgtacatcacagcctggtttctgatgcctactaactcctgctcttggagagctggagacacgaggatcagatagtcccttgcctttggagcactcttgataagcttttgtattttgtgttgtccttttaaaatgttctagaatgactttacgttgcaggtactggttaattggctgttgacaccacatctattttgtcttatgattctgcagttttgcagtacttttctctatctgattcagccatttctgccagagggaaaaggtcggcagaaaagatgtattgagtgaatagttaaggataggatctttgtccaaaaatttcagaaagattgagcaaatctgacgtattcattgagtgagtttctgtgttttcaaaggtggaggagaaatttgtgctggaagtttttaagcctccgttttcttggaaatcagtctgtaacactggcaagtcttaagatagtcccrtttagactttgcagatgctgaacctggctctgtaacgctgggaagtcttaagatagtcctgtttagactttgcaaaccctgtacctggctttgctcggagattcgggatgctggctcctgcaggcagggcgtgtgggagcctcgtcagaaagttttagaggtttccagcagaagcagaatgaagatggtctccctggccttttccttaattctcaattttgattgaggtgcacaagttgacttttaaagccaacgcttaagatactgattgacatcttcaagggagaatgctcccaggaggggctgaagaagccatagttggaagtggaaggtactcgtcagtgttcwccacaaacctttttactctgttgtctcagccgcactggggcggaggcggtcaagggtgagaagtaccgacactcaagtgcaaactgccacgtcgttggcccatcccatcagtgggcagctggctgacgccattcactggacggtccctgaacacctaggaatgcacacaccgtgcttctcagacactggagacgcaaaggcaggaggatgcagtccggtgagaggacacgatctttacctgcacaatcagactgtaagcccagcagagaaccccaggggcgcctgggtacttctcggaggtcatcttagttgtggtggggaagacaaagaaataagcaaacaagaaactagagttactatacaagaaactctcctgagtttgtaaaccttaagcataaggattcagttgacctttttcttggttcatcaatctggaaagaacttacataaagcgccattgacactgtcacctgggagctccatgggccgtaagtctttgacagccaatttaatttgaggtcagagggccttgaggtacacagtcagcactgtttgaacacttttcctgaaagcaaaactcacagctccctgcgccctctgacaacactagctatttctgccagagtaagaacttctattactattttattattgttcatatgtcttttgatgatggttgtgtgacagggggaagcaggatctatttggtttcttccccctccccccaccccttcctttttgtctctctttttttttytctaagaaaatcaccagactagtttttccatcttgagtaatttcttatgtgggacagttttgatcctcattttgaaagcatgcgtgygcacatgtgtgttgcctgtggtgccaggtgagacaggtggcactaactccagctgcttggaaggcatcccaagggcgcatcttaaagttggagcagacctcccttttccagcccctggggccattagaccacgtgctggaactagcattgtaaaattcccatcccagttccactcccctgaagtgaaacccttttttttttgtgacagtaaatcttaaaaatcattgtctctttatgaacatttcctcagtttcttctctgctgaaaatgtaagccatgctactttttaatgtattttgaattttgtgctcattggaaattgatatgctaatgcctcccccaccccccgccagacttttctttttatactttgtcttgtttttactggggtaggctgggcatgcgtgcgtgcctttagggcagcattttaaacctttgccaaaattgcaaatgggacatgtacattcttctgctccatcctacttaaacacctatcagctatttttatctttaaccttttctgtatgtttgaagtgtgtggggggtgtgtgtgtgtgtgaaagagcgagagaatgatgtcatctaaagttttttgaagaattatttggttttcattgcattaaaattctatcactcccagctttgttttcatttaaaaaaatatacaaagagctttgtaaatacaacacattttatttctcccccttcttttaatgtacagcttttttgccacttatatatacttaaaatattcccatgaattatgtccagttcttcttggaaaaaaatttggttttgaatgaacctgcaaagcatcctgcagcgtgagcagctcctccacctggagctccgaagcatcttctcaggccaaagcggcattacccgtgaatctgtcttctccgccacrgcatggtttgaggcgcagtctgttaatatagctgggccatgtcagtgactgttgtgtttgtggggtcaggtggggggcatggtatttgcaaaaaaaacaaattatggctaatttattattttgttgcagtggggttaactgtaaactcatgtaagagtctgtgatttcctcaytggttgatctctctctctgtaatcctcattgcaaattttcaccaggacagcgttttttgattagaggggagctctggcacagtatgctttaatttagcaggaacttccagatgatttaaattctcgatgctgtgatgacacacatatgatctttcgtgtttytgagcgactctactttcattgtttgccagcgtggctcgttgctgttgcccaataaagcttgtgtacgttctgccttgggggattattttaatttgtacagaaacatgaattctggtatcaaaatgaggactttytattataacgctcctattttttctttatttcatggtacatgaaatgtaaagaaaactctttccagttcagaaaattattttgattttggcaaaaaaaaccccaaatcaatgcatgttatttattattttgtactattgtccatcccagacgtgtcagaatttcaaaaggtgatagatataaatggaaaataagatgaaa

SEQ ID NO: 6363 - DNA, 7077 bp, Homo sapiens
atgacggacaacatcccgctgcagccggtgcgccagaagaagcggatggacagcaggccccgcgccgggtgctgcgagtggctgagatgctgcggtggaggggaggccaggccccgcactgtctggctggggcaccccgagaagagagaccagaggtatcctcggaatgtcatcaacaatcagaagtacaatttcttcacctttcttcctggggtgctgttcaaccagttcaaatactttttcaacctctatttcttacttcttgcctgctctcagtttgttcccgaaatgagacttggtgcactctatacctactgggttcccctgggcttcgtgctggccgtcactgtcatccgtgaggcggtggaggagatccgatgctacgtgcgggacaaggaagtcaactcccaggtctacagccggctcacagcacgaggcacagtgaaggtgaagagttctaacatccaagttggagaccttatcatcgttgaaaagaaccagcgggtccctgccgacatgatcttcctgaggacatcagaaaaaaacgggtcatgcttcttgcggacggatcagctggatggggagacggactggaagctgcggcttcccgtggcctgcacrcagaggctycccacggccgccgaccttcttcagattcgatcgtatgtgtaygcagaagagccaaatattgacattcacaacttcgtgggaacttttacccgagaagacagcgaccccccgatcagcgagagcctgagcatagagaacacgctgtgggctggcactgtggtcgcatcaggtactgttgtgggtgttgttctttacactggcagagaactccggagtgtcatgaatacctcaaatccccgaagtaagatcggcctgttcgacttggaagtgaactgcctcaccaagatcctctttggtgccctggtggtggtctcgctggtcatggttgcccttcagcactttgcaggccgttggtacctgcagatcatccgcttcctcctcttgttttccaacatcatccccattagtttgcgygtgaacctggacatgggcaagatcgtgtacagctgggtgattcgaagggactcraaaatccccgggaccgtggttcgctccagcacgattcctgagcagctgggcaggatttcgtacttactcacagacaagacaggcactcttacccagaacgagatgattttcaaacggctccatctcggaacagtagcctacggcctcgactcaatggacgaagtacaaagccacattttcagcatttacacccagcaatcccaggacccaccggctcagaagggcccaacgctcaccactaaggtccggcggaccatgagcagccgcgtgcacgaagccgtgaaggccatcgcgctctgccacaacgtgactcccgtgtatgagtccaacggtgtgactgatcaggctgaggcygagaagcagtacgaagactcctgccgcgtataccaggcatcyagccccgatgaggtggccctggtacagtggacggaaagtgtgggcttaaccctggtgggccgagaccagtcttccatgcagctgaggacccctggcgaccagatcctgaacttcaccatcctacagatcttccctttcacctatgaaagcaaacgtatgggcatcatcgtgcgggatgaatcaactggagaaattacgttttacatgaagggagcagatgtggtcatggctggcattgtgcagtacaatgactggttggaggaagagtgtggcaacatggcccgagaagggctgcgggtgctcgtggtggcaaagaagtctcttgcagaggagcagtatcaggactttgaagcccgctacgtccaggccaagctgagtgtgcacgaccgctccctcaaagtggccacggtgatcgagagcctggagatggagatggaactgctgtgcctgacgggcgtggaggaccagctgcaggcagatgtgcggcccacgctggagaccctgaggaatgctggcatcaaggtttggatgctgacaggggacaagctggagacagctacgtgcacagcgaagaatgcacatctggtgaccagaaaccaagacatccacgtttttcggctggtgacyaaccgcggggaggctcacctcgagctgaacgccttccgcaggaagcatgattgtgccctggtcatctcgggagactccctggaggtttgcctcaagtactatgagtacgagttcatggagctggcctgccagtgcccggccgtagtctgctgccgatgtgcccccacccagaaggcccagatcgtgcgcctgcttcaggagcgcacgggcaagctcacctgtgcagtaggggacggaggcaatgacgtcagcatgattcaggaatctgactgcggcgtgggagtggaaggaaaggaaggaaaacaggcttcgttggctgcagacttctccatcactcaatttaagcatcttggccggttgcttatggtgcatggccggaacagctacaagcggtcagccgccctcagccagttcgtgattcacaggagcctctgtatcagcaccatgcaggctgtcttttcctccgtgttttactttgcctccgtccctctctatcaaggattcctcatcattgggtactccacaatttacaccatgtttcctgtgttttctctggtcctggacaaagatgtcaaatcggaagttgccatgctgtatcctgagctctacaaggatcttctcaagggacggccgttgtcctacaagacattcttaatatgggttttgattagcatctatcaagggagcaccatcatgtacggggcgctgctgctgtttgagtcggagttcgtgcacatcgtggccatctccttcacctcgctgatcctcaccgagctgctcatggtggcgctgaccatccagacctggcactggctcatgacagtggcggagctgctcagcctggcctgctacatcgcctccctggtgttcttacacgarttcatcgatgtgtacttcatcgccaccttgtcattcttgtggaaagtctccgtcatcactctggtcagctgcctccccctctatgtcctcaagtacctgcgaagacggttctctccccccagctactcaaagctcacatcataggccgtgcgttcgctggagggggccctggtcttggcgcttccctgatggacagagctcaagttccatttatattaaccgccacctgtggattttgcagtaattgctaacacatgcagttttaatgggaagyggctctgcgcctaaacggagtcctaacgctgcatcaacgggagggagggtcctgaaagagacccatctgggcctgtctgaacccctcgttcttcatgtttaggtgaatatgaatatgttaaagctggtggctcagctgggagatttatatgggtcactgtgcgagcttccttatgacttgaattttgttgtcacatgataaaagtttctgtgtagctgaaggttgtagaaggcttgtgtgtgtgtgtgtgtgtgtgtgtgtgtgtgtgtgtgtttttaaagagtcctaatgtgtatgtactctttatgtctttcttgctcttacaaagaggtgtcagaaaaatagaaagctcttggtgtcggtttgggaggaaaagacagtgacatttggtaaaaagttatccacacaataatctccattcggaaatgctcagtatcgtctccagccagccctgcttatccaggttacactggattcctgggatcgtaaccagtaaatgagaggagagggagagagagtgtcctaagtccaatctgttatccttgatctgattcagcatccatagtgtgtgagttaacttcacctgccacctcgtaaaagaatttcagaggtgtgatcccgctttattgggacctggtaacaatcacaaagccagtggctgtttgagaaggacctcagacattttcagcagagttgttttagcaggaaacgtgccactgaatggcccctaaatgtgtcgacagtgtgataagagactcaactaattctttaggcaacatggcagatgtgactcagatcctccaagaccaaagcggaaaggtcagggggctgggactcttctcttccatagaagcctgtttcctgttaggaggcataatggaagatgaccccacaaaggcagaggcatctttcggaacaacactggtggcagctttcagaacaaggaacccctggtgggaggacgcccaagctacagcgttgggatctgggatctgttccactgccggcagatttcaaggggaacttgctgaaaggcagccagtggtgaagatttctcccctcccaggatggactacatgccrgcatgtttcttataaagctgtggctgcttgtttcagaggaagggagtttgcagtcgcgggacgtggtagagcaaggcattcttgggttttcaagttgcttcttgcagaagccacatatgcatgccataagggttaagttggtggatctttaagagccaagtgtggttgagatcttggatttgcgtttacttcttgatgaatacatatccttcaaaccctctgcctggcgctacttctgtgtgcttcagagakgtacatcacagcctggtttctgatgcctactaactcctgctcttggagagctggagacacgaggatcagatagtcccttgcctttggagcactcttgataagcttttgtattttgtgttgtccttttaaaatgttctagaatgactttacgttgcaggtactggttaattggctgttgacaccacatctattttgtcttatgattctgcagttttgcagtacttttctctatctgattcagccatttctgccagagggaaaaggtcggcagaaaagatgtattgagtgaatagttaaggataggatctttgtccaaaaatttcagaaagattgagcaaatctgacgtattcattgagtgagtttctgtgttttcaaaggtggaggagaaatttgtgctggaagtttttaagcctccgttttcttggaaatcagtctgtaacactggcaagtcttaagatagtcccrtttagactttgcagatgctgaacctggctctgtaacgctgggaagtcttaagatagtcctgtttagactttgcaaaccctgtacctggctttgctcggagattcgggatgctggctcctgcaggcagggcgtgtgggagcctcgtcagaaagttttagaggtttccagcagaagcagaatgaagatggtctccctggccttttccttaattctcaattttgattgaggtgcacaagttgacttttaaagccaacgcttaagatactgattgacatcttcaagggagaatgctcccaggaggggctgaagaagccatagttggaagtggaaggtactcgtcagtgttcwccacaaacctttttactctgttgtctcagccgcactggggcggaggcggtcaagggtgagaagtaccgacactcaagtgcaaactgccacgtcgttggcccatcccatcagtgggcagctggctgacgccattcactggacggtccctgaacacctaggaatgcacacaccgtgcttctcagacactggagacgcaaaggcaggaggatgcagtccggtgagaggacacgatctttacctgcacaatcagactgtaagcccagcagagaaccccaggggcgcctgggtacttctcggaggtcatcttagttgtggtggggaagacaaagaaataagcaaacaagaaactagagttactatacaagaaactctcctgagtttgtaaaccttaagcataaggattcagttgacctttttcttggttcatcaatctggaaagaacttacataaagcgccattgacactgtcacctgggagctccatgggccgtaagtctttgacagccaatttaatttgaggtcagagggccttgaggtacacagtcagcactgtttgaacacttttcctgaaagcaaaactcacagctccctgcgccctctgacaacactagctatttctgccagagtaagaacttctattactattttattattgttcatatgtcttttgatgatggttgtgtgacagggggaagcaggatctatttggtttcttccccctccccccaccccccccgccagacttttctttttatactttgtcttgtttttactggggtaggctgggcatgcgtgcgtgcctttagggcagcattttaaacctttgccaaaattgcaaatgggacatgtacattcttctgctccatcctacttaaacacctatcagctatttttatctttaaccttttctgtatgtttgaagtgtgtggggggtgtgtgtgtgtgtgaaagagcgagagaatgatgtcatctaaagttttttgaagaattatttggttttcattgcattaaaattctatcactcccagctttgttttcatttaaaaaaatatacaaagagctttgtaaatacaacacattttatttctcccccttcttttaatgtacagcttttttgccacttatatatacttaaaatattcccatgaattatgtccagttcttcttggaaaaaaatttggttttgaatgaacctgcaaagcatcctgcagcgtgagcagctcctccacctggagctccgaagcatcttctcaggccaaagcggcattacccgtgaatctgtcttctccgccacrgcatggtttgaggcgcagtctgttaatatagctgggccatgtcagtgactgttgtgtttgtggggtcaggtggggggcatggtatttgcaaaaaaaacaaattatggctaatttattattttgttgcagtggggttaactgtaaactcatgtaagagtctgtgatttcctcaytggttgatctctctctctgtaatcctcattgcaaattttcaccaggacagcgttttttgattagaggggagctctggcacagtatgctttaatttagcaggaacttccagatgatttaaattctcactttcattgtttgccagcgtggctcgttgctgttgcccaataaagcttgtgtacgttctgcc

SEQ ID NO: 6364 - DNA, 7841 bp, Homo sapiens
atgacggacaacatcccgctgcagccggtgcgccagaagaagcggatggacagcaggccccgcgccgggtgctgcgagtggctgagatgctgcggtggaggggaggccaggccccgcactgtctggctggggcaccccgagaagagagaccagaggtatcctcggaatgtcatcaacaatcagaagtacaatttcttcacctttcttcctggggtgctgttcaaccagttcaaatactttttcaacctctatttcttacttcttgcctgctctcagtttgttcccgaaatgagacttggtgcactctatacctactgggttcccctgggcttcgtgctggccgtcactgtcatccgtgaggcggtggaggagatccgatgctacgtgcgggacaaggaagtcaactcccaggtctacagccggctcacagcacgaggcacagtgaaggtgaagagttctaacatccaagttggagaccttatcatcgttgaaaagaaccagcgggtccctgccgacatgatcttcctgaggacatcagaaaaaaacgggtcatgcttcttgcggacggatcagctggatggggagacggactggaagctgcggcttcccgtggcctgcacrcagaggctycccacggccgccgaccttcttcagattcgatcgtatgtgtaygcagaagagccaaatattgacattcacaacttcgtgggaacttttacccgagaagacagcgaccccccgatcagcgagagcctgagcatagagaacacgctgtgggctggcactgtggtcgcatcaggtactgttgtgggtgttgttctttacactggcagagaactccggagtgtcatgaatacctcaaatccccgaagtaagatcggcctgttcgacttggaagtgaactgcctcaccaagatcctctttggtgccctggtggtggtctcgctggtcatggttgcccttcagcactttgcaggccgttggtacctgcagatcatccgcttcctcctcttgttttccaacatcatccccattagtttgcgygtgaacctggacatgggcaagatcgtgtacagctgggtgattcgaagggactcraaaatccccgggaccgtggttcgctccagcacgattcctgagcagctgggcaggatttcgtacttactcacagacaagacaggcactcttacccagaacgagatgattttcaaacggctccatctcggaacagtagcctacggcctcgactcaatggacgaagtacaaagccacattttcagcatttacacccagcaatcccaggacccaccggctcagaagggcccaacgctcaccactaaggtccggcggaccatgagcagccgcgtgcacgaagccgtgaaggccatcgcgctctgccacaacgtgactcccgtgtatgagtccaacggtgtgactgatcaggctgaggcygagaagcagtacgaagactcctgccgcgtataccaggcatcyagccccgatgaggtggccctggtacagtggacggaaagtgtgggcttaaccctggtgggccgagaccagtcttccatgcagctgaggacccctggcgaccagatcctgaacttcaccatcctacagatcttccctttcacctatgaaagcaaacgtatgggcatcatcgtgcgggatgaatcaactggagaaattacgttttacatgaagggagcagatgtggtcatggctggcattgtgcagtacaatgactggttggaggaagagtgtggcaacatggcccgagaagggctgcgggtgctcgtggtggcaaagaagtctcttgcagaggagcagtatcaggactttgaagcccgctacgtccaggccaagctgagtgtgcacgaccgctccctcaaagtggccacggtgatcgagagcctggagatggagatggaactgctgtgcctgacgggcgtggaggaccagctgcaggcagatgtgcggcccacgctggagaccctgaggaatgctggcatcaaggtttggatgctgacaggggacaagctggagacagctacgtgcacagcgaagaatgcacatctggtgaccagaaaccaagacatccacgtttttcggctggtgacyaaccgcggggaggctcacctcgagctgaacgccttccgcaggaagcatgattgtgccctggtcatctcgggagactccctggaggtttgcctcaagtactatgagtacgagttcatggagctggcctgccagtgcccggccgtagtctgctgccgatgtgcccccacccagaaggcccagatcgtgcgcctgcttcaggagcgcacgggcaagctcacctgtgcagtaggggacggaggcaatgacgtcagcatgattcaggaatctgactgcggcgtgggagtggaaggaaaggaaggaaaacaggcttcgttggctgcagacttctccatcactcaatttaagcatcttggccggttgcttatggtgcatggccggaacagctacaagcggtcagccgccctcagccagttcgtgattcacaggagcctctgtatcagcaccatgcaggctgtcttttcctccgtgttttactttgcctccgtccctctctatcaaggattcctcatcattgggtactccacaatttacaccatgtttcctgtgttttctctggtcctggacaaagatgtcaaatcggaagttgccatgctgtatcctgagctctacaaggatcttctcaagggacggccgttgtcctacaagacattcttaatatgggttttgattagcatctatcaagggagcaccatcatgtacggggcgctgctgctgtttgagtcggagttcgtgcacatcgtggccatctccttcacctcgctgatcctcaccgagctgctcatggtggcgctgaccatccagacctggcactggctcatgacagtggcggagctgctcagcctggcctgctacatcgcctccctggtgttcttacacgarttcatcgatgtgtacttcatcgccaccttgtcattcttgtggaaagtctccgtcatcactctggtcagctgcctccccctctatgtcctcaagtacctgcgaagacggttctctccccccagctactcaaagctcacatcataggccgtgcgttcgctggagggggccctggtcttggcgcttccctgatggacagagctcaagttccatttatattaaccgccacctgtggattttgcagtaattgctaacacatgcagttttaatgggaagyggctctgcgcctaaacggagtcctaacgctgcatcaacgggagggagggtcctgaaagagacccatctgggcctgtctgaacccctcgttcttcatgtttaggtgaatatgaatatgttaaagctggtggctcagctgggagatttatatgggtcactgtgcgagcttccttatgacttgaattttgttgtcacatgataaaagtttctgtgtagctgaaggttgtagaaggcttgtgtgtgtgtgtgtgtgtgtgtgtgtgtgtgtgtgtgtttttaaagagtcctaatgtgtatgtactctttatgtctttcttgctcttacaaagaggtgtcagaaaaatagaaagctcttggtgtcggtttgggaggaaaagacagtgacatttggtaaaaagttatccacacaataatctccattcggaaatgctcagtatcgtctccagccagccctgcttatccaggttacactggattcctgggatcgtaaccagtaaatgagaggagagggagagagagtgtcctaagtccaatctgttatccttgatctgattcagcatccatagtgtgtgagttaacttcacctgccacctcgtaaaagaatttcagaggtgtgatcccgctttattgggacctggtaacaatcacaaagccagtggctgtttgagaaggacctcagacattttcagcagagttgttttagcaggaaacgtgccactgaatggcccctaaatgtgtcgacagtgtgataagagactcaactaattctttaggcaacatggcagatgtgactcagatcctccaagaccaaagcggaaaggtcagggggctgggactcttctcttccatagaagcctgtttcctgttaggaggcataatggaagatgaccccacaaaggcagaggcatctttcggaacaacactggtggcagctttcagaacaaggaacccctggtgggaggacgcccaagctacagcgttgggatctgggatctgttccactgccggcagatttcaaggggaacttgctgaaaggcagccagtggtgaagatttctcccctcccaggatggactacatgccrgcatgtttcttataaagctgtggctgcttgtttcagaggaagggagtttgcagtcgcgggacgtggtagagcaaggcattcttgggttttcaagttgcttcttgcagaagccacatatgcatgccataagggttaagttggtggatctttaagagccaagtgtggttgagatcttggatttgcgtttacttcttgatgaatacatatccttcaaaccctctgcctggcgctacttctgtgtgcttcagagakgtacatcacagcctggtttctgatgcctactaactcctgctcttggagagctggagacacgaggatcagatagtcccttgcctttggagcactcttgataagcttttgtattttgtgttgtccttttaaaatgttctagaatgactttacgttgcaggtactggttaattggctgttgacaccacatctattttgtcttatgattctgcagttttgcagtacttttctctatctgattcagccatttctgccagagggaaaaggtcggcagaaaagatgtattgagtgaatagttaaggataggatctttgtccaaaaatttcagaaagattgagcaaatctgacgtattcattgagtgagtttctgtgttttcaaaggtggaggagaaatttgtgctggaagtttttaagcctccgttttcttggaaatcagtctgtaacactggcaagtcttaagatagtcccrtttagactttgcagatgctgaacctggctctgtaacgctgggaagtcttaagatagtcctgtttagactttgcaaaccctgtacctggctttgctcggagattcgggatgctggctcctgcaggcagggcgtgtgggagcctcgtcagaaagttttagaggtttccagcagaagcagaatgaagatggtctccctggccttttccttaattctcaattttgattgaggtgcacaagttgacttttaaagccaacgcttaagatactgattgacatcttcaagggagaatgctcccaggaggggctgaagaagccatagttggaagtggaaggtactcgtcagtgttcwccacaaacctttttactctgttgtctcagccgcactggggcggaggcggtcaagggtgagaagtaccgacactcaagtgcaaactgccacgtcgttggcccatcccatcagtgggcagctggctgacgccattcactggacggtccctgaacacctaggaatgcacacaccgtgcttctcagacactggagacgcaaaggcaggaggatgcagtccggtgagaggacacgatctttacctgcacaatcagactgtaagcccagcagagaaccccaggggcgcctgggtacttctcggaggtcatcttagttgtggtggggaagacaaagaaataagcaaacaagaaactagagttactatacaagaaactctcctgagtttgtaaaccttaagcataaggattcagttgacctttttcttggttcatcaatctggaaagaacttacataaagcgccattgacactgtcacctgggagctccatgggccgtaagtctttgacagccaatttaatttgaggtcagagggccttgaggtacacagtcagcactgtttgaacacttttcctgaaagcaaaactcacagctccctgcgccctctgacaacactagctatttctgccagagtaagaacttctattactattttattattgttcatatgtcttttgatgatggttgtgtgacagggggaagcaggatctatttggtttcttccccctccccccaccccttcctttttgtctctctttttttttytctaagaaaatcaccagactagtttttccatcttgagtaatttcttatgtgggacagttttgatcctcattttgaaagcatgcgtgygcacatgtgtgttgcctgtggtgccaggtgagacaggtggcactaactccagctgcttggaaggcatcccaagggcgcatcttaaagttggagcagacctcccttttccagcccctggggccattagaccacgtgctggaactagcattgtaaaattcccatcccagttccactcccctgaagtgaaacccttttttttttgtgacagtaaatcttaaaaatcattgtctctttatgaacatttcctcagtttcttctctgctgaaaatgtaagccatgctactttttaatgtattttgaattttgtgctcattggaaattgatatgctaatgcctcccccaccccccgccagacttttctttttatactttgtcttgtttttactggggtaggctgggcatgcgtgcgtgcctttagggcagcattttaaacctttgccaaaattgcaaatgggacatgtacattcttctgctccatcctacttaaacacctatcagctatttttatctttaaccttttctgtatgtttgaagtgtgtggggggtgtgtgtgtgtgtgaaagagcgagagaatgatgtcatctaaagttttttgaagaattatttggttttcattgcattaaaattctatcactcccagctttgttttcatttaaaaaaatatacaaagagctttgtaaatacaacacattttatttctcccccttcttttaatgtacagcttttttgccacttatatatacttaaaatattcccatgaattatgtccagttcttcttggaaaaaaatttggttttgaatgaacctgcaaagcatcctgcagcgtgagcagctcctccacctggagctccgaagcatcttctcaggccaaagcggcattacccgtgaatctgtcttctccgccacrgcatggtttgaggcgcagtctgttaatatagctgggccatgtcagtgactgttgtgtttgtggggtcaggtggggggcatggtatttgcaaaaaaaacaaattatggctaatttattattttgttgcagtggggttaactgtaaactcatgtaagagtctgtgatttcctcaytggttgatctctctctctgtaatcctcattgcaaattttcaccaggacagcgttttttgattagaggggagctctggcacagtatgctttaatttagcaggaacttccagatgatttaaattctcgatgctgtgatgacacacatatgatctttcgtgtttytgagcgactctactttcattgtttgccagcgtggctcgttgctgttgcccaataaagcttgtgtacgttctgccttgggggattattttaatttgtacagaaacatgaattctggtatcaaaatgaggactttytattataacgctcctattttttctttatttcatggtacatgaaatgtaaagaaaactctttccagttcagaaaattattttgattttggcaaaaaaaaccccaaatcaatgcatgttatttattattttgtactattgtccatcccagacgtgtcagaatttcaaaaggtgatagatataaatggaaaataagatgaaa

SEQ ID NO: 6365 - DNA, 6714 bp, Homo sapiens
atgacggacaacatcccgctgcagccggtgcgccagaagaagcggatggacagcaggccccgcgccgggtgctgcgagtggctgagatgctgcggtggaggggaggccaggccccgcactgtctggctggggcaccccgagaagagagaccagaggtatcctcggaatgtcatcaacaatcagaagtacaatttcttcacctttcttcctggggtgctgttcaaccagttcaaatactttttcaacctctatttcttacttcttgcctgctctcagtttgttcccgaaatgagacttggtgcactctatacctactgggttcccctgggcttcgtgctggccgtcactgtcatccgtgaggcggtggaggagatccgatgctacgtgcgggacaaggaagtcaactcccaggtctacagccggctcacagcacgaggtactgttgtgggtgttgttctttacactggcagagaactccggagtgtcatgaatacctcaaatccccgaagtaagatcggcctgttcgacttggaagtgaactgcctcaccaagatcctctttggtgccctggtggtggtctcgctggtcatggttgcccttcagcactttgcaggccgttggtacctgcagatcatccgcttcctcctcttgttttccaacatcatccccattagtttgcgygtgaacctggacatgggcaagatcgtgtacagctgggtgattcgaagggactcraaaatccccgggaccgtggttcgctccagcacgattcctgagcagctgggcaggatttcgtacttactcacagacaagacaggcactcttacccagaacgagatgattttcaaacggctccatctcggaacagtagcctacggcctcgactcaatggacgaagtacaaagccacattttcagcatttacacccagcaatcccaggacccaccggctcagaagggcccaacgctcaccactaaggtccggcggaccatgagcagccgcgtgcacgaagccgtgaaggccatcgcgctctgccacaacgtgactcccgtgtatgagtccaacggtgtgactgatcaggctgaggcygagaagcagtacgaagactcctgccgcgtataccaggcatcyagccccgatgaggtggccctggtacagtggacggaaagtgtgggcttaaccctggtgggccgagaccagtcttccatgcagctgaggacccctggcgaccagatcctgaacttcaccatcctacagatcttccctttcacctatgaaagcaaacgtatgggcatcatcgtgcgggatgaatcaactggagaaattacgttttacatgaagggagcagatgtggtcatggctggcattgtgcagtacaatgactggttggaggaagagtgtggcaacatggcccgagaagggctgcgggtgctcgtggtggcaaagaagtctcttgcagaggagcagtatcaggactttgaagcccgctacgtccaggccaagctgagtgtgcacgaccgctccctcaaagtggccacggtgatcgagagcctggagatggagatggaactgctgtgcctgacgggcgtggaggaccagctgcaggcagatgtgcggcccacgctggagaccctgaggaatgctggcatcaaggtttggatgctgacaggggacaagctggagacagctacgtgcacagcgaagaatgcacatctggtgaccagaaaccaagacatccacgtttttcggctggtgacyaaccgcggggaggctcacctcgagctgaacgccttccgcaggaagcatgattgtgccctggtcatctcgggagactccctggaggtttgcctcaagtactatgagtacgagttcatggagctggcctgccagtgcccggccgtagtctgctgccgatgtgcccccacccagaaggcccagatcgtgcgcctgcttcaggagcgcacgggcaagctcacctgtgcagtaggggacggaggcaatgacgtcagcatgattcaggaatctgactgcggcgtgggagtggaaggaaaggaaggaaaacaggcttcgttggctgcagacttctccatcactcaatttaagcatcttggccggttgcttatggtgcatggccggaacagctacaagcggtcagccgccctcagccagttcgtgattcacaggagcctctgtatcagcaccatgcaggctgtcttttcctccgtgttttactttgcctccgtccctctctatcaaggattcctcatcattgggtactccacaatttacaccatgtttcctgtgttttctctggtcctggacaaagatgtcaaatcggaagttgccatgctgtatcctgagctctacaaggatcttctcaagggacggccgttgtcctacaagacattcttaatatgggttttgattagcatctatcaagggagcaccatcatgtacggggcgctgctgctgtttgagtcggagttcgtgcacatcgtggccatctccttcacctcgctgatcctcaccgagctgctcatggtggcgctgaccatccagacctggcactggctcatgacagtggcggagctgctcagcctggcctgctacatcgcctccctggtgttcttacacgarttcatcgatgtgtacttcatcgccaccttgtcattcttgtggaaagtctccgtcatcactctggtcagctgcctccccctctatgtcctcaagtacctgcgaagacggttctctccccccagctactcaaagctcacatcataggccgtgcgttcgctggagggggccctggtcttggcgcttccctgatggacagagctcaagttccatttatattaaccgccacctgtggattttgcagtaattgctaacacatgcagttttaatgggaagyggctctgcgcctaaacggagtcctaacgctgcatcaacgggagggagggtcctgaaagagacccatctgggcctgtctgaacccctcgttcttcatgtttaggtgaatatgaatatgttaaagctggtggctcagctgggagatttatatgggtcactgtgcgagcttccttatgacttgaattttgttgtcacatgataaaagtttctgtgtagctgaaggttgtagaaggcttgtgtgtgtgtgtgtgtgtgtgtgtgtgtgtgtgtgtgtttttaaagagtcctaatgtgtatgtactctttatgtctttcttgctcttacaaagaggtgtcagaaaaatagaaagctcttggtgtcggtttgggaggaaaagacagtgacatttggtaaaaagttatccacacaataatctccattcggaaatgctcagtatcgtctccagccagccctgcttatccaggttacactggattcctgggatcgtaaccagtaaatgagaggagagggagagagagtgtcctaagtccaatctgttatccttgatctgattcagcatccatagtgtgtgagttaacttcacctgccacctcgtaaaagaatttcagaggtgtgatcccgctttattgggacctggtaacaatcacaaagccagtggctgtttgagaaggacctcagacattttcagcagagttgttttagcaggaaacgtgccactgaatggcccctaaatgtgtcgacagtgtgataagagactcaactaattctttaggcaacatggcagatgtgactcagatcctccaagaccaaagcggaaaggtcagggggctgggactcttctcttccatagaagcctgtttcctgttaggaggcataatggaagatgaccccacaaaggcagaggcatctttcggaacaacactggtggcagctttcagaacaaggaacccctggtgggaggacgcccaagctacagcgttgggatctgggatctgttccactgccggcagatttcaaggggaacttgctgaaaggcagccagtggtgaagatttctcccctcccaggatggactacatgccrgcatgtttcttataaagctgtggctgcttgtttcagaggaagggagtttgcagtcgcgggacgtggtagagcaaggcattcttgggttttcaagttgcttcttgcagaagccacatatgcatgccataagggttaagttggtggatctttaagagccaagtgtggttgagatcttggatttgcgtttacttcttgatgaatacatatccttcaaaccctctgcctggcgctacttctgtgtgcttcagagakgtacatcacagcctggtttctgatgcctactaactcctgctcttggagagctggagacacgaggatcagatagtcccttgcctttggagcactcttgataagcttttgtattttgtgttgtccttttaaaatgttctagaatgactttacgttgcaggtactggttaattggctgttgacaccacatctattttgtcttatgattctgcagttttgcagtacttttctctatctgattcagccatttctgccagagggaaaaggtcggcagaaaagatgtattgagtgaatagttaaggataggatctttgtccaaaaatttcagaaagattgagcaaatctgacgtattcattgagtgagtttctgtgttttcaaaggtggaggagaaatttgtgctggaagtttttaagcctccgttttcttggaaatcagtctgtaacactggcaagtcttaagatagtcccrtttagactttgcagatgctgaacctggctctgtaacgctgggaagtcttaagatagtcctgtttagactttgcaaaccctgtacctggctttgctcggagattcgggatgctggctcctgcaggcagggcgtgtgggagcctcgtcagaaagttttagaggtttccagcagaagcagaatgaagatggtctccctggccttttccttaattctcaattttgattgaggtgcacaagttgacttttaaagccaacgcttaagatactgattgacatcttcaagggagaatgctcccaggaggggctgaagaagccatagttggaagtggaaggtactcgtcagtgttcwccacaaacctttttactctgttgtctcagccgcactggggcggaggcggtcaagggtgagaagtaccgacactcaagtgcaaactgccacgtcgttggcccatcccatcagtgggcagctggctgacgccattcactggacggtccctgaacacctaggaatgcacacaccgtgcttctcagacactggagacgcaaaggcaggaggatgcagtccggtgagaggacacgatctttacctgcacaatcagactgtaagcccagcagagaaccccaggggcgcctgggtacttctcggaggtcatcttagttgtggtggggaagacaaagaaataagcaaacaagaaactagagttactatacaagaaactctcctgagtttgtaaaccttaagcataaggattcagttgacctttttcttggttcatcaatctggaaagaacttacataaagcgccattgacactgtcacctgggagctccatgggccgtaagtctttgacagccaatttaatttgaggtcagagggccttgaggtacacagtcagcactgtttgaacacttttcctgaaagcaaaactcacagctccctgcgccctctgacaacactagctatttctgccagagtaagaacttctattactattttattattgttcatatgtcttttgatgatggttgtgtgacagggggaagcaggatctatttggtttcttccccctccccccaccccccccgccagacttttctttttatactttgtcttgtttttactggggtaggctgggcatgcgtgcgtgcctttagggcagcattttaaacctttgccaaaattgcaaatgggacatgtacattcttctgctccatcctacttaaacacctatcagctatttttatctttaaccttttctgtatgtttgaagtgtgtggggggtgtgtgtgtgtgtgaaagagcgagagaatgatgtcatctaaagttttttgaagaattatttggttttcattgcattaaaattctatcactcccagctttgttttcatttaaaaaaatatacaaagagctttgtaaatacaacacattttatttctcccccttcttttaatgtacagcttttttgccacttatatatacttaaaatattcccatgaattatgtccagttcttcttggaaaaaaatttggttttgaatgaacctgcaaagcatcctgcagcgtgagcagctcctccacctggagctccgaagcatcttctcaggccaaagcggcattacccgtgaatctgtcttctccgccacrgcatggtttgaggcgcagtctgttaatatagctgggccatgtcagtgactgttgtgtttgtggggtcaggtggggggcatggtatttgcaaaaaaaacaaattatggctaatttattattttgttgcagtggggttaactgtaaactcatgtaagagtctgtgatttcctcaytggttgatctctctctctgtaatcctcattgcaaattttcaccaggacagcgttttttgattagaggggagctctggcacagtatgctttaatttagcaggaacttccagatgatttaaattctcactttcattgtttgccagcgtggctcgttgctgttgcccaataaagcttgtgtacgttctgcc

SEQ ID NO: 6366 - DNA, 1527 bp, Homo sapiens
cgttaagaagagcgtggccggccgcggccaccgctggccccagggaaagccgagcggccaccgagccggcagagacccaccgagcggcggcggagggagcagcgccggggcgcacgagggcaccatggcccagacgcccgccttcgacaagcccaaagtrgaactgcatgtccacctagacggatccatcaagcctgaaaccatcttatactatggcaggaggagagggatcgccctcccagctaacacagcagaggggctgctgaacgtcattggcatggacaagccgctcacccttccagacttcctggccaagtttgactactacatgcctgctatcgcgkkctgccgggaggctatcaaaaggatcgcctatgagtttgtagagatgaaggccaaagagggcgtggtgtrtgtggaggtgydgtacagtcygcacstgcyggccaactccaaagtggagccaatcccctggaacyaggctgaaggggacctcacccmagacgaggtggtrgccctagtgggccagggcctgcaggaggrggagyragacttcggggtcaaggcccggtccatcctgtgctgcatgyrccaccagcccaactggtcccccaaggtggtggagctgtgtaagaagtaccagcagcagaccrtggtrgmcattgacctggctggagatgagaccatcccaggaagcagcctcttgcctggacatgtccmggcctaccaggaggctgtgaagagcggcattcaccgtactgtccacgccggggaggtgggctcggccgaagtagtaaaagaggctgtggacatactcaagayagagcggctgggacacggctaccacaccctggaagaccaggccctttataacaggctgcsgyaggaaaacatgcacttcgagatctgcccctggtccagctacctcactggtgcctggaagccggacacggagcatgcagtcattcggctcaaaaatgaccaggctaactactcgctcaacacagatgaccmgctcatcttcaagtccaccckggacactgattaccagatgaccaaacgggacatgggctttactgaagaggagtttaaaaggctgaacatcaatgyggccaaatctagtttcctcccagaagatgaaaagagggagcttctcgacctgctctataaagcctatgggatgccaccttcagcctctgcaggtagaacctctgaagacgccactcctccaagccttcrccctgtggagtcaccccaactctgtggggctgagcaacatttttacatttattccttccaagaagaccatgatctcaatagtcagttactgatgctcctgaaccctatgtgtccatttctgcacacacgtatacctcggcatggccgcstcacttctctgattatgtgccctggccagggaccagcgcccttgcacatgggcatggttgaatctgaaaccctccttctgtggcaacttgtactgaaaatctggtgctcaataaagaagcccatggctggtggcatgca

SEQ ID NO: 6367 - DNA, 1531 bp, Homo sapiens
cgttaagaagagcgtggccggccgcggccaccgctggccccagggaaagccgagcggccaccgagccggcagagacccaccgagcggcggcggagggagcagcgccggggcgcacgagggcaccatggcccagacgcccgccttcgacaagcccaaagtrgaactgcatgtccacctagacggatccatcaagcctgaaaccatcttatactatggcaggaggagagggatcgccctcccagctaacacagcagaggggctgctgaacgtcattggcatggacaagccgctcacccttccagacttcctggccaagtttgactactacatgcctgctatcgcgkkctgccgggaggctatcaaaaggatcgcctatgagtttgtagagatgaaggccaaagagggcgtggtgtrtgtggaggtgydgtacagtcygcacstgcyggccaactccaaagtggagccaatcccctggaacyaggctgaaggggacctcacccmagacgaggtggtrgccctagtgggccagggcctgcaggaggrggagyragacttcggggtcaaggcccggtccatcctgtgctgcatgyrccaccagcccaactggtcccccaaggtggtggagctgtgtaagaagtaccagcagcagaccrtggtrgmcattgacctggctggagatgagaccatcccaggaagcagcctcttgcctggacatgtccmggcctaccaggaggctgtgaagagcggcattcaccgtactgtccacgccggggaggtgggctcggccgaagtagtaaaagaggctgtggacatactcaagayagagcggctgggacacggctaccacaccctggaagaccaggccctttataacaggctgcsgyaggaaaacatgcacttcgagatctgcccctggtccagctacctcactggtgcctggaagccggacacggagcatgcagtcattcggctcaaaaatgaccaggctaactactcgctcaacacagatgaccmgctcatcttcaagtccaccckggacactgattaccagatgaccaaacgggacatgggctttactgaagaggagtttaaaaggctgaacatcaatgyggccaaatctagtttcctcccagaagatgaaaagagggagcttctcgacctgctctataaagcctatgggatgccaccttcagcctctgcagggcagaacctctgaagacgccactcctccaagccttcrccctgtggagtcaccccaactctgtggggctgagcaacatttttacatttattccttccaagaagaccatgatctcaatagtcagttactgatgctcctgaaccctatgtgtccatttctgcacacacgtatacctcggcatggccgcstcacttctctgattatgtgccctggccagggaccagcgcccttgcacatgggcatggttgaatctgaaaccctccttctgtggcaacttgtactgaaaatctggtgctcaataaagaagcccatggctggtggcatgcagca

SEQ ID NO: 6368 - DNA, 5668 bp, Homo sapiens
ccgcccggggctgggcttggggctgcctgtggagaggcggcgggcggaacgcgcgcggccacggccacggccaccgccacggccacggccggcagctcgggtcccgggtcccgggcaggggaaggggagaggcggcgagctcagcaaccggaaccgagggaagattttggctccgcgggctcgccctccgctccctctgccagcggcgccagacgccgagtggggccagggacaggggaggaggacccaggaccctgtgcccgcgcccctggagccgctggagttcggacttctgcaactgttggcactttgggggcttggcttagcgctctgctgtttacccgtctctcctcgctgcctcggaaccaaagctcccggccccctccgccctcgcgcgcccacccaccgccgccggggagcggcccggcccgcactcagcaccatgaggggacttgggacttgcctggcgactttggccggacttttgctaactgcggcgggcgagacgttctcaggtggctgcctctttgatgagccgtatagcacatgtggatatagwcaatctgaaggtgatgacttcaattgggagcaagtgaacaccttgactaaaccgacttctgatccatggatgccatcaggytctttcatgctggtgaatgcctctgggagacctgaggggcagagagcccacctgctcttaccccaacttaaagaaaatgacacccactgcatcgattttcactattttgtgtccagcaagagtaattctcctccggggttactcaatgtctacgtgaaggtcaataacgggccactggggaatcctatctggaatatatctggagacccaacacgtacatggaacagggcagaactggccattagtactttctggcctaacttttatcaggtgatttttgaagtgataacttctggacatcaaggctatctcgctatcgatgaggtgaaggtgttaggacatccatgtaccaggactcctcacttcctgcggattcagaatgtggaagttaatgctggccagtttgctaccttccagtgcagtgccatcggcaggaccgtggcaggagacaggctctggttacagggcattgatgtgcgagatgctccyctgaaggaaatcaaggtgaccagctcccgacgcttcattgcttcatttaatgttgtgaataccaccaaacgagatgctggaaagtaccgctgcatgattcgcactgaaggaggtgttggaatatcaaactrtgcagagttggtagttaaagaaccacccgttcctattgccccacctcagctcgcctctgtaggagccacctacctgtggatacagctcaacgccaactccatcaatggggatgggcccattgtggcccgagaggtggagtactgcacggccagtgggagctggaatgaccggcagccagtygattccacgagctataaaattggacaccttgacccagatacagaatatgagattagtgtgctcctgaccaggccaggggagggtggcactggctctcctggtccagctctcaggacaagaacaaagtgtgctgatcccatgcgaggcccaagaaaactagaagtagtggaggtcaaatctcggcaaatcactatccgctgggagccatttggatataatgtaactcgttgccacagttataatctcactgtccactactgttaccaagttggaggacaagaacaagtgcgagaagaagtaagctgggatacagaaaaytcacaccctcaacacacgatcactaacctgtcaccatacaccaatgtcagtgtgaaactgatcctcatgaacccagagggccggaaggaaagccaagaactcatagtgcagacagatgaagacctcccaggtgctgttcccactgaatccatacaaggaagtacctttgaagagaagatatttcttcagtggagagaaccaactcaaacatatggtgtaatcactttatatgagatcacctacaaagcagtcagttcctttgacccagaaatagatttatccaatcagagtggaagagtttcaaagctgggaaatgaaacccattttctgttttttggactgtatccggggaccacatactcctttaccatccgagctagcacagctaagggttttgggcctccagcaacaaaccagttcaccaccaaaatatcagcaccctctatgccagcttatgaacttgagacacctttgaatcaaactgacaataccgtgacagtcatgctgaaacctgcccacagcagaggagcacctgtcagtgtctatcaaatagttgttgaggaagaacgtcctcgaagaactaaaaagacgacagaaatcttaaagtgctacccagtgccaattcacttccagaatgcttctctgctgaactcacagtactaytttgctgcagaatttcctgcagacagcctccaagctgcgcagccttttacaattggtgataataagacatataatggatactggaacactccccttctcccctataaaagctacagaatttatttccaagctgctagtagagccaatggggaaaccaaaatagactgtgtccaagtggccacaaaagctgcgataatcgtgactcagcttacaacaccttacattcgcatcgcccccgctgcaggcgacggccaactaacaggagctgccactccgaaaccagtcccagaacccgagaaacagacagaccatacagttaaaattgctggagtcatcgcrggcatcttgctgttcgtgattatatttcttggagttgtgttggtaatgaagaaaaggaaactggccaagaagcggaaagagaccatgagcagcacccgacaggagatgactgtgatggtgaactcaatggacaagagctatgctgagcagggcacaaactgcgacgaggctttctcattcatggacacgcacaatctgaatgggagatctgtgtcttcaccatcgtccttcacaatgaaaacaaatacactgagcacatcggtgcctaattcctattacccagatgaaacccacacaatggccagcgataccagcagcctggtgcagtcccatacttacaagaagcgagagccggccgacgtgccctatcagactgggcagctccaccccgccatccgggtggcagacctccttcagcacatcacacagatgaagtgtgcggagggctacggcttcaaggaggaatacgagagcttctttgaagggcagtctgcaccatgggactcggctaagaaagatgagaacagaatgaagaacagatacgggaatatcattgcatacgatcattcccgagtgaggctgcagacaatagaaggagacacaaactcagactatatcaatggcaattatatcgatggttatcatcgacccaatcattacattgctacccaagggccaatgcaggaaaccatctatgacttctggaggatggtgtggcacgaaaacactgcaagtatcatcatggtgaccaatcttgtggaagtgggaagggtcaaatgctgcaaatactggccagatgacacagagatatataaagacattaaagttaccctaatagaaacagaactactggcagaatatgtgataagaacatttgctgttgaaaagagaggtgtgcatgaaatccgagagatcagacagtttcacttcactggctggccggatcatggggtcscctaccatgccaccggcctgctgggattcgtgcggcaagtcaagtccaagagcccgcccagtgcaggcccactggtggtgcactgcagtgctggtgcagggaggactggctgtttcatcgtcattgatatcatgttggacatggccgaaagggaaggggtcgtagacatctacaactgcgtcagggagctgcggtcacggagggtgaacatggtgcaaacagaggagcagtatgtgtttatccacgatgcgatcctggaagcctgtctttgtggggacacctctgtgcctgcttcccaagttaggtctctgtattatgacatgaacaaactggatccacagacraactcaagccagattaaagaggaattccggacgctaaacatggtgacaccaacgctgcgagtagaggactgcagcatcgcactgttgccccggaaccatgagaaaaaccggtgcatggacatcctgcccccagaccgctgcctgcccttcctcatcaccatcgatggggagagcagcaactacatcaatgctgccctcatggacagctataaacagccttcagcttttatagtcacccagcatcctttgccaaacacagtgaaagacttttggagactggtcctggattatcactgcacatccgtagttatgctaaatgatgtggatccygcccagttgtgtccacagtactggccagaaaacggagtacacagacacggccccatccaggtggaatttgtctctgctgacctggaagaggacatcatcagcaggatattccgcatttacaatgccgccagaccccaagatggatatcggatggtgcagcaattccagttcctgggctggccratgtacagggacacaccagtgtctaagcgctccttcttgaagctcattcgccaggtggacaagtggcaagaggartacaatggcggggaaggccgcacsgttgtgcactgcttgaacgggggaggccgcagtgggacgttctgcgccatcagcatcgtatgtgagatgctccggcaccagagaaccgtggatgtctttcacgctgtgaagacactgaggaacaacaagcccaacatggtcgacctcctggatcagtacaagttctgctacgaggtggccctggaatacttgaattctggctgatggtgtaaacagctctgcaaacaatccctttcataccacaaagccaagacgttccatggtatttgtgcaaaagagatgaagacttctcaatatgcttattttgctttgcataattggctctttttaagagcccaagaaagtgtttctaaaattgcttgcactgcccaatcccagtaatgctgctgcctgacagaaacacacacacagccacagttgccaaatcccgtactccttgccaccggcttcctagagcagcgtagacagctggtaaactgaagagcacaactatattcttatgaaggaatttgtacctttggggtattattttgtggcccgtgaccctcgttattgttacagctgagtgtatgtttttgttctgtggagaatgctatctggcattatggtaatatattattttaggtaatatttgtactttaacatgttgcataatatatgcttatgtagctttccaggactaacagataaatgtgtaatgaacaaagatatgttgtatgagtcgtcgtttctgtcagatttgtattgtttccaagggaaaagcttgggggaggactcagttcacaaaatgcaaaactcaacgatcagattcacggacccagagcttttccatgtgtttatattgtaaatatttttgatttcatcaaattatttattcattaaaagaaatttttgtgaagcacagtgagtgacaatcatttttcttaaggcctggaaacgattttctgtatgatgttactttatgtgaattctcatctcaataaatgatgacccgtg

SEQ ID NO: 6369 - DNA, 5416 bp, Homo sapiens
ccgcccggggctgggcttggggctgcctgtggagaggcggcgggcggaacgcgcgcggccacggccacggccaccgccacggccacggccggcagctcgggtcccgggtcccgggcaggggaaggggagaggcggcgagctcagcaaccggaaccgagggaagattttggctccgcgggctcgccctccgctccctctgccagcggcgccagacgccgagtggggccagggacaggggaggaggacccaggaccctgtgcccgcgcccctggagccgctggagttcggacttctgcaactgttggcactttgggggcttggcttagcgctctgctgtttacccgtctctcctcgctgcctcggaaccaaagctcccggccccctccgccctcgcgcgcccacccaccgccgccggggagcggcccggcccgcactcagcaccatgaggggacttgggacttgcctggcgactttggccggacttttgctaactgcggcgggcgagacgttctcaggtggctgcctctttgatgagccgtatagcacatgtggatatagwcaatctgaaggtgatgacttcaattgggagcaagtgaacaccttgactaaaccgacttctgatccatggatgccatcaggytctttcatgctggtgaatgcctctgggagacctgaggggcagagagcccacctgctcttaccccaacttaaagaaaatgacacccactgcatcgattttcactattttgtgtccagcaagagtaattctcctccggggttactcaatgtctacgtgaaggtcaataacgggccactggggaatcctatctggaatatatctggagacccaacacgtacatggaacagggcagaactggccattagtactttctggcctaacttttatcaggtgatttttgaagtgataacttctggacatcaaggctatctcgctatcgatgaggtgaaggtgttaggacatccatgtaccaggactcctcacttcctgcggattcagaatgtggaagttaatgctggccagtttgctaccttccagtgcagtgccatcggcaggaccgtggcaggagacaggctctggttacagggcattgatgtgcgagatgctccyctgaaggaaatcaaggtgaccagctcccgacgcttcattgcttcatttaatgttgtgaataccaccaaacgagatgctggaaagtaccgctgcatgattcgcactgaaggaggtgttggaatatcaaactrtgcagagttggtagttaaagaaccacccgttcctattgccccacctcagctcgcctctgtaggagccacctacctgtggatacagctcaacgccaactccatcaatggggatgggcccattgtggcccgagaggtggagtactgcacggccagtgggagctggaatgaccggcagccagtygattccacgagctataaaattggacaccttgacccagatacagaatatgagattagtgtgctcctgaccaggccaggggagggtggcactggctctcctggtccagctctcaggacaagaacaaagtgtgctgatcccatgcgaggcccaagaaaactagaagtagtggaggtcaaatctcggcaaatcactatccgctgggagccatttggatataatgtaactcgttgccacagttataatctcactgtccactactgttaccaagttggaggacaagaacaagtgcgagaagaagtaagctgggatacagaaaaytcacaccctcaacacacgatcactaacctgtcaccatacaccaatgtcagtgtgaaactgatcctcatgaacccagagggccggaaggaaagccaagaactcatagtgcagacagatgaagacctcccaggtgctgttcccactgaatccatacaaggaagtacctttgaagagaagatatttcttcagtggagagaaccaactcaaacatatggtgtaatcactttatatgagatcacctacaaagcagtcagttcctttgacccagaaatagatttatccaatcagagtggaagagtttcaaagctgggaaatgaaacccattttctgttttttggactgtatccggggaccacatactcctttaccatccgagctagcacagctaagggttttgggcctccagcaacaaaccagttcaccaccaaaatatcagcaccctctatgccagcttatgaacttgagacacctttgaatcaaactgacaataccgtgacagtcatgctgaaacctgcccacagcagaggagcacctgtcagtgtctatcaaatagttgttgaggaagaacgtcctcgaagaactaaaaagacgacagaaatcttaaagtgctacccagtgccaattcacttccagaatgcttctctgctgaactcacagtactaytttgctgcagaatttcctgcagacagcctccaagctgcgcagccttttacaattggtgataataagacatataatggatactggaacactccccttctcccctataaaagctacagaatttatttccaagctgctagtagagccaatggggaaaccaaaatagactgtgtccaagtggccacaaaaggagctgccactccgaaaccagtcccagaacccgagaaacagacagaccatacagttaaaattgctggagtcatcgcrggcatcttgctgttcgtgattatatttcttggagttgtgttggtaatgaagaaaaggaaactggccaagaagcggaaagagaccatgagcagcacccgacaggagatgactgtgatggtgaactcaatggacaagagctatgctgagcagggcacaaactgcgacgaggctttctcattcatggacacgcacaatctgaatgggagatctgtgtcttcaccatcgtccttcacaatgaaaacaaatacactgagcacatcggtgcctaattcctattacccagatgaaacccacacaatggccagcgataccagcagcctggtgcagtcccatacttacaagaagcgagagccggccgacgtgccctatcagactgggcagctccaccccgccatccgggtggcagacctccttcagcacatcacacagatgaagtgtgcggagggctacggcttcaaggaggaatacgagagcttctttgaagggcagtctgcaccatgggactcggctaagaaagatgagaacagaatgaagaacagatacgggaatatcattgcatacgatcattcccgagtgaggctgcagacaatagaaggagacacaaactcagactatatcaatggcaattatatcgatggttatcatcgacccaatcattacattgctacccaagggccaatgcaggaaaccatctatgacttctggaggatggtgtggcacgaaaacactgcaagtatcatcatggtgaccaatcttgtggaagtgggaagggtcaaatgctgcaaatactggccagatgacacagagatatataaagacattaaagttaccctaatagaaacagaactactggcagaatatgtgataagaacatttgctgttgaaaagagaggtgtgcatgaaatccgagagatcagacagtttcacttcactggctggccggatcatggggtcscctaccatgccaccggcctgctgggattcgtgcggcaagtcaagtccaagagcccgcccagtgcaggcccactggtggtgcactgcagtgctggtgcagggaggactggctgtttcatcgtcattgatatcatgttggacatggccgaaagggaaggggtcgtagacatctacaactgcgtcagggagctgcggtcacggagggtgaacatggtgcaaacagaggagcagtatgtgtttatccacgatgcgatcctggaagcctgtctttgtggggacacctctgtgcctgcttcccaagttaggtctctgtattatgacatgaacaaactggatccacagacraactcaagccagattaaagaggaattccggacgctaaacatggtgacaccaacgctgcgagtagaggactgcagcatcgcactgttgccccggaaccatgagaaaaaccggtgcatggacatcctgcccccagaccgctgcctgcccttcctcatcaccatcgatggggagagcagcaactacatcaatgctgccctcatggacagctataaacagccttcagcttttatagtcacccagcatcctttgccaaacacagtgaaagacttttggagactggtcctggattatcactgcacatccgtagttatgctaaatgatgtggatccygcccagttgtgtccacagtactggccagaaaacggagtacacagacacggccccatccaggtggaatttgtctctgctgacctggaagaggacatcatcagcaggatattccgcatttacaatgccgccagaccccaagatggatatcggatggtgcagcaattccagttcctgggctggccratgtacagggacacaccagtgtctaagcgctccttcttgaagctcattcgccaggtggacaagtggcaagaggartacaatggcggggaaggccgcacsgttgtgcactgcttgaacgggggaggccgcagtgggacgttctgcgccatcagcatcgtatgtgagatgctccggcaccagagaaccgtggatgtctttcacgctgtgaagacactgaggaacaacaagcccaacatggtcgacctcctggatcagtacaagttctgctacgaggtggccctggaatacttgaattctggctgatggtgtaaacagctctgcaaacaatccctttcataccacaaagccaagacgttccatggtatttgtgcaaaagagatgaagacttctcaatatgcttattttgctttgcataattggctctttttaagagcccaagaaagtgtttctaaaattgcttgcactgcccaatcccagtaatgctgctgcctgacagaaacacacacacagccacagttgccaaatcccgtactccttgccaccggcttcctagagcagcgtagacagctggtaaactgaagagcacaactatattcttatgaaggaatttgtacctttggggtattattttgtggcccgtgaccctcgttattgttacagctgagtgtatgtttttgttctgtggagaatgctatctggcattatggtaatatattattttaggtaatatttgtactttaacatgttgcataatatatgcttatgtagctttccaggactaacagataaatgtgtaatgaacaaagatatgttgtatgagtcgtcgtttctgtcagatttgtattcttttccatgtgtttatattgtaaatatttttgatttcatcaaattatttattcattaaaagaaatttttgtg

SEQ ID NO: 6370 - DNA, 1033 bp, Homo sapiens
ccgcccggggctgggcttggggctgcctgtggagaggcggcgggcggaacgcgcgcggccacggccacggccaccgccacggccacggccggcagctcgggtcccgggtcccgggcaggggaaggggagaggcggcgagctcagcaaccggaaccgagggaagattttggctccgcgggctcgccctccgctccctctgccagcggcgccagacgccgagtggggccagggacaggggaggaggacccaggaccctgtgcccgcgcccctggagccgctggagttcggacttctgcaactgttggcactttgggggcttggcttagcgctctgctgtttacccgtctctcctcgctgcctcggaaccaaagctcccggccccctccgccctcgcgcgcccacccaccgccgccggggagcggcccggcccgcactcagcaccatgaggggacttgggacttgcctggcgactttggccggacttttgctaactgcggcgggcgagacgttctcaggtggctgcctctttgatgagccgtatagcacatgtggatatagwcaatctgaaggtgatgacttcaattgggagcaagtgaacaccttgactaaaccgacttctgatccatggatgccatcaggytctttcatgctggtgaatgcctctgggagacctgaggggcagagagcccacctgctcttaccccaacttaaagaaaatgacacccactgcatcgattttcactattttgtgtccagcaagagtaattctcctccggggttactcaatgtctacgtgaaggtcaataacgggccactggggaatcctatctggaatatatctggagacccaacacgtacatggaacagggcagaactggccattagtactttctggcctaacttttatcaggtgatttttgaagtgataacttctggacatcaaggctatctcgctatcgatgaggtgaaggtgttaggacatccatgtagtaaccaggactcctcacttcctgcggattcagaatgtggaagt

SEQ ID NO: 6371 - DNA, 5593 bp, Homo sapiens
ccgcccggggctgggcttggggctgcctgtggagaggcggcgggcggaacgcgcgcggccacggccacggccaccgccacggccacggccggcagctcgggtcccgggtcccgggcaggggaaggggagaggcggcgagctcagcaaccggaaccgagggaagattttggctccgcgggctcgccctccgctccctctgccagcggcgccagacgccgagtggggccagggacaggggaggaggacccaggaccctgtgcccgcgcccctggagccgctggagttcggacttctgcaactgttggcactttgggggcttggcttagcgctctgctgtttacccgtctctcctcgctgcctcggaaccaaagctcccggccccctccgccctcgcgcgcccacccaccgccgccggggagcggcccggcccgcactcagcaccatgaggggacttgggacttgcctggcgactttggccggacttttgctaactgcggcgggcgagacgttctcaggtggctgcctctttgatgagccgtatagcacatgtggatatagwcaatctgaaggtgatgacttcaattgggagcaagtgaacaccttgactaaaccgacttctgatccatggatgccatcaggytctttcatgctggtgaatgcctctgggagacctgaggggcagagagcccacctgctcttaccccaacttaaagaaaatgacacccactgcatcgattttcactattttgtgtccagcaagagtaattctcctccggggttactcaatgtctacgtgaaggtcaataacgggccactggggaatcctatctggaatatatctggagacccaacacgtacatggaacagggcagaactggccattagtactttctggcctaacttttatcaggtgatttttgaagtgataacttctggacatcaaggctatctcgctatcgatgaggtgaaggtgttaggacatccatgtaccaggactcctcacttcctgcggattcagaatgtggaagttaatgctggccagtttgctaccttccagtgcagtgccatcggcaggaccgtggcaggagacaggctctggttacagggcattgatgtgcgagatgctccyctgaaggaaatcaaggtgaccagctcccgacgcttcattgcttcatttaatgttgtgaataccaccaaacgagatgctggaaagtaccgctgcatgattcgcactgaaggaggtgttggaatatcaaactrtgcagagttggtagttaaagaaccacccgttcctattgccccacctcagctcgcctctgtaggagccacctacctgtggatacagctcaacgccaactccatcaatggggatgggcccattgtggcccgagaggtggagtactgcacggccagtgggagctggaatgaccggcagccagtygattccacgagctataaaattggacaccttgacccagatacagaatatgagattagtgtgctcctgaccaggccaggggagggtggcactggctctcctggtccagctctcaggacaagaacaaagtgtgctgatcccatgcgaggcccaagaaaactagaagtagtggaggtcaaatctcggcaaatcactatccgctgggagccatttggatataatgtaactcgttgccacagttataatctcactgtccactactgttaccaagttggaggacaagaacaagtgcgagaagaagtaagctgggatacagaaaaytcacaccctcaacacacgatcactaacctgtcaccatacaccaatgtcagtgtgaaactgatcctcatgaacccagagggccggaaggaaagccaagaactcatagtgcagacagatgaagacctcccaggtgctgttcccactgaatccatacaaggaagtacctttgaagagaagatatttcttcagtggagagaaccaactcaaacatatggtgtaatcactttatatgagatcacctacaaagcagtcagttcctttgacccagaaatagatttatccaatcagagtggaagagtttcaaagctgggaaatgaaacccattttctgttttttggactgtatccggggaccacatactcctttaccatccgagctagcacagctaagggttttgggcctccagcaacaaaccagttcaccaccaaaatatcagcaccctctatgccagcttatgaacttgagacacctttgaatcaaactgacaataccgtgacagtcatgctgaaacctgcccacagcagaggagcacctgtcagtgtctatcaaatagttgttgaggaagaacgtcctcgaagaactaaaaagacgacagaaatcttaaagtgctacccagtgccaattcacttccagaatgcttctctgctgaactcacagtactaytttgctgcagaatttcctgcagacagcctccaagctgcgcagccttttacaattggtgataataagacatataatggatactggaacactccccttctcccctataaaagctacagaatttatttccaagctgctagtagagccaatggggaaaccaaaatagactgtgtccaagtggccacaaaaggagctgccactccgaaaccagtcccagaacccgagaaacagacagaccatacagttaaaattgctggagtcatcgcrggcatcttgctgttcgtgattatatttcttggagttgtgttggtaatgaagaaaaggaaactggccaagaagcggaaagagaccatgagcagcacccgacaggagatgactgtgatggtgaactcaatggacaagagctatgctgagcagggcacaaactgcgacgaggctttctcattcatggacacgcacaatctgaatgggagatctgtgtcttcaccatcgtccttcacaatgaaaacaaatacactgagcacatcggtgcctaattcctattacccagatgaaacccacacaatggccagcgataccagcagcctggtgcagtcccatacttacaagaagcgagagccggccgacgtgccctatcagactgggcagctccaccccgccatccgggtggcagacctccttcagcacatcacacagatgaagtgtgcggagggctacggcttcaaggaggaatacgagagcttctttgaagggcagtctgcaccatgggactcggctaagaaagatgagaacagaatgaagaacagatacgggaatatcattgcatacgatcattcccgagtgaggctgcagacaatagaaggagacacaaactcagactatatcaatggcaattatatcgatggttatcatcgacccaatcattacattgctacccaagggccaatgcaggaaaccatctatgacttctggaggatggtgtggcacgaaaacactgcaagtatcatcatggtgaccaatcttgtggaagtgggaagggtcaaatgctgcaaatactggccagatgacacagagatatataaagacattaaagttaccctaatagaaacagaactactggcagaatatgtgataagaacatttgctgttgaaaagagaggtgtgcatgaaatccgagagatcagacagtttcacttcactggctggccggatcatggggtcscctaccatgccaccggcctgctgggattcgtgcggcaagtcaagtccaagagcccgcccagtgcaggcccactggtggtgcactgcagtgctggtgcagggaggactggctgtttcatcgtcattgatatcatgttggacatggccgaaagggaaggggtcgtagacatctacaactgcgtcagggagctgcggtcacggagggtgaacatggtgcaaacagaggagcagtatgtgtttatccacgatgcgatcctggaagcctgtctttgtggggacacctctgtgcctgcttcccaagttaggtctctgtattatgacatgaacaaactggatccacagacraactcaagccagattaaagaggaattccggacgctaaacatggtgacaccaacgctgcgagtagaggactgcagcatcgcactgttgccccggaaccatgagaaaaaccggtgcatggacatcctgcccccagaccgctgcctgcccttcctcatcaccatcgatggggagagcagcaactacatcaatgctgccctcatggacagctataaacagccttcagcttttatagtcacccagcatcctttgccaaacacagtgaaagacttttggagactggtcctggattatcactgcacatccgtagttatgctaaatgatgtggatccygcccagttgtgtccacagtactggccagaaaacggagtacacagacacggccccatccaggtggaatttgtctctgctgacctggaagaggacatcatcagcaggatattccgcatttacaatgccgccagaccccaagatggatatcggatggtgcagcaattccagttcctgggctggccratgtacagggacacaccagtgtctaagcgctccttcttgaagctcattcgccaggtggacaagtggcaagaggartacaatggcggggaaggccgcacsgttgtgcactgcttgaacgggggaggccgcagtgggacgttctgcgccatcagcatcgtatgtgagatgctccggcaccagagaaccgtggatgtctttcacgctgtgaagacactgaggaacaacaagcccaacatggtcgacctcctggatcagtacaagttctgctacgaggtggccctggaatacttgaattctggctgatggtgtaaacagctctgcaaacaatccctttcataccacaaagccaagacgttccatggtatttgtgcaaaagagatgaagacttctcaatatgcttattttgctttgcataattggctctttttaagagcccaagaaagtgtttctaaaattgcttgcactgcccaatcccagtaatgctgctgcctgacagaaacacacacacagccacagttgccaaatcccgtactccttgccaccggcttcctagagcagcgtagacagctggtaaactgaagagcacaactatattcttatgaaggaatttgtacctttggggtattattttgtggcccgtgaccctcgttattgttacagctgagtgtatgtttttgttctgtggagaatgctatctggcattatggtaatatattattttaggtaatatttgtactttaacatgttgcataatatatgcttatgtagctttccaggactaacagataaatgtgtaatgaacaaagatatgttgtatgagtcgtcgtttctgtcagatttgtattgtttccaagggaaaagcttgggggaggactcagttcacaaaatgcaaaactcaacgatcagattcacggacccagagcttttccatgtgtttatattgtaaatatttttgatttcatcaaattatttattcattaaaagaaatttttgtgaagcacagtgagtgacaatcatttttcttaaggcctggaaacgattttctgtatgatgttactttatgtgaattctcatctcaataaatgatgacccgtg

SEQ ID NO: 6372 - DNA, 351 bp, Homo sapiens
atgctcaacaatggcaccaagacggacatgctagggctaggcacctggaagtcccctccaggccaggtggccgaggctgtgaaggtagcaatcaacactgtataccgccacatcgactgcagccacgtgcaccagaacaaggaccaggagcagctcaaggagcaggtggtgaggcgygagtggctcttcatcatcagcaagccatggggcatrtgccacaggaagtgcctgaggaacttggtggtgacccccacatctgtgacactggatcgcattgctgagaacttcaaggtctttgactttgaactgagcagccaggatatgacctccttactcagctgcaacaggaac

SEQ ID NO: 6373 - DNA, 854 bp, Homo sapiens
catgacagccacatcatgctcaacaatggcaccaagacggacatgctagggctaggcacctggaagtcccctccaggccaggtggccgaggctgtgaaggtagcaatcaacactgtataccgccacatcgactgcagccacgtgcaccagaacaaggaccaggagcagctcaaggagcaggtggtgaggcgygagtggctcttcatcatcagcaagccatggggcatrtgccacaggaagtgcctggtgagaggatcctgccgaaaggtgctcagtggcctggagctggactacctggacctccaccttattcactggccaacaggctgtcatcctgggaaggaattttcctttttagatgaatcaggcaactcattcaggggctggtgaaagctgctggcatctccaacttcaccatctccaggccgagaggaccttaaacaaatctggcttaaaattgagcgccactggtaggtccctaactcaagagaacttaatccagtactaccagtccaaggcagcatagtgaccgcctacagcccccttggctctcccgacaggcccagggccaagcctgaggacccttccctcctggaagaccccaggatcaaagtgattgcagccaagcacaatgaaactgtagccaggttctgatgtggctcctcacacagaggaacttggtggtgacccccacatctgtgacactggatcgcattgctgagaacttcaaggtctttgactttgaactgagcagccaggatatgacctccttactcagctgcaacaggaactgaagggtctgtgccttggtaagctgarccgcccccaaggatcacccattccatgaagagttt

SEQ ID NO: 6374 - DNA, 3195 bp, Homo sapiens
atgaagggcaaaaaatggttttatgtggaggaaatagtacgtgcaacatcgggaaagcctaaaatggcatttttctcaatccctctgcaaactttcaggaaaggcaccttggataagcacaaggagttggaggaccttgtggctaagttcctgaatgtggaagcagctatggtctttgggatgggattygcaactaactcaatgaatatcccagcattagttggaaagggatgcctcattktaagtgatgagttaaaccacacatcgcttgtgcttggggcccgactctcaggtgcaaccataagaatcttcaaacacaacactctcccctccatcctccaagaagacacacaaagcctagagaagctcctgagagatgctgtcatctatggccagcctcgaacccrcagagcttggaaaaagattctcatcctggtggagggtgtctacagcatggaaggttccatcgtgcatctgccccagatcatagctctaaagaagaaatacaaggcttacctctacatagatgaagctcacagtattggggccgtgggcccaaccggccggggtgtcacggagttctttggactagaccctcatgaagttgatgtgctcatgggcacattcaccaaaagttttggagcttcaggaggttacatagctggaaggaaggcaaggatcttgagtccacctgcatgcctggtgccgaacactggctcccacagcctccacaggctgaccagagacttgcaaatgaatgaagcgatggtagcccttgtaactgataggttgcagggctggaattctggagaagggaactgggacagggcagacaaatttggggacctcgtggattatttacgggttcactcgcatagtgctgtttatgcttcatccatgagcccaccgatagcagagcaaatcatcagatcactaaaacttatcatgggactggatgggaccactcaaggaatatatggaggacatgtcttgggcaccaaaaagaccaagaaggagaccgggatggccaggttggctgtaggtgccgcaggtcagttatgtagacaagagggacccagttttagagagcaaatccaagtcaggctgcagagagtacagcaacttgcgaaaaacacaagatacttcagacaaagactgcaggaaatgggattcattatctatggcaatgagaatgcttctgttgttcctctgcttctttayatgcctggtaaagtagcggcttttgcaaggcatatgctagagaaaaaaattggagtggtggtcgtgggatttccagccactcccctcrcagaagctcgggctcggttttgtgtttcagcggcacatacccgggagatgttagacacggttttagaagctcttgatgaaatgggtgatctcttgcaactgaaatattcccggcacaagaagtcagcacgtcctgagctctatgatgagacgagctttgaactcgaagattaagtttcctggtcctgaatgacacataaagactttgcgagaaagacctccctccttgcctcacaaggaatataaatggatttctcccccttcctcaggacaattttggttcccagaccagcttgaytgaactgagggagacgttgttgttttwaatgtctccagcttggactgcagagacaaaaacatgattccagatttaagtctctcttcttccaagtattctactagaaatacacacacacacacacacacacacttctgagaatatttttaatggcaataagcctgtgttttagctgctactgtgcagaccctttcagggattccaaccaaatgcaaatgagagaatttaaaatttttattcagtaagttcactatgtgtttacttattccatctgcagatgtaagtgagtgtggtggacagtagccaccttccttgttccactcataaaagcatcagctagatctcatctgtatcatgggaagttccaggcaggagggtaaagaaatgttgtttctaccatttgtcacatttggacgtttttcacagacaagtgtcaaaagacatagttaatgtttcgagggggaaagcagaactgatcaactgcgactagagacgtctttgaaggaaattttccttttcctcttgctggtctcctacagttttacagctgagcttttgaggtttggaaaattcaagatgtttgtttcataagaaaaggggcagaaagcaagcacaagacacttttaggtctagactaaaatggtagttacaacaatttgaaccttgttggtgcagtgyacggtgaatgcttaccctgcacagcctctattaccttaaggaattagttgtcattttcctattgaattttgagtaaatggtgaaattcagtgtcctttagaatcgactcccaagactatatttgaagaatgcattgattcaagaaggacatttaaaagcaaattctgactttttcaagaccaacacacttgtttaggcctattaaattgtactatcacttgttacatgccctctgaattgggagaaagtgggcttgcacactttgaggtaactaactgtaatttacttgtgttctctctttcttgctctccttctcaacatgaacacaaacctctatggaaaagtagcctcttgttaatctgatctagtttgtatggaaaaagcccatggagaaccttatctttaacaagctcccagagggtgcccagatttggaaattctagagagcagtggtgaccttttagcaaagcttctgtaacagttcgaatgagttgcagaacattccactccatcaaatgacactgtaaacaaatcacttcaagagaggcttggttttgtgtggcacagatggacccaagctttcatgctgtgcactgagatagaaactccacccgcagcgcctgcgatggatggagcagtgtgccctgatgctcaaagcgtattaaaggaaaaaaagtgatcagcatggaaagtttttatggggaaattataactccaagtgggtgcattggtttaaaaatggatcacaatgatagagttcttcatgaatgtttacaagttgtaaggaataccgttagtgaaagaggaaaagaagtgggttctgaaaatgcagtttcccatccaatgattttgataacaaaattccaacttttctcaatgaaactgatgcagtattatttgtgcaaataaaa

SEQ ID NO: 6375 - DNA, 1291 bp, Homo sapiens
gtggccctgctgcactctggctgcgtcctctctgggatcgctgccaccttccacctgggcctcgcagctgcggcctctgccagagccagctcctgatggacccatgtggaaatgggacctccagatatcatcctggcagtcattgaagactttaagagggacaccaatagcaaaaagatgaatctgggagttggtgcctaccgggatgataacggaaagccttggacgtgctgcctagcgtccccaaggcagaggcccagattgccacaaaaagtttggacaaggaatacctgtccaytgggggactggctgaattttgcaaggcatctgcagaactagcccttggtgagaacagcgaagtcttgaaaagtggccggtttgtcattgtgcagaccatttctggaactggagccttaaggattggagccagctttctgcaaagattttttaagttcagctgagatgtctttctgcccaaaccaagctggggaaatcacacgcccatcttcagggacactggcatgcagctacaaggttatcggctttatgaccccaagacttgcgattttgacttcacaggcgctgtggagggcctttcaaaaataccagagcaaaatgttgttcttctgcatgcctgcacccacaatcccacgggagtggacccaggtctggaacagtggaaggatacagcaacaatggtgaagaagaagagtctctttgccttctttgacatagcctaccaaggctttaccagtggtgatggtgataaggatgcccgggctgtgcaccacttctttgaacagggcattaatgtttgtctctgccaatcatatgccaagaacatgggcttatattgtgagcgtgtaggagccttcactgtagtatgcaaagatgcgatgaaaccaaaagggtagagtcacagttgaagatcttgatccatyccaygtatgccaaccgtccccacaatggggcccagattgcttctaccattctgaacaccccagattcatgaaaacaatggttgcaagaagtgaaaggcatggccgaccacatcattagcatgcggactcagcttgtctccaacctcaagaagaagggttccacccacaactggccacatagcactgcccaaactggcatgttttgtttcacagggctaaagcctgaacaggtggagtggctaaccaaggagttctccatctatatgacaaaggacggccgcatttctgtggcaggggtcacctccggcaacgtgggctaccttgcccatgccattcaccaggtcaccaag

SEQ ID NO: 6376 - DNA, 4914 bp, Homo sapiens
  misc_feature (1)...(4914): n = A,T,C or G
gccgcygccgccgccgccgccgcctcctgggaaccaggggactgaagagcctgcgagagcggaacactgccggaccccgggtgggggggcgcagcagctgcgcctggccccgcccaccacacctgggcgcccgtagaaccgcgcggggcggggcggggcaggaggctggcctggcgctccggccgctttgtcgaaagccggcccgactggagcaggacgaagggggagggtctcgaggccgagtcctgttcttctgagggacrgaccccagctggggtggaaaagcrgtaccagagagcctccgaggcgcgcggtgccaaccatggagcgggccggccccagcttcgggcagcagcgacagcagcagcagccccagcagcagaagcagcagcagagggatcaggactcggtcgaagcatggctggacgatcactgggactttaccttctcatactttgttagaaaagccaccagagaaatggtcaatgcatggtttgctgagagagttcacaccatccctgtgtgcaaggaaggtatcagaggccacaccgaatcttgctcttgtcccttgcagcagagtcctcgtgcagataacagtgnccctggaacaccaaccaggaaaatctctgcctctgaatttgaccggcctcttagacccattgttgtcaaggattctgagggaactgtgagcttcctctctgactcagaaaagaaggaacagatgcctctaacccctccaaggtttgatcatgatgaaggggaccagtgctcaagactcttggaattagtgaaggatatttctagtcatttggatgtcacagccttatgtcacaaaattttcttgcatatccatggactgatakctgctgaccgctattccctgttccttgtctgtgaagacagctccaatgacaagtttcttatcagccgcctctttgatgttgctgaaggttcaacactggaagaagtttcaaataactgtatccgcttagaatggaacaaaggcattgtgggacatgtggcagcgcttggtgagcccttgaacatcaaagatgcatatgaggatcctcggttcaatgcagaagttgaccaaattacaggctacaagacacaaagcattctttgtatgccaattaagaatcatagggaagaggttgttggtgtagcccaggccatcaacaagaaatcaggaaacggtgggacatttactgaaaaagatgaaaaggactttgctgcttatttggcattttgtggtattgttcttcataatgctcagctctatgagacttcactgctggagaacaagagaaatcaggtgctgcttgaccttgctagtttaatttttgaagaacaacaatcattagaagtaattttgaagaaaatagctgccactattatctctttcatgcaagtgcagaaatgcaccattttcatagtggatgaagattgctccgattctttttctagtgtgtttcacatggagtgtgaggaattagaaaaatcatctgatacattaacaagggaacatgatgcaaacaaaatcaattacatgtatgctcagtaygtcaaaaatactatggaaccacttaatatcccagatgtcagtaaggataaaagatttccctggacaactgaaaatacaggaaatgtaaaccagcagtgcattagaagtttgctttgtacacctataaaaaatggaaagaagaataaagttataggggtttgccaacttgttaataagatggaggagaatactggcaaggttaagcctttcaaccgaaatgacgaacagtttctggaagcttttgtcatcttttgtggcttggggatccagaacacgcagatgtatgaagcagtggagagagccatggccaagcaaatggtcacattggaggttctgtcgtatcatgcttcagcagcagaggaagaaacaagagagctacagtcgttagcggctgctgtggtgccatctgcccagacccttaaaattactgactttagcttcagtgactttgagctgtctgatctggaaacagcactgtgtacaattcggatgtttactgacctcaaccttgtgcagaacttccagatgaaacatgaggttctttgcagatggattttaagtgttaagaagaattatcggaagaatgttgcctatcataattggagacatgcctttaatacagctcagtgcatgtttgctgctctaaaagcaggcaaaattcagaacaagctgactgacctggagatacttgcattgctgattgctgcactaagccacgatttggatcaccgtggtgtgaataactcttacatacagcgaagtgaacatccmcttgcccagctttactgccattcaatcatggaacaccatcattttgaccagtgcctgatgattcttaatagtccaggcaatcagattctcagtggcctctccattgaagaatataagaccacgttgaaaataatcaagcaagctattttagctacagacctagcactgtacattaagaggcgaggagaattttttgaacttataagaaaaaatcaattcaatttggaagatcctcatcaaaaggagttgtttttggcaatgctgatgacagcttgtgatctttctgcaattacaaaaccctggcctattcaacaacggatagcagaacttgtagcaactgaattttttgatcaaggagacagagagagaaaagaactcaacatagaacccactgatctaatgaacagggagaagaaaaacaaaatcccaagtatgcaagttgggttcatagatgccatctgcttgcaactgtatgaggccctgacccacgtgtcagaggactgtttccctttgctagatggctgcagaaagaacaggcagaaatggcaggcccttgcagaacagcaggagaagatgctgattaatggggaaagcrgccaggccaagcggaactgagtggcctatttcatgcagagttgaagtttacagagatggtgtgttctgcaatatgcctagtttcttacacactgtctgtatagtgtctgtatttggtatatactttgccactgctgtatttttatttttgcacaacttttgagagtatagcatgaatgtttttagaggactattacatattttttgtatatttgttttatgctactgaactgaaaggatcaacaacatccactgttagcacattgataaaagcattgtttgtgatatttcgtgtactgcaaagtgtatgcagtattcttgcactgaggtttttttgcttggggattattttaaataattggtttttgtgttttctgaattaccattttttcaagaatgtttggaatctttcctttttcaaaagtaggttaggagcaaattatcatacattctgtgacatttaaagcctttataggatagtgaaaaatgctggctgagtggattttaagagaaataattgtatttgttaacagtgtctttttttaaaaagttaaggcactctgaaacaaatggaaagtcctatgaaactgtattgtaaagaaaacattatttaattgatatgctgttttgtgagagaacaggcaagacagaactttgtcacttcagtgcagtacatttttctgaaagctacccataaaatcactttcatctcacctacctgatgcaaagcaggtgaaaccttaggagatgatccagtcactgacttgattgagggataagtgtgatttagaaatggaatggccttggatgtctatcagtgaagaaaaatgttctgttagaagatctctctaagagtttttttccttctgagcttccttttcaaaataaaagtgacaattgtagcattgacttgaagtgagacatggttatagataagasagtacaaaatgactctttttcctgtcaattgaaatttaaagaaaagttttaattatataaatagcaaagggctattgccaatactagggtcaaaaatgaatttgagggaacagtgggtaagaaactttatgcctgaataacatttagcagtattgtgattgaaaaattgccatattttgatgtataggacaagtcaactgagatccagagaatcctggatgtgaatgctaaacactggcccttaactcacattcaatgtattttcttcccataacatttagtatagttaatattttcttagaatttgagcccatttaagtggattaatattctacatgtgtgcccctaaagacacatttactcaatattggagaagtagataatgaattaagcaactggtctaggaaaggaaaatttgtttcaaatatgcaggaatgtttggatttggggagagtagaaggagagatttgcttgatttgttaacttctacctccaacccacaaaaaagatatttgatctgagtttctatcactaatttggatagaaaatttctaagggacatggtaatccagcattctcaaggacctttcgccaaaatgtgttttccatctatgtcccgattcccctaaattttgcctaaaattcagtatgttccttaagtttttaaaattctgagtgtgtacaaatatcttgacataatgcagttttatttttatcattctggtaaaaaaacaaaaaatagaagcaaaacacattgtattgccattattttgtatttggtaaaggttaatctaggaagttaccaactgtttaatgctatatgtattgtatacttgtattttcaggatattttattttttttgccatacagataaaatttgtaaggttgcccctttgtggcactggtgtgtaaaatacacagactatcactaaaataatagttatatatacatacaggtgtatacttatgcatgcatacataaatccttagtatagaaaaattgcataaagaatagcaatctttaataaacctttttattacattg

SEQ ID NO: 6377 - DNA, 4530 bp, Homo sapiens
  misc_feature (1)...(4530): n = A,T,C or G
cctcgccctggccctggctgggcggggaagctggggtgagggacgagtccacgggacagcccaaaggcaacatgacggaaccttgccaaaagaaatggtcaatgcatggtttgctgagagagttcacaccatccctgtgtgcaaggaaggtatcagaggccacaccgaatcttgctcttgtcccttgcagcagagtcctcgtgcagataacagtgnccctggaacaccaaccaggaaaatctctgcctctgaatttgaccggcctcttagacccattgttgtcaaggattctgagggaactgtgagcttcctctctgactcagaaaagaaggaacagatgcctctaacccctccaaggtttgatcatgatgaaggggaccagtgctcaagactcttggaattagtgaaggatatttctagtcatttggatgtcacagccttatgtcacaaaattttcttgcatatccatggactgatakctgctgaccgctattccctgttccttgtctgtgaagacagctccaatgacaagtttcttatcagccgcctctttgatgttgctgaaggttcaacactggaagaagtttcaaataactgtatccgcttagaatggaacaaaggcattgtgggacatgtggcagcgcttggtgagcccttgaacatcaaagatgcatatgaggatcctcggttcaatgcagaagttgaccaaattacaggctacaagacacaaagcattctttgtatgccaattaagaatcatagggaagaggttgttggtgtagcccaggccatcaacaagaaatcaggaaacggtgggacatttactgaaaaagatgaaaaggactttgctgcttatttggcattttgtggtattgttcttcataatgctcagctctatgagacttcactgctggagaacaagagaaatcaggtgctgcttgaccttgctagtttaatttttgaagaacaacaatcattagaagtaattttgaagaaaatagctgccactattatctctttcatgcaagtgcagaaatgcaccattttcatagtggatgaagattgctccgattctttttctagtgtgtttcacatggagtgtgaggaattagaaaaatcatctgatacattaacaagggaacatgatgcaaacaaaatcaattacatgtatgctcagtaygtcaaaaatactatggaaccacttaatatcccagatgtcagtaaggataaaagatttccctggacaactgaaaatacaggaaatgtaaaccagcagtgcattagaagtttgctttgtacacctataaaaaatggaaagaagaataaagttataggggtttgccaacttgttaataagatggaggagaatactggcaaggttaagcctttcaaccgaaatgacgaacagtttctggaagcttttgtcatcttttgtggcttggggatccagaacacgcagatgtatgaagcagtggagagagccatggccaagcaaatggtcacattggaggttctgtcgtatcatgcttcagcagcagaggaagaaacaagagagctacagtcgttagcggctgctgtggtgccatctgcccagacccttaaaattactgactttagcttcagtgactttgagctgtctgatctggaaacagcactgtgtacaattcggatgtttactgacctcaaccttgtgcagaacttccagatgaaacatgaggttctttgcagatggattttaagtgttaagaagaattatcggaagaatgttgcctatcataattggagacatgcctttaatacagctcagtgcatgtttgctgctctaaaagcaggcaaaattcagaacaagctgactgacctggagatacttgcattgctgattgctgcactaagccacgatttggatcaccgtggtgtgaataactcttacatacagcgaagtgaacatccmcttgcccagctttactgccattcaatcatggaacaccatcattttgaccagtgcctgatgattcttaatagtccaggcaatcagattctcagtggcctctccattgaagaatataagaccacgttgaaaataatcaagcaagctattttagctacagacctagcactgtacattaagaggcgaggagaattttttgaacttataagaaaaaatcaattcaatttggaagatcctcatcaaaaggagttgtttttggcaatgctgatgacagcttgtgatctttctgcaattacaaaaccctggcctattcaacaacggatagcagaacttgtagcaactgaattttttgatcaaggagacagagagagaaaagaactcaacatagaacccactgatctaatgaacagggagaagaaaaacaaaatcccaagtatgcaagttgggttcatagatgccatctgcttgcaactgtatgaggccctgacccacgtgtcagaggactgtttccctttgctagatggctgcagaaagaacaggcagaaatggcaggcccttgcagaacagcaggagaagatgctgattaatggggaaagcrgccaggccaagcggaactgagtggcctatttcatgcagagttgaagtttacagagatggtgtgttctgcaatatgcctagtttcttacacactgtctgtatagtgtctgtatttggtatatactttgccactgctgtatttttatttttgcacaacttttgagagtatagcatgaatgtttttagaggactattacatattttttgtatatttgttttatgctactgaactgaaaggatcaacaacatccactgttagcacattgataaaagcattgtttgtgatatttcgtgtactgcaaagtgtatgcagtattcttgcactgaggtttttttgcttggggattattttaaataattggtttttgtgttttctgaattaccattttttcaagaatgtttggaatctttcctttttcaaaagtaggttaggagcaaattatcatacattctgtgacatttaaagcctttataggatagtgaaaaatgctggctgagtggattttaagagaaataattgtatttgttaacagtgtctttttttaaaaagttaaggcactctgaaacaaatggaaagtcctatgaaactgtattgtaaagaaaacattatttaattgatatgctgttttgtgagagaacaggcaagacagaactttgtcacttcagtgcagtacatttttctgaaagctacccataaaatcactttcatctcacctacctgatgcaaagcaggtgaaaccttaggagatgatccagtcactgacttgattgagggataagtgtgatttagaaatggaatggccttggatgtctatcagtgaagaaaaatgttctgttagaagatctctctaagagtttttttccttctgagcttccttttcaaaataaaagtgacaattgtagcattgacttgaagtgagacatggttatagataagasagtacaaaatgactctttttcctgtcaattgaaatttaaagaaaagttttaattatataaatagcaaagggctattgccaatactagggtcaaaaatgaatttgagggaacagtgggtaagaaactttatgcctgaataacatttagcagtattgtgattgaaaaattgccatattttgatgtataggacaagtcaactgagatccagagaatcctggatgtgaatgctaaacactggcccttaactcacattcaatgtattttcttcccataacatttagtatagttaatattttcttagaatttgagcccatttaagtggattaatattctacatgtgtgcccctaaagacacatttactcaatattggagaagtagataatgaattaagcaactggtctaggaaaggaaaatttgtttcaaatatgcaggaatgtttggatttggggagagtagaaggagagatttgcttgatttgttaacttctacctccaacccacaaaaaagatatttgatctgagtttctatcactaatttggatagaaaatttctaagggacatggtaatccagcattctcaaggacctttcgccaaaatgtgttttccatctatgtcccgattcccctaaattttgcctaaaattcagtatgttccttaagtttttaaaattctgagtgtgtacaaatatcttgacataatgcagttttatttttatcattctggtaaaaaaacaaaaaatagaagcaaaacacattgtattgccattattttgtatttggtaaaggttaatctaggaagttaccaactgtttaatgctatatgtattgtatacttgtattttcaggatattttattttttttgccatacagataaaatttgtaaggttgcccctttgtggcactggtgtgtaaaatacacagactatcactaaaataatagttatatatacatacaggtgtatacttatgcatgcatacataaatccttagtatagaaaaattgcataaagaatagcaatctttaataaacctttttattacattg

SEQ ID NO: 6378 - DNA, 5214 bp, Homo sapiens
  misc_feature (1)...(5214): n = A,T,C or G
ccgccgaaggctgtgccgccaaaagtagagctctgcagaggggtttgcggcgtgcacacaaagggcgcaggggaggcgccgcctggagcggaccccaaggggcagcgcagaccccagaggccagctctttctggtccagagccaagcgccggggcggcccttgcggagggcggggaggagggagcctgtccttttggaggcggctgcgcagcgggcagtcggggcgctcgtgggaaacgctcgcgggagagttggggaggaattgagactgggagcagagggacaagaagagtggagcagagagtgcttggcgggcgggtgccccgaagcctgaggaattgatgcatagtcggggtgcgtggactccaggacgcgcccctttgcagaaagagtccgtgccccgctgccgcctgctctgggcagcggccgtcgggcagcgggtgctggccgtcttggccgggagggtgacacacgcccggcagtgatggtcgaggagcccgcccgggttcgacgcccgggtcccactcgccggcgcgcggccgcggctctgccggtcgctccccgccaggggcggcgcacgcggtggcgagcgggaggcgacgggcggcggcgcggaggccggggccgtgagggagctggttctgagtcgccgacctcacctcacctcacctgcgcgcgttgttgcccctacggagcctcctggagtccaggatcggcggagttcgaaaacgaacttcccacgtttgctatgttgccctttggagacaaaacaagagaaatggtcaatgcatggtttgctgagagagttcacaccatccctgtgtgcaaggaaggtatcagaggccacaccgaatcttgctcttgtcccttgcagcagagtcctcgtgcagataacagtgnccctggaacaccaaccaggaaaatctctgcctctgaatttgaccggcctcttagacccattgttgtcaaggattctgagggaactgtgagcttcctctctgactcagaaaagaaggaacagatgcctctaacccctccaaggtttgatcatgatgaaggggaccagtgctcaagactcttggaattagtgaaggatatttctagtcatttggatgtcacagccttatgtcacaaaattttcttgcatatccatggactgatakctgctgaccgctattccctgttccttgtctgtgaagacagctccaatgacaagtttcttatcagccgcctctttgatgttgctgaaggttcaacactggaagaagtttcaaataactgtatccgcttagaatggaacaaaggcattgtgggacatgtggcagcgcttggtgagcccttgaacatcaaagatgcatatgaggatcctcggttcaatgcagaagttgaccaaattacaggctacaagacacaaagcattctttgtatgccaattaagaatcatagggaagaggttgttggtgtagcccaggccatcaacaagaaatcaggaaacggtgggacatttactgaaaaagatgaaaaggactttgctgcttatttggcattttgtggtattgttcttcataatgctcagctctatgagacttcactgctggagaacaagagaaatcaggtgctgcttgaccttgctagtttaatttttgaagaacaacaatcattagaagtaattttgaagaaaatagctgccactattatctctttcatgcaagtgcagaaatgcaccattttcatagtggatgaagattgctccgattctttttctagtgtgtttcacatggagtgtgaggaattagaaaaatcatctgatacattaacaagggaacatgatgcaaacaaaatcaattacatgtatgctcagtaygtcaaaaatactatggaaccacttaatatcccagatgtcagtaaggataaaagatttccctggacaactgaaaatacaggaaatgtaaaccagcagtgcattagaagtttgctttgtacacctataaaaaatggaaagaagaataaagttataggggtttgccaacttgttaataagatggaggagaatactggcaaggttaagcctttcaaccgaaatgacgaacagtttctggaagcttttgtcatcttttgtggcttggggatccagaacacgcagatgtatgaagcagtggagagagccatggccaagcaaatggtcacattggaggttctgtcgtatcatgcttcagcagcagaggaagaaacaagagagctacagtcgttagcggctgctgtggtgccatctgcccagacccttaaaattactgactttagcttcagtgactttgagctgtctgatctggaaacagcactgtgtacaattcggatgtttactgacctcaaccttgtgcagaacttccagatgaaacatgaggttctttgcagatggattttaagtgttaagaagaattatcggaagaatgttgcctatcataattggagacatgcctttaatacagctcagtgcatgtttgctgctctaaaagcaggcaaaattcagaacaagctgactgacctggagatacttgcattgctgattgctgcactaagccacgatttggatcaccgtggtgtgaataactcttacatacagcgaagtgaacatccmcttgcccagctttactgccattcaatcatggaacaccatcattttgaccagtgcctgatgattcttaatagtccaggcaatcagattctcagtggcctctccattgaagaatataagaccacgttgaaaataatcaagcaagctattttagctacagacctagcactgtacattaagaggcgaggagaattttttgaacttataagaaaaaatcaattcaatttggaagatcctcatcaaaaggagttgtttttggcaatgctgatgacagcttgtgatctttctgcaattacaaaaccctggcctattcaacaacggatagcagaacttgtagcaactgaattttttgatcaaggagacagagagagaaaagaactcaacatagaacccactgatctaatgaacagggagaagaaaaacaaaatcccaagtatgcaagttgggttcatagatgccatctgcttgcaactgtatgaggccctgacccacgtgtcagaggactgtttccctttgctagatggctgcagaaagaacaggcagaaatggcaggcccttgcagaacagcaggagaagatgctgattaatggggaaagcrgccaggccaagcggaactgagtggcctatttcatgcagagttgaagtttacagagatggtgtgttctgcaatatgcctagtttcttacacactgtctgtatagtgtctgtatttggtatatactttgccactgctgtatttttatttttgcacaacttttgagagtatagcatgaatgtttttagaggactattacatattttttgtatatttgttttatgctactgaactgaaaggatcaacaacatccactgttagcacattgataaaagcattgtttgtgatatttcgtgtactgcaaagtgtatgcagtattcttgcactgaggtttttttgcttggggattattttaaataattggtttttgtgttttctgaattaccattttttcaagaatgtttggaatctttcctttttcaaaagtaggttaggagcaaattatcatacattctgtgacatttaaagcctttataggatagtgaaaaatgctggctgagtggattttaagagaaataattgtatttgttaacagtgtctttttttaaaaagttaaggcactctgaaacaaatggaaagtcctatgaaactgtattgtaaagaaaacattatttaattgatatgctgttttgtgagagaacaggcaagacagaactttgtcacttcagtgcagtacatttttctgaaagctacccataaaatcactttcatctcacctacctgatgcaaagcaggtgaaaccttaggagatgatccagtcactgacttgattgagggataagtgtgatttagaaatggaatggccttggatgtctatcagtgaagaaaaatgttctgttagaagatctctctaagagtttttttccttctgagcttccttttcaaaataaaagtgacaattgtagcattgacttgaagtgagacatggttatagataagasagtacaaaatgactctttttcctgtcaattgaaatttaaagaaaagttttaattatataaatagcaaagggctattgccaatactagggtcaaaaatgaatttgagggaacagtgggtaagaaactttatgcctgaataacatttagcagtattgtgattgaaaaattgccatattttgatgtataggacaagtcaactgagatccagagaatcctggatgtgaatgctaaacactggcccttaactcacattcaatgtattttcttcccataacatttagtatagttaatattttcttagaatttgagcccatttaagtggattaatattctacatgtgtgcccctaaagacacatttactcaatattggagaagtagataatgaattaagcaactggtctaggaaaggaaaatttgtttcaaatatgcaggaatgtttggatttggggagagtagaaggagagatttgcttgatttgttaacttctacctccaacccacaaaaaagatatttgatctgagtttctatcactaatttggatagaaaatttctaagggacatggtaatccagcattctcaaggacctttcgccaaaatgtgttttccatctatgtcccgattcccctaaattttgcctaaaattcagtatgttccttaagtttttaaaattctgagtgtgtacaaatatcttgacataatgcagttttatttttatcattctggtaaaaaaacaaaaaatagaagcaaaacacattgtattgccattattttgtatttggtaaaggttaatctaggaagttaccaactgtttaatgctatatgtattgtatacttgtattttcaggatattttattttttttgccatacagataaaatttgtaaggttgcccctttgtggcactggtgtgtaaaatacacagactatcactaaaataatagttatatatacatacaggtgtatacttatgcatgcatacataaatccttagtatagaaaaattgcataaagaatagcaatctttaataaacctttttattacattg

SEQ ID NO: 6379 - DNA, 4884 bp, Homo sapiens
  misc_feature (1)...(4884): n = A,T,C or G
gccgcygccgccgccgccgccgcctcctgggaaccaggggactgaagagcctgcgagagcggaacactgccggaccccgggtgggggggcgcagcagctgcgcctggccccgcccaccacacctgggcgcccgtagaaccgcgcggggcggggcggggcaggaggctggcctggcgctccggccgctttgtcgaaagccggcccgactggagcaggacgaagggggagggtctcgaggccgagtcctgttcttctgagggacrgaccccagctggggtggaaaagcrgtaccagagagcctccgaggcgcgcggtgccaaccatggagcgggccggccccagcttcgggcagcagcgacagcagcagcagccccagcagcagaagcagcagcagagggatcaggactcggtcgaagcatggctggacgatcactgggactttaccttctcatactttgttagaaaagccaccagagaaatggtcaatgcatggtttgctgagagagttcacaccatccctgtgtgcaaggaaggtatcagaggccacaccgaatcttgctcttgtcccttgcagcagagtcctcgtgcagataacagtgnccctggaacaccaaccaggaaaatctctgcctctgaatttgaccggcctcttagacccattgttgtcaaggattctgagggaactgtgagcttcctctctgactcagaaaagaaggaacagatgcctctaacccctccaaggtttgatcatgatgaaggggaccagtgctcaagactcttggaattagtgaaggatatttctagtcatttggatgtcacagccttatgtcacaaaattttcttgcatatccatggactgatakctgctgaccgctattccctgttccttgtctgtgaagacagctccaatgacaagtttcttatcagccgcctctttgatgttgctgaaggttcaacactggaagaagtttcaaataactgtatccgcttagaatggaacaaaggcattgtgggacatgtggcagcgcttggtgagcccttgaacatcaaagatgcatatgaggatcctcggttcaatgcagaagttgaccaaattacaggctacaagacacaaagcattctttgtatgccaattaagaatcatagggaagaggttgttggtgtagcccaggccatcaacaagaaatcaggaaacggtgggacatttactgaaaaagatgaaaaggactttgctgcttatttggcattttgtggtattgttcttcataatgctcagctctatgagacttcactgctggagaacaagagaaatcaggtgctgcttgaccttgctagtttaatttttgaagaacaacaatcattagaagtaattttgaagaaaatagctgccactattatctctttcatgcaagtgcagaaatgcaccattttcatagtggatgaagattgctccgattctttttctagtgtgtttcacatggagtgtgaggaattagaaaaatcatctgatacattaacaagggaacatgatgcaaacaaaatcaattacatgtatgctcagtaygtcaaaaatactatggaaccacttaatatcccagatgtcagtaaggataaaagatttccctggacaactgaaaatacaggaaatgtaaaccagcagtgcattagaagtttgctttgtacacctataaaaaatggaaagaagaataaagttataggggtttgccaacttgttaataagatggaggagaatactggcaaggttaagcctttcaaccgaaatgacgaacagtttctggaagcttttgtcatcttttgtggcttggggatccagaacacgcagatgtatgaagcagtggagagagttctgtcgtatcatgcttcagcagcagaggaagaaacaagagagctacagtcgttagcggctgctgtggtgccatctgcccagacccttaaaattactgactttagcttcagtgactttgagctgtctgatctggaaacagcactgtgtacaattcggatgtttactgacctcaaccttgtgcagaacttccagatgaaacatgaggttctttgcagatggattttaagtgttaagaagaattatcggaagaatgttgcctatcataattggagacatgcctttaatacagctcagtgcatgtttgctgctctaaaagcaggcaaaattcagaacaagctgactgacctggagatacttgcattgctgattgctgcactaagccacgatttggatcaccgtggtgtgaataactcttacatacagcgaagtgaacatccmcttgcccagctttactgccattcaatcatggaacaccatcattttgaccagtgcctgatgattcttaatagtccaggcaatcagattctcagtggcctctccattgaagaatataagaccacgttgaaaataatcaagcaagctattttagctacagacctagcactgtacattaagaggcgaggagaattttttgaacttataagaaaaaatcaattcaatttggaagatcctcatcaaaaggagttgtttttggcaatgctgatgacagcttgtgatctttctgcaattacaaaaccctggcctattcaacaacggatagcagaacttgtagcaactgaattttttgatcaaggagacagagagagaaaagaactcaacatagaacccactgatctaatgaacagggagaagaaaaacaaaatcccaagtatgcaagttgggttcatagatgccatctgcttgcaactgtatgaggccctgacccacgtgtcagaggactgtttccctttgctagatggctgcagaaagaacaggcagaaatggcaggcccttgcagaacagcaggagaagatgctgattaatggggaaagcrgccaggccaagcggaactgagtggcctatttcatgcagagttgaagtttacagagatggtgtgttctgcaatatgcctagtttcttacacactgtctgtatagtgtctgtatttggtatatactttgccactgctgtatttttatttttgcacaacttttgagagtatagcatgaatgtttttagaggactattacatattttttgtatatttgttttatgctactgaactgaaaggatcaacaacatccactgttagcacattgataaaagcattgtttgtgatatttcgtgtactgcaaagtgtatgcagtattcttgcactgaggtttttttgcttggggattattttaaataattggtttttgtgttttctgaattaccattttttcaagaatgtttggaatctttcctttttcaaaagtaggttaggagcaaattatcatacattctgtgacatttaaagcctttataggatagtgaaaaatgctggctgagtggattttaagagaaataattgtatttgttaacagtgtctttttttaaaaagttaaggcactctgaaacaaatggaaagtcctatgaaactgtattgtaaagaaaacattatttaattgatatgctgttttgtgagagaacaggcaagacagaactttgtcacttcagtgcagtacatttttctgaaagctacccataaaatcactttcatctcacctacctgatgcaaagcaggtgaaaccttaggagatgatccagtcactgacttgattgagggataagtgtgatttagaaatggaatggccttggatgtctatcagtgaagaaaaatgttctgttagaagatctctctaagagtttttttccttctgagcttccttttcaaaataaaagtgacaattgtagcattgacttgaagtgagacatggttatagataagasagtacaaaatgactctttttcctgtcaattgaaatttaaagaaaagttttaattatataaatagcaaagggctattgccaatactagggtcaaaaatgaatttgagggaacagtgggtaagaaactttatgcctgaataacatttagcagtattgtgattgaaaaattgccatattttgatgtataggacaagtcaactgagatccagagaatcctggatgtgaatgctaaacactggcccttaactcacattcaatgtattttcttcccataacatttagtatagttaatattttcttagaatttgagcccatttaagtggattaatattctacatgtgtgcccctaaagacacatttactcaatattggagaagtagataatgaattaagcaactggtctaggaaaggaaaatttgtttcaaatatgcaggaatgtttggatttggggagagtagaaggagagatttgcttgatttgttaacttctacctccaacccacaaaaaagatatttgatctgagtttctatcactaatttggatagaaaatttctaagggacatggtaatccagcattctcaaggacctttcgccaaaatgtgttttccatctatgtcccgattcccctaaattttgcctaaaattcagtatgttccttaagtttttaaaattctgagtgtgtacaaatatcttgacataatgcagttttatttttatcattctggtaaaaaaacaaaaaatagaagcaaaacacattgtattgccattattttgtatttggtaaaggttaatctaggaagttaccaactgtttaatgctatatgtattgtatacttgtattttcaggatattttattttttttgccatacagataaaatttgtaaggttgcccctttgtggcactggtgtgtaaaatacacagactatcactaaaataatagttatatatacatacaggtgtatacttatgcatgcatacataaatccttagtatagaaaaattgcataaagaatagcaatctttaataaacctttttattacattg

SEQ ID NO: 6380 - DNA, 3898 bp, Homo sapiens
gctgccagtacttgacgtggcgtcaccgccctctaccctcgctttgcgtgcgtgtttgcgtacagcggaggtggcggcgcgggcaggtcggagctcggagctgctgttctggttctcttgtggccgccgtcgctgtccggctgccttgggctgccgaacagacaaggcgtgggccacagcacctcagaagccgacgcagctcgacgcaggggccggcaggagggtgggcgatcgcgtgtcggagggcgccgcgcgggcaggcgggcgggcgccagagggggaaagaggcgggggcggcgggtcagccgctggccgggccggccggggaatgtcgatgcctgacgcgatgccgctgcccggggtcggggaggagctgaagcaggccaaggagatcgaggacgccgagaagtactccttcatggccaccgtcaccaaggcgcccaagaagcaaatccagtttgctgatgacatgcaggagttcaccaaattccccaccaaaactggccgaagatctttgtctcgctcgatctcacagtcctccactgacagctacagttcagctgcatcctacacagatagctctgatgatgaggtttctccccgagagaagcagcaaaccaactccaagggcagcagcaatttctgtgtgaagaacatcaagcaggcagaatttggacgccgggagattgagattgcagagcaagacatgtctgctctgatttcactcaggaaacgtgctcagggggagaagcccttggctggtgctaaaatagtgggctgtacacacatcacagcccagacagcggtgttgattgagacactctgtgccctgggggctcagtgccgctggtctgcttgtaacatctactcaactcaraatgaagtagctgcagcactggctgaggctggagttgcagtgttcgcttggaagggcgagtcagaagatgacttctggtggtgtattgaccgctgtgtgaacatggatgggtggcaggccaacatgatcctggatgatgggggagacttaacccactgggtttataagaagtatccaaacgtgtttaagaagatccgaggcattgtggaagagagcgtgactggtgttcacaggctgtatcagctctccaaagctgggaagctctgtgttccggccatgaacgtcaatgattctgttaccaaacagaagtttgataacttgtactgctgccgagaatccattttggatggcctgaagaggaccacagatgtgatgtttggtgggaaacaagtggtggtgtgtggctatggtgaggtaggcaagggctgctgtgctgctctcaaagctcttggagcaattgtctacattaccgaaatcgaccccatctgtgctctgcaggcctgcatggatgggttcagggtggtaaagctaaatgaagtcatccggcaagtcgatgtcgtaataacttgcacaggaaataagaatgtagtgacacgggagcacttggatcgcatgaaaaacagttgtatcgtatgcaatatgggccactccaacacagaaatcgatgtgaccagcctccgcactccggagctgacgtgggagcgagtacgttctcaggtggaccatgtcatctggccagatggcaaacgagttgtcctcctggcagagggtcgtctactcaatttgagctgctccacagttcccacctttgttctgtccatcacagccacaacacaggctttggcactgatagaactctataatgcacccgaggggcgatacaagcaggatgtgtacttgcttcctaagaaaatggatgaatacgttgccagcttgcatctgccatcatttgatgcccaccttacagagctgacagatgaccaagcaaaatatctgggactcaacaaaaatgggccattcaaacctaattattacagatactaatggaccatactaccaaggaccagtccacctgaaccacacactctaaagaaatattttttaagataacttttattttcttcttactcctttcctcttgatttttttcctataatttcattcttgttttttcatctcattatccaagttctgcagaccacacaggaacttgcttcatggctctttagatgaaatagaagttcagggttcctcactctagtcactaaagaaggattttactctcccagcccaraaaggtgattctttctttaccatttctggggactttagtcttaattaggtaccttattaacaggaaatgctaaggtaccttctctgtggaacaatctgcaatgtctaaatcgccttaaaagagcccatttcttagctgctgaaatcagtgctctttcacttcttcagagaagcagggatggtacctacccggcaggtaggttagatgtgggtggtgcatgttaatttcccttagaagttccaagccctgtttcctgcktaaaggtggtatgtccagttcaragatgtgtataatgagcatggcttgttaagatcaggaggcccacttggatttatagtatagcccttcctccactcccaccagacttgctcatttttcgagtttttaactagactacactctattgagtttaattttgtcctctaggatttatttctgttgtccaaaaaaaaaaaaaaagaaaaraaaaattaaggagaatttttggtgttaatgctgaggaattgcttgagtggttagttgttaccaatttctcttttgaacctttggagctaaggatgctgagtctrgagaaatgctagtctcaagccctgttaagtccctctgtttctagcccgtagttcatagcatcagtgaactggagccacaacagcaaattctatcagctgtgtaccatacagcttgtgctgaaggcgaatttcttgagccattactcagtataaagcactgagttctatctttaggatttatctttaaragcaaatttctggtcagctgtgcttctgcaacctaaaatatttaaagggaggtaggtgtgggcaggaggaggaatgataaattgggccagggcaagaaaaatctagcttcatataatttgtctgggactatacaccctatataatgttagttttacagaagtaatatgacttttgattgctacataccacaaagagtttatgaactgagatcataaagggcaactgatgtgtgaagaaagtagtcagtacatcctggctcatgctctgaaagaatatccagagaggctctctcaaagatcagggagatgtattcccatgccatgcaccctgcttcccagcatttctgcatggtcaagtgagctttatgctcatgagctwtaagtatataattatccaggattttaaatcctcaacttgttctagcttgtgatccctcaaagttgggtcatacgttagtgctagatactagaaattttcacttttccactgatcagagagacagacattaaaaacaaaaatagaagaaaggaaagctttcaccctgcagcttcttagcagggaacaattgtcttgccaaaacttttttccctgtagatgttaacagttaaggcctattttcctcgggcacttaaccaaccaatcagaacaccacatctgttaggggaggtaacctggccaacagtgtatccatcacgttagccctgctggagggaagggacccacattcacctgccctctgacctgccccttgatcccatatctattaccgtgtccataggaataataggtaagggctctgtctctgtcaagccatgtaacaaaggacactgttaaaaaaaaaaaaaagtctggcatcagagggagcatgtggagagcaacttgggaagaacaagttcattttgtattgaatgatttttaatgaatgcaatattaatccttgcagatgagcaataatcattaaaatcgatt

SEQ ID NO: 6381 - DNA, 3074 bp, Homo sapiens
gctgccagtacttgacgtggcgtcaccgccctctaccctcgctttgcgtgcgtgtttgcgtacagcggaggtggcggcgcgggcaggtcggagctcggagctgctgttctggttctcttgtggccgccgtcgctgtccggctgccttgggctgccgaacagacaaggcgtgggccacagcacctcagaagccgacgcagctcgacgcaggggccggcaggagggtgggcgatcgcgtgtcggagggcgccgcgcgggcaggcgggcgggcgccagagggggaaagaggcgggggcggcgggtcagccgctggccgggccggccggggaatgtcgatgcctgacgcgatgccgctgcccggggtcggggaggagctgaagcaggccaaggagatcgaggacgccgagaagtactccttcatggccaccgtcaccaaggcgcccaagaagcaaatccagtttgctgatgacatgcaggagttcaccaaattccccaccaaaactggccgaagatctttgtctcgctcgatctcacagtcctccactgacagctacagttcagctgcatcctacacagatagctctgatgatgaggtttctccccgagagaagcagcaaaccaactccaagggcagcagcaatttctgtgtgaagaacatcaagcaggcagaatttggacgccgggagattgagattgcagagcaagacatgtctgctctgatttcactcaggaaacgtgctcagggggagaagcccttggctggtgctaaaatagtgggctgtacacacatcacagcccagacagcggtgttgattgagacactctgtgccctgggggctcagtgccgctggtctgcttgtaacatctactcaactcaraatgaagtagctgcagcactggctgaggctggagttgcagtgttcgcttggaagggcgagtcagaagatgacttctggtggtgtattgaccgctgtgtgaacatggatgggtggcaggccaacatgatcctggatgatgggggagacttaacccactgggtttataagaagtatccaaacgtgtttaagaagatccgaggcattgtggaagagagcgtgactggtgttcacaggctgtatcagctctccaaagctgggaagctctgtgttccggccatgaacgtcaatgattctgttaccaaacagaagtttgataacttgtactgctgccgagaatccattttggatggcctgaagaggaccacagatgtgatgtttggtgggaaacaagtggtggtgtgtggctatggtgaggtaggcaagggctgctgtgctgctctcaaagctcttggagcaattgtctacattaccgaaatcgaccccatctgtgctctgcaggcctgcatggatgggttcagggtggtaaagctaaatgaagtcatccggcaagtcgatgtcgtaataacttgcacaggaaataagaatgtagtgacacgggagcacttggatcgcatgaaaaacagttgtatcgtatgcaatatgggccactccaacacagaaatcgatgtgaccagcctccgcactccggagctgacgtgggagcgagtacgttctcaggtggaccatgtcatctggccagatggcaaacgagttgtcctcctggcagaggctttggcactgatagaactctataatgcacccgaggggcgatacaagcaggatgtgtacttgcttcctaagaaaatggatgaatacgttgccagcttgcatctgccatcatttgatgcccaccttacagagctgacagatgaccaagcaaaatatctgggactcaacaaaaatgggccattcaaacctaattattacagagaagcagggatggtacctacccggcagcccgtagttcatagcatcagtgaactggagccacaacagcaaattctatcagctgtgtaccatacagcttgtgctgaaggcgaatttcttgagccattactcagtataaagcactgagttctatctttaggatttatctttaaragcaaatttctggtcagctgtgcttctgcaacctaaaatatttaaagggaggtaggtgtgggcaggaggaggaatgataaattgggccagggcaagaaaaatctagcttcatataatttgtctgggactatacaccctatataatgttagttttacagaagtaatatgacttttgattgctacataccacaaagagtttatgaactgagatcataaagggcaactgatgtgtgaagaaagtagtcagtacatcctggctcatgctctgaaagaatatccagagaggctctctcaaagatcagggagatgtattcccatgccatgcaccctgcttcccagcatttctgcatggtcaagtgagctttatgctcatgagctwtaagtatataattatccaggattttaaatcctcaacttgttctagcttgtgatccctcaaagttgggtcatacgttagtgctagatactagaaattttcacttttccactgatcagagagacagacattaaaaacaaaaatagaagaaaggaaagctttcaccctgcagcttcttagcagggaacaattgtcttgccaaaacttttttcccttttctctcccattttcttttacccaatcccttcttactccttgccagtgtgaccatgctttcttctctgtagatgttaacagttaaggcctattttcctcgggcacttaaccaaccaatcagaacaccacatctgttaggggaggtaacctggccaacagtgtatccatcacgttagccctgctggagggaagggacccacattcacctgccctctgacctgccccttgatcccatatctattaccgtgtccataggaataataggtaagggctctgtctctgtcaagccatgtaacaaaggacactgttaaaaaaaaaaaaaagtctggcatcagagggagcatgtggagagcaacttgggaagaacaagttcattttgtattgaatgatttttaatgaatgcaatattaatccttgcagatgagcaataatcattaaaatcgattaaaatgataagaccttatt

SEQ ID NO: 6382 - DNA, 3553 bp, Homo sapiens
gctgccagtacttgacgtggcgtcaccgccctctaccctcgctttgcgtgcgtgtttgcgtacagcggaggtggcggcgcgggcaggtcggagctcggagctgctgttctggttctcttgtggccgccgtcgctgtccggctgccttgggctgccgaacagacaaggcgtgggccacagcacctcagaagccgacgcagctcgacgcaggggccggcaggagggtgggcgatcgcgtgtcggagggcgccgcgcgggcaggcgggcgggcgccagagggggaaagaggcgggggcggcgggtcagccgctggccgggccggccggggaatgtcgatgcctgacgcgatgccgctgcccggggtcggggaggagctgaagcaggccaaggagatcgaggacgccgagaagtactccttcatggccaccgtcaccaaggcgcccaagaagcaaatccagtttgctgatgacatgcaggagttcaccaaattccccaccaaaactggccgaagatctttgtctcgctcgatctcacagtcctccactgacagctacagttcagctgcatcctacacagatagctctgatgatgaggtttctccccgagagaagcagcaaaccaactccaagggcagcagcaatttctgtgtgaagaacatcaagcaggcagaatttggacgccgggagattgagattgcagagcaagacatgtctgctctgatttcactcaggaaacgtgctcagggggagaagcccttggctggtgctaaaatagtgggctgtacacacatcacagcccagacagcggtgttgattgagacactctgtgccctgggggctcagtgccgctggtctgcttgtaacatctactcaactcaraatgaagtagctgcagcactggctgaggctggagttgcagtgttcgcttggaagggcgagtcagaagatgacttctggtggtgtattgaccgctgtgtgaacatggatgggtggcaggccaacatgatcctggatgatgggggagacttaacccactgggtttataagaagtatccaaacgtgtttaagaagatccgaggcattgtggaagagagcgtgactggtgttcacaggctgtatcagctctccaaagctgggaagctctgtgttccggccatgaacgtcaatgattctgttaccaaacagaagtttgataacttgtactgctgccgagaatccattttggatggcctgaagaggaccacagatgtgatgtttggtgggaaacaagtggtggtgtgtggctatggtgaggtaggcaagggctgctgtgctgctctcaaagctcttggagcaattgtctacattaccgaaatcgaccccatctgtgctctgcaggcctgcatggatgggttcagggtggtaaagctaaatgaagtcatccggcaagtcgatgtcgtaataacttgcacaggaaataagaatgtagtgacacgggagcacttggatcgcatgaaaaacagttgtatcgtatgcaatatgggccactccaacacagaaatcgatgtgaccagcctccgcactccggagctgacgtgggagcgagtacgttctcaggtggaccatgtcatctggccagatggcaaacgagttgtcctcctggcagagggtcgtctactcaatttgagctgctccacagttcccacctttgttctgtccatcacagccacaacacaggctttggcactgatagaactctataatgcacccgaggggcgatacaagcaggatgtgtacttgcttcctaagaaaatggatgaatacgttgccagcttgcatctgccatcatttgatgcccaccttacagagctgacagatgaccaagcaaaatatctgggactcaacaaaaatgggccattcaaacctaattattacagatactaatggaccatactaccaaggaccagtccacctgaaccacacactctaaagaaatattttttaagataacttttattttcttcttactcctttcctcttgatttttttcctataatttcattcttgttttttcatctcattatccaagttctgcagaccacacaggaacttgcttcatggctctttagatgaaatagaagttcagggttcctcactctagtcactaaagaaggattttactctcccagcccaraaaggtgattctttctttaccatttctggggactttagtcttaattaggtaccttattaacaggaaatgctaaggtaccttctctgtggaacaatctgcaatgtctaaatcgccttaaaagagcccatttcttagctgctgaaatcagtgctctttcacttcttcagagaagcagggatggtacctacccggcaggtaggttagatgtgggtggtgcatgttaatttcccttagaagttccaagccctgtttcctgcktaaaggtggtatgtccagttcaragatgtgtataatgagcatggcttgttaagatcaggaggcccacttggatttatagtatagcccttcctccactcccaccagacttgctcatttttcgagtttttaactagactacactctattgagtttaattttgtcctctaggatttatttctgttgtccaaaaaaaaaaaaaaagaaaaraaaaattaaggagaatttttggtgttaatgctgaggaattgcttgagtggttagttgttaccaatttctcttttgaacctttggagctaaggatgctgagtctrgagaaatgctagtctcaagccctgttaagtccctctgtttctagcccgtagttcatagcatcagtgaactggagccacaacagcaaattctatcagctgtgtaccatacagcttgtgctgaaggcgaatttcttgagccattactcagtataaagcactgagttctatctttaggatttatctttaaragcaaatttctggtcagctgtgcttctgcaacctaaaatatttaaagggaggtaggtgtgggcaggaggaggaatgataaattgggccagggcaagaaaaatctagcttcatataatttgtctgggactatacaccctatataatgttagttttacagaagtaatatgacttttgattgctacataccacaaagagtttatgaactgagatcataaagggcaactgatgtgtgaagaaagtagtcagtacatcctggctcatgctctgaaagaatatccagagaggctctctcaaagatcagggagatgtattcccatgccatgcaccctgcttcccagcatttctgcatggtcaagtgagctttatgctcatgagctwtaagtatataattatccaggattttaaatcctcaacttgttctagcttgtgatccctcaaagttgggtcatacgttagtgctagatactagaaattttcacttttccactgatcagagagacagacattaaaaacaaaaatagaagaaaggaaagctttcaccctgcagcttcttagcagggaacaattgtcttgccaaaacttttttcccttttctctcccattttcttttacccaatcccttct

SEQ ID NO: 6383 - DNA, 2471 bp, Homo sapiens
acaaattggtccccaaaataaaaccactttaaaaaaatctactttttactaagtaacactatttcctaaccacagctgattctttaacctttcagactcagatggatttgcagaaaataggaaaaagcctagagtcctgatctggaactgtaattcttcctcttccaactgagtctagaggggtgtaaagtcctctcccgctttggcttgacttgtatgccattggaatctgagacagagctcatcccagggctctctcttacctttccagggtcgtctactcaatttgagctgctccacagttcccacctttgttctgtccatcacagccacaacacaggtatgtggcaaaatgcctgcttacactgcactgcaatttgtggaactgggcgtagatcagttccagtgagggtgtactgtactatgttctcatcatcctattcttttttgatgtaataaattgtggaaacaggtattcttaagtatagaaaagagtcactaagtcagtattcgttgaattggctgttttagttgagaatataatgttccagcttagttttatttgatttgttctttcgttaggaactaaacaaaaacaacaaatcctcttaggatgtgtgctgccctttagtataggcaaagtcctaggtactgtgactgtggtagatcactgtagtacttacccaaatgctgtttaacctggttttatttttatgtgcctgtctaagaaatatttttgtgctttctggccttcttttcccaccttaggctttggcactgatagaactctataatgcacccgaggggcgatacaagcaggatgtgtacttgcttcctaagaaaatgggtgagtgaaaaacagtggaaatctatgcagacagctgcatagtttggtaaaatgactgccatgaaaggcattggatttagagtcagagttccaattcctgttcctgtgcttactggttgtttgacctcaggacaagttctaatctctatgatcctcagtttcttgattggtaaaatgaaaataatactacatacattgtagaattgtgtgagaatcacagctaatgagtaacagtgcttaacacaatggtttagggagatgttcttactctaagtagccttatgaagttcagtaaacttcccagtgcagctgagtacatacagccttggaacaaaatgagagaaacaaacacaggttttattgtccattttctgtgaggatatgcaaaccatccaatctcttgtaagcaacccatgctgtgttcatgtgacataatacatcatctctagtcctttgcctttctgcacggtgtacccatctcccatatctccttggctagcccaaatccctgacttcttaatgctaaaatacttcttgctctcctctcctccaatagcttacttcagacttttttttcagtgtataattataaaagggaagcttatctatggaaaagtaaaaattctgtgccgactaccttagaaattcatgatcctaagatccatggatcttatcctaaatgagtgttattgacacagggtctttctagcttactggtgtccactttgattgctaatttgactataatctagttaaggaggttgctgcaggaaggtaggagtagcatgtgacatgtgggccactgcagggaagccccctgctttgccagagaaggatagagaggtaaaagcccactcccttttgttaccctggtaagtggcttttctgaacgcacygtacatgtgctgagagaagcaycctgcccagaaaggcagctttgaggttttttttttaattaagcaaatatttcaagttgtggattctttcagagttattccatcccttgtctgctttcttaaaaaagcttcaaatgaaaatgggaagttataacttgagagacattttgaaaaggagtctgctctcctgccactttgctcttcctagatgaatacgttgccagcttgcatctgccatcatttgatgcccaccttacagagctgacagatgaccaagcaaaatatctgggactcaacaaaaatgggccattcaaacctaattattacaggtaacctggggagaagcaagtgaaaagctctttttcccagtattaaaccaagcaggctagcctgcttctgacataaagatcaaatgttgtacctgattttgaagaatacaagaaatctgttccaggccaggcacggtggctcacgcctgtaatcccagcactttgagaggcctaggcggatggatcacttgaggtcaggagttcaagaccagcctggccaacatggcgaaaccctatctcttagccgggtgtggtggcgggcacctgtcatcccagttactcaggtggctgaggcacgagaatcacttgaacctgggaggcggaggttgcagtgagctggratcatgccactgcactccagcctgggtgatggagtgagactctgtcttaaaaacaaac

SEQ ID NO: 6384 - DNA, 3774 bp, Homo sapiens
attgcttctgactgtggaattggattctagctgtgtgtgtgttatatcctgttactgttgagacacagaggcgggagtcggcgggggaagatatgtgctgagattagtcagcctgccctccctctcccccaagaaactcaggccccatctggggagagtgagaacttaagaaacttgagacagggaaggagagccgggagcagccaaaacctgctaagtctcagaagactggtttctgcacaagggaatggaagaagtgactggaggtggctgtggattcaactctggcctgagattgattcccttgagataagttgttttctgcaaatccagtttgctgatgacatgcaggagttcaccaaattccccaccaaaactggccgaagatctttgtctcgctcgatctcacagtcctccactgacagctacagttcagctgcatcctacacagatagctctgatgatgaggtttctccccgagagaagcagcaaaccaactccaagggcagcagcaatttctgtgtgaagaacatcaagcaggcagaatttggacgccgggagattgagattgcagagcaagacatgtctgctctgatttcactcaggaaacgtgctcagggggagaagcccttggctggtgctaaaatagtgggctgtacacacatcacagcccagacagcggtgttgattgagacactctgtgccctgggggctcagtgccgctggtctgcttgtaacatctactcaactcaraatgaagtagctgcagcactggctgaggctggagttgcagtgttcgcttggaagggcgagtcagaagatgacttctggtggtgtattgaccgctgtgtgaacatggatgggtggcaggccaacatgatcctggatgatgggggagacttaacccactgggtttataagaagtatccaaacgtgtttaagaagatccgaggcattgtggaagagagcgtgactggtgttcacaggctgtatcagctctccaaagctgggaagctctgtgttccggccatgaacgtcaatgattctgttaccaaacagaagtttgataacttgtactgctgccgagaatccattttggatggcctgaagaggaccacagatgtgatgtttggtgggaaacaagtggtggtgtgtggctatggtgaggtaggcaagggctgctgtgctgctctcaaagctcttggagcaattgtctacattaccgaaatcgaccccatctgtgctctgcaggcctgcatggatgggttcagggtggtaaagctaaatgaagtcatccggcaagtcgatgtcgtaataacttgcacaggaaataagaatgtagtgacacgggagcacttggatcgcatgaaaaacagttgtatcgtatgcaatatgggccactccaacacagaaatcgatgtgaccagcctccgcactccggagctgacgtgggagcgagtacgttctcaggtggaccatgtcatctggccagatggcaaacgagttgtcctcctggcagagggtcgtctactcaatttgagctgctccacagttcccacctttgttctgtccatcacagccacaacacaggctttggcactgatagaactctataatgcacccgaggggcgatacaagcaggatgtgtacttgcttcctaagaaaatggatgaatacgttgccagcttgcatctgccatcatttgatgcccaccttacagagctgacagatgaccaagcaaaatatctgggactcaacaaaaatgggccattcaaacctaattattacagatactaatggaccatactaccaaggaccagtccacctgaaccacacactctaaagaaatattttttaagataacttttattttcttcttactcctttcctcttgatttttttcctataatttcattcttgttttttcatctcattatccaagttctgcagaccacacaggaacttgcttcatggctctttagatgaaatagaagttcagggttcctcactctagtcactaaagaaggattttactctcccagcccaraaaggtgattctttctttaccatttctggggactttagtcttaattaggtaccttattaacaggaaatgctaaggtaccttctctgtggaacaatctgcaatgtctaaatcgccttaaaagagcccatttcttagctgctgaaatcagtgctctttcacttcttcagagaagcagggatggtacctacccggcaggtaggttagatgtgggtggtgcatgttaatttcccttagaagttccaagccctgtttcctgcktaaaggtggtatgtccagttcaragatgtgtataatgagcatggcttgttaagatcaggaggcccacttggatttatagtatagcccttcctccactcccaccagacttgctcatttttcgagtttttaactagactacactctattgagtttaattttgtcctctaggatttatttctgttgtccaaaaaaaaaaaaaaagaaaaraaaaattaaggagaatttttggtgttaatgctgaggaattgcttgagtggttagttgttaccaatttctcttttgaacctttggagctaaggatgctgagtctrgagaaatgctagtctcaagccctgttaagtccctctgtttctagcccgtagttcatagcatcagtgaactggagccacaacagcaaattctatcagctgtgtaccatacagcttgtgctgaaggcgaatttcttgagccattactcagtataaagcactgagttctatctttaggatttatctttaaragcaaatttctggtcagctgtgcttctgcaacctaaaatatttaaagggaggtaggtgtgggcaggaggaggaatgataaattgggccagggcaagaaaaatctagcttcatataatttgtctgggactatacaccctatataatgttagttttacagaagtaatatgacttttgattgctacataccacaaagagtttatgaactgagatcataaagggcaactgatgtgtgaagaaagtagtcagtacatcctggctcatgctctgaaagaatatccagagaggctctctcaaagatcagggagatgtattcccatgccatgcaccctgcttcccagcatttctgcatggtcaagtgagctttatgctcatgagctwtaagtatataattatccaggattttaaatcctcaacttgttctagcttgtgatccctcaaagttgggtcatacgttagtgctagatactagaaattttcacttttccactgatcagagagacagacattaaaaacaaaaatagaagaaaggaaagctttcaccctgcagcttcttagcagggaacaattgtcttgccaaaacttttttccctgtagatgttaacagttaaggcctattttcctcgggcacttaaccaaccaatcagaacaccacatctgttaggggaggtaacctggccaacagtgtatccatcacgttagccctgctggagggaagggacccacattcacctgccctctgacctgccccttgatcccatatctattaccgtgtccataggaataataggtaagggctctgtctctgtcaagccatgtaacaaaggacactgttaaaaaaaaaaaaaagtctggcatcagagggagcatgtggagagcaacttgggaagaacaagttcattttgtattgaatgatttttaatgaatgcaatattaatccttgcagatgagcaataatcattaaaatcgatt

SEQ ID NO: 6385 - DNA, 3751 bp, Homo sapiens
cgcgggcaggtcggagctcggagctgctgttctggttctcttgtggccgccgtcgctgtccggctgccttgggctgccgaacagacaaggcgtgggccacagcacctcagaagccgacgcagctcgacgcaggggccggcaggagggcgatgccgctgcccggggtcggggaggagctgaagcaggccaaggagatcgaggacgccgagaagtactccttcatggccaccgtcaccaaggcgcccaagaagcaaatccagtttgctgatgacatgcaggagttcaccaaattccccaccaaaactggccgaagatctttgtctcgctcgatctcacagtcctccactgacagctacagttcagctgcatcctacacagatagctctgatgatgaggtttctccccgagagaagcagcaaaccaactccaagggcagcagcaatttctgtgtgaagaacatcaagcaggcagaatttggacgccgggagattgagattgcagagcaagacatgtctgctctgatttcactcaggaaacgtgctcagggggagaagcccttggctggtgctaaaatagtgggctgtacacacatcacagcccagacagcggtgttgattgagacactctgtgccctgggggctcagtgccgctggtctgcttgtaacatctactcaactcaraatgaagtagctgcagcactggctgaggctggagttgcagtgttcgcttggaagggcgagtcagaagatgacttctggtggtgtattgaccgctgtgtgaacatggatgggtggcaggccaacatgatcctggatgatgggggagacttaacccactgggtttataagaagtatccaaacgtgtttaagaagatccgaggcattgtggaagagagcgtgactggtgttcacagggcagcatggaacttgaagagaattaggcagattttgccacaaattatgttgtgccagctaacttggtttttgtttgtttttgtgacctcttctctctttaggctgtatcagctctccaaagctgggaagctctgtgttccggccatgaacgtcaatgattctgttaccaaacagaagtttgataacttgtactgctgccgagaatccattttggatggcctgaagaggaccacagatgtgatgtttggtgggaaacaagtggtggtgtgtggctatggtgaggtaggcaagggctgctgtgctgctctcaaagctcttggagcaattgtctacattaccgaaatcgaccccatctgtgctctgcaggcctgcatggatgggttcagggtggtaaagctaaatgaagtcatccggcaagtcgatgtcgtaataacttgcacaggaaataagaatgtagtgacacgggagcacttggatcgcatgaaaaacagttgtatcgtatgcaatatgggccactccaacacagaaatcgatgtgaccagcctccgcactccggagctgacgtgggagcgagtacgttctcaggtggaccatgtcatctggccagatggcaaacgagttgtcctcctggcagaggtacacacagagaaggaccctggcagagcagcacaagcagagtagttagatctatgaggggggaggggagggaaacaaatattaggcctatgtttccctgaattttatctttggagagagagatatttcacaaattggtccccaaaataaaaccactttaaaaaaatctactttttactaagtaacactatttcctaaccacagctgattctttaacctttcagactcagatggatttgcagaaaataggaaaaagcctagagtcctgatctggaactgtaattcttcctcttccaactgagtctagaggggtgtaaagtcctctcccgctttggcttgacttgtatgccattggaatctgagacagagctcatcccagggctctctcttacctttccagggtcgtctactcaatttgagctgctccacagttcccacctttgttctgtccatcacagccacaacacaggtatgtggcaaaatgcctgcttacactgcactgcaatttgtggaactgggcgtagatcagttccagtgagggtgtactgtactatgttctcatcatcctattcttttttgatgtaataaattgtggaaacaggtattcttaagtatagaaaagagtcactaagtcagtattcgttgaattggctgttttagttgagaatataatgttccagcttagttttatttgatttgttctttcgttaggaactaaacaaaaacaacaaatcctcttaggatgtgtgctgccctttagtataggcaaagtcctaggtactgtgactgtggtagatcactgtagtacttacccaaatgctgtttaacctggttttatttttatgtgcctgtctaagaaatatttttgtgctttctggccttcttttcccaccttaggctttggcactgatagaactctataatgcacccgaggggcgatacaagcaggatgtgtacttgcttcctaagaaaatgggtgagtgaaaaacagtggaaatctatgcagacagctgcatagtttggtaaaatgactgccatgaaaggcattggatttagagtcagagttccaattcctgttcctgtgcttactggttgtttgacctcaggacaagttctaatctctatgatcctcagtttcttgattggtaaaatgaaaataatactacatacattgtagaattgtgtgagaatcacagctaatgagtaacagtgcttaacacaatggtttagggagatgttcttactctaagtagccttatgaagttcagtaaacttcccagtgcagctgagtacatacagccttggaacaaaatgagagaaacaaacacaggttttattgtccattttctgtgaggatatgcaaaccatccaatctcttgtaagcaacccatgctgtgttcatgtgacataatacatcatctctagtcctttgcctttctgcacggtgtacccatctcccatatctccttggctagcccaaatccctgacttcttaatgctaaaatacttcttgctctcctctcctccaatagcttacttcagacttttttttcagtgtataattataaaagggaagcttatctatggaaaagtaaaaattctgtgccgactaccttagaaattcatgatcctaagatccatggatcttatcctaaatgagtgttattgacacagggtctttctagcttactggtgtccactttgattgctaatttgactataatctagttaaggaggttgctgcaggaaggtaggagtagcatgtgacatgtgggccactgcagggaagccccctgctttgccagagaaggatagagaggtaaaagcccactcccttttgttaccctggtaagtggcttttctgaacgcacygtacatgtgctgagagaagcaycctgcccagaaaggcagctttgaggttttttttttaattaagcaaatatttcaagttgtggattctttcagagttattccatcccttgtctgctttcttaaaaaagcttcaaatgaaaatgggaagttataacttgagagacattttgaaaaggagtctgctctcctgccactttgctcttcctagatgaatacgttgccagcttgcatctgccatcatttgatgcccaccttacagagctgacagatgaccaagcaaaatatctgggactcaacaaaaatgggccattcaaacctaattattacag

SEQ ID NO: 6386 - DNA, 1977 bp, Homo sapiens
atgatttactacctaacattctctctgcttttaggtacattggggctgacagtgacctactgttgccggggagaggaagaaaatatgatgatgagaattgcccagaaatgtaatatcaaccttctccctttaccagatcccattccttctggtctgatggaagaatgtgtggattgggatgtggaagttaaagctgctgtgcatacatatggtatagcaagtgtacctaaccaacccttaaaaaagcaaattcagaaaatagagagaacccttcaaattcagaaagctcatggtgaccacatggcttcctctagaaataattctgtatctggactatcagtcaaatmaaaaaataataccaaacaaaagcttcctgtgaaaagccactcagaatgtggaatcatagaaaaagcaacgtcaccaaaagaactgggctgtgacaggcaatccgaagagcaaatgaagaattctgttcagactcccgttgaaaactccaccaacagtcagcaccaggtcaaagaagctttacctgtgtcactcccccagattccttgtctgtcttcctttaaaatccatcagccatacacgttgacttttgmtgaattggtagaggattatgaacattatattaaagaggggttagagaaacctgtggaaatcatcaggcactacacaggccctggggatcagactgtgaatcctcaaaatggttttgtgagaaataaagttaytgaacagagagtccctktrttggcaagtagtagccaatctggagactctgagagtgacagtgattcttacagctcaagaacctcttcccagagcaaaggaaataagtcatacttggaaggctcttctgataatcagctgaaagactctgaatctacgcctgtggatgatmgtatttctttggaacaaccaccaaatggaagtgacacccccaatccagagaaatatcaagratcacctggaatccagatgaagacaagacttaaagagggggctagccagagagctaagcagagccggagaaacctacccaggcggtcttccttcagattgcagactgaagcccaggaagatgattggtatgactgtcatagggaaayacgtctgagtttttctgatacctatcaggattatgaggagtactggagagcttactacagggcatggcaagaatattatgctgccgcttctcattcatattattggaatgctcagagacatccaagttggatggcagcttatcacatgaataccatttatctacaagaaatgatgcatagtaaccagtgattataggatatacctgagaccatcaggaactgtcaacaaatgatacctttggatatccatcctcctcgacttatagtacagtggtgtatagtggcatttctgataaacttgaaaagacttgagtctttccactgggacacatccatttttcagattgttttgatttaggccaggtatattatcttcatttttaagagtttctttaagaaacttcatcagattgttgaaagataatttttggracatagagctgaaagtttcagggtgccattttctataagatcttcccaaaagaaacatttaaaaagatgacatataccaccacttacttaaaaacaataaaagcaatagatttgattagtaatattattgctgtggagttctttacaaagggcttaggctgcatttccttctatagaggtgcattcttgtagaaatttgtagcatggtagatcagaaaatcctcttaggttttaggcaggaaggaatatttaaacattgctttagattttcctaaaggtatttgatttgatctgttagcttccagtaaaaatatttgtttttagtaaaaacaaatttaaatatatttacatgtttgttgtttatcttttgaatgtcttttgaggctgtgaaagctgtccacatttttgctgtgtattaaatagctgtgggtcatca

SEQ ID NO: 6387 - DNA, 3506 bp, Homo sapiens
agaacggcgagagggcggtggcgccgggggcacggctgggcggctccgcccagaagagggccgagaggcggggcggtgcccccaccgcaggcccgcggcgccctctgcaggccacaggcagcgactcaccagttgcctcatctttcctctcctccctcttggggctttcctcaggccacattttttgtgtgtctgggcagtctctcagcctccgactcccgtccctttcttccacttccaggccgggcgtgttagtgtcttcgcgggaaaactgccaataaagtttttcttcttctcgctcccaagatccccgcctccccttaagcaccgcgagatctgacggcgcggctaccatggcggcggcatttgaagcctcgggagccttagcrgcagtggcgactgctatgccggctgagcatgtggccgtgcaggtcccggccccagagccaacacccgggcctgtgaggatcctgcggaccgctcaggatctcagcagcccgcggacccgcacgggggatgtgctgttggcggagccggccgacttcgagtcactgctgctttcgcggccggtgctggaggggctgcgggcggccggcttcgagaggccctcgccggtgcagctcaaggccatcccgytggggcgctgcgggctcgatttaattgttcaagctaaatctggcaccgggaaaacctgtgtgttctccaccatagctttggactctcttgttcttgaaaacttaagtacccagattttgatcttggctcctacaagagaaattgctgtacagatacattctgttattacagccattggaataaaaatggaaggcttagagtgtcatgtctttattggagggaccccattatcacaagacaaaaccagacttaaaaagtgtcatattgctgttggatctcctggcagaattaagcaactcatagaacttgactacttgaacccaggcagtatacgcctctttattcttgatgaagcagataagcttttagaagaaggcagcttccaggagcaaataaattggatttattcttccttgcctgccagtaaacagatgctggcagtatcagctacttatcccgaatttttggctaatgctttgacaaagtacatgagagatcccacttttgtaagactgaattccagtgatccaagtctcataggtttgaagcagtattacaaagttgtcaattcataccctttggcacataaggtttttgaggaaaagactcagcatttacaggaactgttcagcagaattccatttaatcaagctttagtcttttctaatttgcacagcagagcacaacatttggctgatatcctttcttctaaaggctttcctgctgagtgcatttcaggcaatatgaatcagaatcagcgtcttgatgctatggctaaactgaagcactttcattgcagagtcctcatttccacagatttgacttctcgtgggattgatgctgagaaggtgaatctggttgtaaatctggatgtaccattggattgggagacatacatgcatcggattgggagagctggccgttttggtacattggggctgacagtgacctactgttgccggggagaggaagaaaatatgatgatgagaattgcccagaaatgtaatatcaaccttctccctttaccagatcccattccttctggtctgatggaagaatgtgtggattgggatgtggaagttaaagctgctgtgcatacatatggtatagcaagtgtacctaaccaacccttaaaaaagcaaattcagaaaatagagagaacccttcaaattcagaaagctcatggtgaccacatggcttcctctagaaataattctgtatctggactatcagtcaaatmaaaaaataataccaaacaaaagcttcctgtgaaaagccactcagaatgtggaatcatagaaaaagcaacgtcaccaaaagaactgggctgtgacaggcaatccgaagagcaaatgaagaattctgttcagactcccgttgaaaactccaccaacagtcagcaccaggtcaaagaagctttacctgtgtcactcccccagattccttgtctgtcttcctttaaaatccatcagccatacacgttgacttttgmtgaattggtagaggattatgaacattatattaaagaggggttagagaaacctgtggaaatcatcaggcactacacaggccctggggatcagactgtgaatcctcaaaatggttttgtgagaaataaagttaytgaacagagagtccctktrttggcaagtagtagccaatctggagactctgagagtgacagtgattcttacagctcaagaacctcttcccagagcaaaggaaataagtcatacttggaaggctcttctgataatcagctgaaagactctgaatctacgcctgtggatgatmgtatttctttggaacaaccaccaaatggaagtgacacccccaatccagagaaatatcaagratcacctggaatccagatgaagacaagacttaaagagggggctagccagagagctaagcagagccggagaaacctacccaggcggtcttccttcagattgcagactgaagcccaggaagatgattggtatgactgtcatagggaaayacgtctgagtttttctgatacctatcaggattatgaggagtactggagagcttactacagggcatggcaagaatattatgctgccgcttctcattcatattattggaatgctcagagacatccaagttggatggcagcttatcacatgaataccatttatctacaagaaatgatgcatagtaaccagtgattataggatatacctgagaccatcaggaactgtcaacaaatgatacctttggatatccatcctcctcgacttatagtacagtggtgtatagtggcatttctgataaacttgaaaagacttgagtctttccactgggacacatccatttttcagattgttttgatttaggccaggtatattatcttcatttttaagagtttctttaagaaacttcatcagattgttgaaagataatttttggracatagagctgaaagtttcagggtgccattttctataagatcttcccaaaagaaacatttaaaaagatgacatataccaccacttacttaaaaacaataaaagcaatagatttgattagtaatattattgctgtggagttctttacaaagggcttaggctgcatttccttctatagaggtgcattcttgtagaaatttgtagcatggtagatcagaaaatcctcttaggttttaggcaggaaggaatatttaaacattgctttagattttcctaaaggtatttgatttgatctgttagcttccagtaaaaatatttgtttttagtaaaaacaaatttaaatatatttacatgtttgttgtttatcttttgaatgtcttttgaggctgtgaaagctgtccacatttttgctgtgtattaaatagctgtgggtcatca

SEQ ID NO: 6388 - DNA, 737 bp, Homo sapiens
gtcgaattaggggcactgtaaccagggtttgggttttgaagtagtgggtgttcgactttagagttgttttcctggaagcgctgatactggacttagtggaggagaacgacggtatcaatgtgtttctggatgactgcctggacaagggagttcagcttttgggagactgactgggctatgaagtgtacctttctactctgcagaggctggaaaggcaaaaatgatggctaaggcttccttgcaggagaggctgcccctccagaactagactcttccttggctttaagatgtgaagtcgagcagctggaaggacagacacctcatctgaccactgttctatggaccaaaggcaggatgagcatgccgctgatacagaagcctgagggaacacactcccccctacgtccttctccaacacagcagatcccakgagagtgactctggtcataggacttggtagggtcccagggtccctaggcctccacttctgagggcagcccctctggtgccaagagctctcctccaactcagggttggctgtgtctcttttcttctctgaagacagcgtcctggctccagttggaacactttcctgagatgcacttacttctcagcttctgcgatcagattatcatcaccaccaccctccagagaatttttacgcaagaagagccaaattgactctctaaatctggtgtatgggtattaaataaaattcattctcaaggctaataaar

SEQ ID NO: 6389 - DNA, 1192 bp, Homo sapiens
cagggttctacccggctgggtccaggcagaagkttttcctccccacctccgggtttgtcctcatcatcggtcactcccattcacagctttaagattctggaggccaagaatttgactccccycggatccatggtctgtggataccaatgttccgactggagacggggagcccgcgagacccgggtctccagggtctgcccaaggaagttgctcatgggagcagacctctagagcaggatttgaggccaggscaaagagaaccccagagatgaaaggyctcctcccactggcttggttcctggcttgtagtgtgcctgctgtgcaaggaggcttgctggacctaaaatcaatgatcgagaaggtgacagggaagaacgccctgacaaactacggcttctacggctgttactgyggctggggcggccgaggaacccccaaggatggcaccgattggtgctgttgggcgcatgaccactgctatgggcggctggaggagaagggctgcaacattcgcacacagtcctacaaatacagattcgcgtggggcgtggtcacctgcgagcccgggcccttctgccatgtgaacctctgtgcctgtgaccggaagctcgtctactgcctcaagagaaacctacggagctacaacccacagtaccaatactttcccaacatcctctgctcctaggcctccccagcgagctcctcccagaccaagacttttgttctgtttttctacaacacagagtactgactctgcctggttcctgagagaggctcctaagtcacagacctcagtctttctcgaagcttggcggacccccagggccacactgtaccctccagcgagtcccakgagagtgactctggtcataggacttggtagggtcccagggtccctaggcctccacttctgagggcagcccctctggtgccaagagctctcctccaactcagggttggctgtgtctcttttcttctctgaagacagcgtcctggctccagttggaacactttcctgagatgcacttacttctcagcttctgcgatcagattatcatcaccaccaccctccagagaatttttacgcaagaagagccaaattgactctctaaatctggtgtatgggtattaaataaaattcattctcaaggctaataaaaaccacattggcattttcctctgctgtggggga

SEQ ID NO: 6390 - DNA, 456 bp, Homo sapiens
atgctcattgcaacttcyttcttcctttttttctcatcggtggtggcagcccccacccacagcagtttctggcagtttcagaggagggtcaaacacatcacggggcgaagtgccttcttctcatattacggatatggctgctactgtgggcttggggataaagggatccccgtggatgacactgacaggcacagcccctcatctccctctccctacgagaagctgaaggagttcagctgccagcctgtgttgaacagctaccagttccacatcgtcaatggcgcagtgrtttgtggatgcacccttggtcctggtgccagctgccactgcaggctgaaggcctgtgagtgtgacaagcaatccgtgcactgcttcaaagagagcctgcccacctatgagaaaaacttcaagcagttctccagccrgcccaggtgtggcagacataagccctggtgc

SEQ ID NO: 6391 - DNA, 487 bp, Homo sapiens
ctgctttcttctgctgccttttatgctccttgtgcacctcccttccccscaacctgggatgaaatctccccacgtgctggtgttcctttgcctcctggtggctctggtcaccgggaacctggttcagtttggggtgatgatcgagaagatgacaggcaagtccgccctgcagtacaacgactatggctgttactgcggcatcggtggctcccactggcckgtggaccagactgactggtgctgccacgcccacgactgctgctacgggcrtctggagaagctgggctgtgagcccaaactggaaaagtatcttttctctgtcagcgaacgtggcattttctgcgccggcaggaccacctgccagcggctgacctgcgagtgtgacaagagggctgccctctgctttcgccrcaacctgggcacctacaaccgcaaatatgcccattatcccaacaagctgtgcaccgggcccaccccgccctgctga

SEQ ID NO: 6392 - DNA, 636 bp, Homo sapiens
atggcagatggggcaaaggccaaccccaaagggttcaaaaagaaggtgctggatagatgcttctctgggtggaggggcccacgcttcggggcctcctgtccttcaagaacctccaggtctagcctgggtatgaagaagttcttcaccgtggccatccttgctggcagcgttctgtccacagctcacggcagcctgctcaacctgaaggccatggtggaggccgtcacagggaggagcgccatcctgtccttcgtgggctacggttgctactgtgggctggggggccgtggccagcccaaggatgaggtggactggtgctgccacgcccacgactgctgctaccaggaactctttgaccaaggctgtcacccctatgtggaccactatgatcacaccatcgagaacaacactgagatagtctgcagtgacctcaacaagacagagtgtgacaagcagacatgcatgtgtgacaagaacatggttctgtgcctcatgaaccagacgtaccgagaggagtaccgtggcttcctcaatgtctactgccagggccccacgcccaactgcagcatctatgaaccgccccctgaggaggtcacctgcagtcaccaatccccagcrccccccgcccctccctag

SEQ ID NO: 6393 - DNA, 507 bp, Homo sapiens
atgaagaagttcttcaccgtggccatccttgctggcagcgttctgtccacagctcacggcagcctgctcaacctgaaggccatggtggaggccgtcacagggaggagcgccatcctgtccttcgtgggctacggttgctactgtgggctggggggccgtggccagcccaaggatgaggtggactggtgctgccacgcccacgactgctgctaccaggaactctttgaccaaggctgtcacccctatgtggaccactatgatcacaccatcgagaacaacactgagatagtctgcagtgacctcaacaagacagagtgtgacaagcagacatgcatgtgtgacaagaacatggttctgtgcctcatgaaccagacgtaccgagaggagtaccgtggcttcctcaatgtctactgccagggccccacgcccaactgcagcatctatgaaccgccccctgaggaggtcacctgcagtcaccaatccccagcrccccccgcccctccctag

SEQ ID NO: 6394 - DNA, 520 bp, Homo sapiens
gtctagcctgggtatgaagaagttcttcaccgtggccatccttgctggcagcgttctgtccacagctcacggcagcctgctcaacctgaaggccatggtggaggccgtcacagggaggagcgccatcctgtccttcgtgggctacggttgctactgtgggctggggggccgtggccagcccaaggatgaggtggactggtgctgccacgcccacgactgctgctaccaggaactctttgaccaaggctgtcacccctatgtggaccactatgatcacaccatcgagaacaacactgagatagtctgcagtgacctcaacaagacagagtgtgacaagcagacatgcatgtgtgacaagaacatggttctgtgcctcatgaaccagacgtaccgagaggagtaccgtggcttcctcaatgtctactgccagggccccacgcccaactgcagcatctatgaaccgccccctgaggaggtcacctgcagtcaccaatccccagcrccccccgcccctccctag

SEQ ID NO: 6395 - DNA, 1169 bp, Homo sapiens
ggacgaatyaagcggcgtggagatgcggcagccrctgagctggggccgctggcgcgcgatgcttgcccgaacctacggccccgggccttcggcgggttaccgctgggcctcgggcgcacagggttacgtgcggaatccgccagttggagcgtgcgatctgcagggcgagctggacagattcgggggcatctcggtgcgcctggcgcggctcgatgcgctggaccgcctggacgctgccgccttccagaagggcttgcaggctgcagtacagcaatggcgatcagaaggtagaacagctgtatggctgcacattcccatcctccaaagccgatttattgcccctgctgcttccctgggcttcygctttcaccacgcagaatcggattcatcaacgttgactctgtggctgagagaagggcccagcagattaccaggatatgcttcacatcaagtaggagttgcaggagctgtatttgatgaaagtactagaaaaatactggttgtacaagatcgaaataaattgaaaaatatgtggaagtttccaggaggcctgtcagagcctgaagaagatattggagacacagcggttcgagaagtttttgaagagactggtataaaatcagaattcaggtccgtcctgagtattcrgcaacagcacacaaatcctggagcttttgggaagtcagatatgtatatcatctgccgcctaaagccatattcattcaccataaatttttgccaggaagaatgcttaagatgtgagtggatggatctcaatgacctggcgaagactgaaaatacaactcccatcaccagcagagttgctaggctgctgctgtatgggtacagagaagggtttgacaaaattgacctgactgtggaagaacttccagcagtttacacaggactgttttataaactctatcataaggaactgccagagaattataaaactatgaaaggaattgattaaattcacatttatatgtttagaaacatgtagactaacgaatgacataagaaatagtggacattttggattgattaaacatctgactgtgattttctaatgtatatgatttccatgaagaaattttgtttctaaacatgcacattttaaaagcctcttttcgaataaagcaaatgcgtgaaaaagatcattgctctag

SEQ ID NO: 6396 - DNA, 1077 bp, Homo sapiens
agcagtctttgaaacagctgtaacggcatctgtgaaagaagataggttccaggaacggaactgccacttagattgtaaattcctgaaaaacaggacgtttttgcatctcctcccggcttccccatccctaaaccaacgtctgttgaattaaactaccaaacaaaataactgcagtacagcaatggcgatcagaaggtagaacagctgtatggctgcacattcccatcctccaaagccgatttattgcccctgctgcttccctgggcttcygctttcaccacgcagaatcggattcatcaacgttgactctgtggctgagagaagggcccagcagattaccaggatatgcttcacatcaagtaggagttgcaggagctgtatttgatgaaagtactagaaaaatactggttgtacaagatcgaaataaattgaaaaatatgtggaagtttccaggaggcctgtcagagcctgaagaagatattggagacacagcggttcgagaagtttttgaagagactggtataaaatcagaattcaggtccgtcctgagtattcrgcaacagcacacaaatcctggagcttttgggaagtcagatatgtatatcatctgccgcctaaagccatattcattcaccataaatttttgccaggaagaatgcttaagatgtgagtggatggatctcaatgacctggcgaagactgaaaatacaactcccatcaccagcagagttgctaggctgctgctgtatgggtacagagaagggtttgacaaaattgacctgactgtggaagaacttccagcagtttacacaggactgttttataaactctatcataaggaactgccagagaattataaaactatgaaaggaattgattaaattcacatttatatgtttagaaacatgtagactaacgaatgacataagaaatagtggacattttggattgattaaacatctgactgtgattttctaatgtatatgatttccatgaagaaattttgtttctaaacatgcacattttaaaagcctcttttcgaataaagcaaatgcgtgaaaaagatcattgctctag

SEQ ID NO: 6397 - DNA, 1164 bp, Homo sapiens
cgaatyaagcggcgtggagatgcggcagccrctgagctggggccgctggcgcgcgatgcttgcccgaacctacggccccgggccttcggcgggttaccgctgggcctcgggcgcacagggttacgtgcggaatccgccagttggagcgtgcgatctgcagggcgagctggacagattcgggggcatctcggtgcgcctggcgcggctcgatgcgctggaccgcctggacgctgccgccttccagaagggcttgcagggcaatacagcaatggcgatcagaaggtagaacagctgtatggctgcacattcccatcctccaaagccgatttattgcccctgctgcttccctgggcttcygctttcaccacgcagaatcggattcatcaacgttgactctgtggctgagagaagggcccagcagattaccaggatatgcttcacatcaagtaggagttgcaggagctgtatttgatgaaagtactagaaaaatactggttgtacaagatcgaaataaattgaaaaatatgtggaagtttccaggaggcctgtcagagcctgaagaagatattggagacacagcggttcgagaagtttttgaagagactggtataaaatcagaattcaggtccgtcctgagtattcrgcaacagcacacaaatcctggagcttttgggaagtcagatatgtatatcatctgccgcctaaagccatattcattcaccataaatttttgccaggaagaatgcttaagatgtgagtggatggatctcaatgacctggcgaagactgaaaatacaactcccatcaccagcagagttgctaggctgctgctgtatgggtacagagaagggtttgacaaaattgacctgactgtggaagaacttccagcagtttacacaggactgttttataaactctatcataaggaactgccagagaattataaaactatgaaaggaattgattaaattcacatttatatgtttagaaacatgtagactaacgaatgacataagaaatagtggacattttggattgattaaacatctgactgtgattttctaatgtatatgatttccatgaagaaattttgtttctaaacatgcacattttaaaagcctcttttcgaataaagcaaatgcgtgaaaaagatcattgctctag

SEQ ID NO: 6398 - DNA, 1515 bp, Homo sapiens
atgcggcagccrctgagctggggccgctggcgcgcgatgcttgcccgaacctacggccccgggccttcggcgggttaccgctgggcctcgggcgcacagggttacgtgcggaatccgccagttggagcgtgcgatctgcagggcgagctggacagattcgggggcatctcggtgcgcctggcgcggctcgatgcgctggaccgcctggacgctgccgccttccagaagggcttgcagtacagcaatggcgatcagaaggtagaacagctgtatggctgcacattcccatcctccaaagccgatttattgcccctgctgcttccctgggcttcygctttcaccacgcagaatcggattcatcaacgttgactctgtggctgagagaagggcccagcagattaccaggatatgcttcacatcaagtaggagttgcaggagctgtatttgatgaaagtactagaaaaatactggttgtacaagatcgaaataaattgaaaaatatgtggaagtttccaggaggcctgtcagagcctgaagaagatattggagacacagcggttcgagaagtttttgaagagactggtataaaatcagaattcaggtccgtcctgagtattcrgcaacagcacacaaatcctggagcttttgggaagtcagatatgtatatcatctgccgcctaaagccatattcattcaccataaatttttgccaggaagaatgcttaagatgtgagtggatggatctcaatgacctggcgaagactgaaaatacaactcccatcaccagcagagttgctaggctgctgctgtatgggtacagagaagggtttgacaaaattgacctgactgtggaagaacttccagcagtttacacaggactgttttataaactctatcataaggaactgccagagaattataaaactatgaaaggaattgattaaattcacatttatatgtttagaaacatgtagactaacgaatgacataagaaatagtggacattttggattgattaaacatctgactgtgattttctaatgtatatgatttccatgaagaaattttgtttctaaacatgcacattttaaaagcctcttttcgaataaagcaaatgcgtgaaaaagatcattgctctaggtttatgatcaagaatagaagcagaagggaaacaaagagtgaaaggaaaattcatagtaaccataaagacaacatgaaaggtcaccatggaacttcatagactgattccccagaggcatctaagacacatcaatgaacaaaactgaacaagatccctgcctttatgccactcaaattctagctgggggagacacacaataagcaataagcttaagtgaataaattatattctatgttagaatataagaaaacttagaaaaatgtaaacctgaacagggtaagagggactaggaatggtgagtggtagaagctaggtgcaatattaaatagcatggtcacagtaggctccattgagaaagtgacatttgagcaaat

SEQ ID NO: 6399 - DNA, 2340 bp, Homo sapiens
ctgatccgggccgggcgggaagtcgggtcccgaggctccggctcggcagaccgggcggaaagcagccgagcggccatggagctgtgcgggctggggctgccccggccgcccatgctgctggcgctgctgttggcgacactgctggcggcgatgttggcgctgctgactcaggtggcgctggtggtgcaggtggcggaggcggctcgggccccgagcgtctcggccaagccggggccggcgctgtggcccctgccgctctyggtgaagatgaccccgaacctgctgcatctcgccccggagaacttctacatcagccacagccccaattccacggcgggcccctcctgcaccctgctggaggaagcgtttcgacgatatcatggctatatttttggtttctacaagtggcatcatgaacctgctgaattccaggctaraacccaggttcagcaacttcttgtctcaatcacccttcagtcagagtgtgatgctttccccaacatatcttcagatgagtcttatactttacttgtgaaagaaccagtggctgtccttaaggccaacagagtttggggagcattacgaggtttagagacctttagccagttagtttatcaagattcttatggaactttcaccatcaatgaatccaccattattgattctccaaggttttctcacagaggaattttgrttgatacatccagacattatctgccagttaagattattcttaaaactctggatgccatggcttttaataagtttaatgttcttcactggcacatagttgatgaccagtctttcccatatcagagcatcacttttcctgagttaagcaataaaggaagctattctttgtctcatgtttatacaccaaatgatgtccgtatggtgattgaatatgccagattacgaggaattygagtcctgccagaatttgatacccctgggcatacactatcttggggaaaaggtcagaaagacctcctgactccatgttacagtagacaaaacaagttggactcttttggacctataaaccctactctgaatacaacatacagcttccttactacatttttcaaagaaattagtgaggtgtttccagatcaattcattcatttgggaggagatgaagtggaatttaaatgttgggaatcaaatccaaaaattcaagatttcatgaggcaaaaaggctttggcacagattttaagaaactagaatctttctacattcaaaaggttttggatattattgcaaccataaacaagggatccattgtctggcaggaggtttttgatgataaagcaaagcttgcgccgggcacaatagttgaagtatggaaagacagcgcatatcctgaggaactcagtagagtcmcagcatctggcttccctgtaatcctttctgctccttggtacttagatttgattagctmtggacaagattggaggaaatactataaagtggaacctcttgattttggcggtactcagaaacagaaacaacttttcattggtggagaagcttgtctatggggagaatatgtggatgcaactaacctcactccaagattatggcctcrggcaagtgctgttggtgagagactctggagttccaaagatgtcagagatatggatgacgcctatgacagactgacaaggcaccrctrcaggatggtcgaacgtggaatagctrcacaacctctttatgctggatattgtaaccatgagaacatgtaaaaaatggaggggaaaaaggccmcagcaatctgtactacaatcaactttattttgaaatcatgtaaaataagatattagactgttttttgaataaaatatttttattgattgaacctttgaccctctatcttattacatttagargcctggcatctttcttgtgagacaagcttaaggacacaaaagaaacacaactttgtgataccactcttctgaaggctacttatagtaataacttcatagatgaacagcatgattcaggtacagtggctttaaacatcaaagcacatttctcattatataaattaaaacgggtggctccagtgccactatcaaagcttaagttatatcttttatctagttctctgaatgtactgaaacagtactttattcgtccaataaataaagcaataaaaattgttcttactgaaaatgaagtagctaggtgctcctgaatttctctccaaaaactaaaacatttaggtcaaaccacttctcyggttgagcagtgtattttgatcttgaggattcatggcttgataagtagatagttctaaggcaaaagtagctgagcctgatgttagcgttcsaagc

SEQ ID NO: 6400 - DNA, 2351 bp, Homo sapiens
ctgatccgggccgggcgggaagtcgggtcccgaggctccggctcggcagaccgggcggaaagcagccgagcggccatggagctgtgcgggctggggctgccccggccgcccatgctgctggcgctgctgttggcgacactgctggcggcgatgttggcgctgctgactcaggtggcgctggtggtgcaggtggcggaggcggctcgggccccgagcgtctcggccaagccggggccggcgctgtggcccctgccgctctyggtgaagatgaccccgaacctgctgcatctcgccccggagaacttctacatcagccacagccccaattccacggcgggcccctcctgcaccctgctggaggaagcgtttcgacgatatcatggctatatttttggtttctacaagtggcatcatgaacctgctgaattccaggctaraacccaggttcagcaacttcttgtctcaatcacccttcagtcagagtgtgatgctttccccaacatatcttcagatgagtcttatactttacttgtgaaagaaccagtggctgtccttaaggccaacagagtttggggagcattacgaggtttagagacctttagccagttagtttatcaagattcttatggaactttcaccatcaatgaatccaccattattgattctccaaggttttctcacagaggaattttgrttgatacatccagacattatctgccagttaagattattcttaaaactctggatgccatggcttttaataagtttaatgttcttcactggcacatagttgatgaccagtctttcccatatcagagcatcacttttcctgagttaagcaataaaggaagctattctttgtctcatgtttatacaccaaatgatgtccgtatggtgattgaatatgccagattacgaggaattygagtcctgccagaatttgatacccctgggcatacactatcttggggaaaaggtcagaaagacctcctgactccatgttacagtagacaaaacaagttggactcttttggacctataaaccctactctgaatacaacatacagcttccttactacatttttcaaagaaattagtgaggtgtttccagatcaattcattcatttgggaggagatgaagtggaatttaaatgttgggaatcaaatccaaaaattcaagatttcatgaggcaaaaaggctttggcacagattttaagaaactagaatctttctacattcaaaaggttttggatattattgcaaccataaacaagggatccattgtctggcaggaggtttttgatgataaagcaaagcttgcgccgggcacaatagttgaagtatggaaagacagcgcatatcctgaggaactcagtagagtcmcagcatctggcttccctgtaatcctttctgctccttggtacttagatttgattagctmtggacaagattggaggaaatactataaagtggaacctcttgattttggcggtactcagaaacagaaacaacttttcattggtggagaagcttgtctatggggagaatatgtggatgcaactaacctcactccaagattatggcctcrggcaagtgctgttggtgagagactctggagttccaaagatgtcagagatatggatgacgcctatgacagactgacaaggcaccrctrcaggatggtcgaacgtggaatagctrcacaacctctttatgctggatattgtaaccatgagaacatgtaaaaaatggaggggaaaaaggccmcagcaatctgtactacaatcaactttattttgaaatcatgtaaaataagatattagactgttttttgaataaaatatttttattgattgaacctttgaccctctatcttattacatttagargcctggcatctttcttgtgagacaagcttaaggacacaaaagaaacacaactttgtgataccactcttctgaaggctacttatagtaataacttcatagatgaacagcatgattcaggttactgattgtctattcattggcatataatatcccctgaattaagaagaatatgtacttttcagttacaaagtacctaccataatttctgctaagggaacaaatccaataacaactttgttgtcctggcgagtctgaatttcctgaatgtttcctcttctttgtgccagatctgccaggacagggctgagataatctctagctactgtaacctcaagattcatcagaggctccaaaacttgcttatcagctttcttcagagcctaaagaaattaaagaatgttaacttatctttcataaataaaaacttaaaataaatacagcctagagctcatacaaaaaga

SEQ ID NO: 6401 - DNA, 3098 bp, Homo sapiens
cgaggcggtagagcggagaaagcctattttcttttcgtttagatacattrccttttgcctaggctggcgtcgagacttgaggccgttgcagactttggsgcggctcgcgcctcctgcttcaagagcccagcggtgagagctggcctgcggcacgcggcctaatgccagtcacaactgtggagagactatgaggccctgaactttggcgttaccaatgaaaagggaatggattcaaggccaggcatggtggctcacgcctgtaatcccagcactttgggaggccgagacagtaacagtttggaggatcaagatgttgaccaacttgaggatatttgcaatgagtcatcagacaatacccagtgtgtatattaataatatatgctgctataaaataagagcaagtttaaaaagattaaagccacatgtgccgcttggaagaaattgcagttctctaccaggcttaataggaaatgatatcaaatcccttcattccatcatcartcctcccatagctaaaatccgtaatattggaattatggctcatattgatgcaggcaaaactaccaccacagaaagaatattgtactattccggatatacaagatcactgggagatgttgatgatggagacacagtgacagatttcatggcccaagagcgagaaagaggcattactattcaatcagctgctgttacatttgattggaaaggttatagagtcaatctaattgatacaccaggtcatgtggactttaccttggaggttgagcggtgcctaagagtgttggatggtgcagtggctgtatttgatgcctctgctggtgtagaggcccagactctcacagtatggaggcaagctgataaacacaatatacctcgaatctgttttttaaacaagatggacaaaactggagcaagctttaagtatgcagttgaaagcatcagagagaagttaaaggcaaagcctttgcttttacagttaccaattggtgaagccaaaactttcaaaggagtggtggatgtagtaatgaaagaaaaacttctttggaattgcaattcaaatgatggaaaagactttgagagaaagcccctcttggaaatgaatgatcctgaattgctgaaggaaacaactgaagcaaggaatgccttaattgaacaagttgcagatttggatgatgaatttgctgacttggttttagaagaatttwgtgagaattttgatttrttaccagctgaaaagctacagactgcaatacatagagtgacactagctcagacagcagtgcctgtgctttgtggaagtgccctgaraaacaaagggatacagcccttgttagatgctgttactatgtacttaccttcacctgaagagcgtaactatgaatttctgcagtggtataaggatgacttatgtgcattggcatttaaagttctccatgacaagcagcgaggaccactggtttttatgcgcatttactcaggcactataaaaccccagttggccattcataatattaatggaaactgcacggagagaataagtcgtctgcttttgccgtttgctgaccaacatgtagaaatcccttcattgactgctggtaacattgctttgactgttgggcttaaacatactgccactggagacaccattgtctcatccaagtccagtgcattagctgcagctcgtagagccgaacgggagggagaaaagaagcacagacaaaacaatgaagcagagagacttttattggctggagtggagattccagaacctgttttcttctgtaccatagaacccccatcactgtctaagcagccagatttggaacatgcgttgaaatgtcttcagcgtgaagatcccagtttgaaagtgaggctagatcctgactctggacaaactgttctgtgtggtatgggggagttacatatagagattattcatgatcgaatcaagagggaatatggactggagacctatctcgggcctctccaggtggcatatcgagagaccatcctaaactcagttcgtgccacagataccttagatagaactttaggagacaaaaggcatcttgtgactgtagaagtggaagcaaggccaattgaaacatcatctgttatgcctgtgattgagtttgagtatgctgaaagtatcaatgaaggcyttttgaaggtctcccaagaggccaytgaaaatggaattcacagcgcatgtctccaaggaccattgcttggatccccaattcaggatgtagcaattactttacattccctgacaattcatcctggcacctccacaactatgatttctgcctgtgtctcaagatgcgtgcaaaaggctctgaagaaagctgataagcaagttttggagcctctgatgaatcttgaggttacagtagctagagattatctcagccctgtcctggcagatctggcacaaagaagaggaaacattcaggaaattcagactcgccaggacaacaaagttgttattggatttgttcccttagcagaaattatgggttattcaactgtgcttsgaacgctaacatcaggctcagctacttttgccttagaactatctacttatcaagccatgaatcctcaagatcaaaatacactgctcaaccrgagaagtggtttgacctaaatgttttagtttttggagagaaattcaggagcacctagctacttcattttcagtaagaacaatttttattgctttatttattggacgaataaagtactgtttcagtacattcagagaactagataaaagatataacttaagctttgatagtggcactggagccacccgttttaatttatataatgagaaatgtgctttgatgtttaaagccactgtacctgaatcatgctgttcatctatgaagttattactataagtagccttcagaagagtggtatcacaaagttgtgtttcttttgtgtccttaagcttgtctcacaagaaagatgccaggcytctaaatgtaataagatagagggtcaaaggttcaatcaataaaaatattttattcaaaaaacagtctaatatcttattttacatgatttcaaaataaagttgattgtagtac

SEQ ID NO: 6402 - DNA, 3246 bp, Homo sapiens
ctccttaccatggtgacggccgcagagccgccaggagcagccsctggagtgcgaaaacgctctcaattttcgggtctcaaagacccacaagcccacaccacgcaggccgggacaggaaagagtcaccytttaaaacggccgagtgaagagcaagaaccacgcagcggttccgagcctctgttttccgcttttagctaggaggacggaagttgctggcaggcggcatttggccggtacaccgccggaagtgtggaggtgtggctgcccgaggcggtagagcggagaaagcctattttcttttcgtttagatacattrccttttgcctaggctggcgtcgagacttgaggccgttgcagactttggsgcggctcgcgcctcctgcttcaagagcccagcggtgagagctggcctgcggcacgcggcctaatgccagacagtaacagtttggaggatcaagatgttgaccaacttgaggatatttgcaatgagtcatcagacaatacccagtgtgtatattaataatatatgctgctataaaataagagcaagtttaaaaagattaaagccacatgtgccgcttggaagaaattgcagttctctaccaggcttaataggaaatgatatcaaatcccttcattccatcatcartcctcccatagctaaaatccgtaatattggaattatggctcatattgatgcaggcaaaactaccaccacagaaagaatattgtactattccggatatacaagatcactgggagatgttgatgatggagacacagtgacagatttcatggcccaagagcgagaaagaggcattactattcaatcagctgctgttacatttgattggaaaggttatagagtcaatctaattgatacaccaggtcatgtggactttaccttggaggttgagcggtgcctaagagtgttggatggtgcagtggctgtatttgatgcctctgctggtgtagaggcccagactctcacagtatggaggcaagctgataaacacaatatacctcgaatctgttttttaaacaagatggacaaaactggagcaagctttaagtatgcagttgaaagcatcagagagaagttaaaggcaaagcctttgcttttacagttaccaattggtgaagccaaaactttcaaaggagtggtggatgtagtaatgaaagaaaaacttctttggaattgcaattcaaatgatggaaaagactttgagagaaagcccctcttggaaatgaatgatcctgaattgctgaaggaaacaactgaagcaaggaatgccttaattgaacaagttgcagatttggatgatgaatttgctgacttggttttagaagaatttwgtgagaattttgatttrttaccagctgaaaagctacagactgcaatacatagagtgacactagctcagacagcagtgcctgtgctttgtggaagtgccctgaraaacaaagggatacagcccttgttagatgctgttactatgtacttaccttcacctgaagagcgtaactatgaatttctgcagtggtataaggatgacttatgtgcattggcatttaaagttctccatgacaagcagcgaggaccactggtttttatgcgcatttactcaggcactataaaaccccagttggccattcataatattaatggaaactgcacggagagaataagtcgtctgcttttgccgtttgctgaccaacatgtagaaatcccttcattgactgctggtaacattgctttgactgttgggcttaaacatactgccactggagacaccattgtctcatccaagtccagtgcattagctgcagctcgtagagccgaacgggagggagaaaagaagcacagacaaaacaatgaagcagagagacttttattggctggagtggagattccagaacctgttttcttctgtaccatagaacccccatcactgtctaagcagccagatttggaacatgcgttgaaatgtcttcagcgtgaagatcccagtttgaaagtgaggctagatcctgactctggacaaactgttctgtgtggtatgggggagttacatatagagattattcatgatcgaatcaagagggaatatggactggagacctatctcgggcctctccaggtggcatatcgagagaccatcctaaactcagttcgtgccacagataccttagatagaactttaggagacaaaaggcatcttgtgactgtagaagtggaagcaaggccaattgaaacatcatctgttatgcctgtgattgagtttgagtatgctgaaagtatcaatgaaggcyttttgaaggtctcccaagaggccaytgaaaatggaattcacagcgcatgtctccaaggaccattgcttggatccccaattcaggatgtagcaattactttacattccctgacaattcatcctggcacctccacaactatgatttctgcctgtgtctcaagatgcgtgcaaaaggctctgaagaaagctgataagcaagttttggagcctctgatgaatcttgaggttacagtagctagagattatctcagccctgtcctggcagatctggcacaaagaagaggaaacattcaggaaattcagactcgccaggacaacaaagttgttattggatttgttcccttagcagaaattatgggttattcaactgtgcttsgaacgctaacatcaggctcagctacttttgccttagaactatctacttatcaagccatgaatcctcaagatcaaaatacactgctcaaccrgagaagtggtttgacctaaatgttttagtttttggagagaaattcaggagcacctagctacttcattttcagtaagaacaatttttattgctttatttattggacgaataaagtactgtttcagtacattcagagaactagataaaagatataacttaagctttgatagtggcactggagccacccgttttaatttatataatgagaaatgtgctttgatgtttaaagccactgtacctgaatcatgctgttcatctatgaagttattactataagtagccttcagaagagtggtatcacaaagttgtgtttcttttgtgtccttaagcttgtctcacaagaaagatgccaggcytctaaatgtaataagatagagggtcaaaggttcaatcaataaaaatattttattcaaaaaacagtctaatatcttattttacatgatttcaaaataaagttgattgtagtac

SEQ ID NO: 6403 - DNA, 2834 bp, Homo sapiens
cgtttagatacattrccttttgcctaggctggcgtcgagacttgaggccgttgcagactttggsgcggctcgcgcctcctgcttcaagagcccagcggtgagagctggcctgcggcacgcggcctaatgccagttttttgattttgtatatttattttttcagacagtaacagtttggaggatcaagatgttgaccaacttgaggatatttgcaatgagtcatcagacaatacccagtgtgtatattaataatatatgctgctataaaataagagcaagtttaaaaagattaaagccacatgtgccgcttggaagaaattgcagttctctaccaggcttaataggaaatgatatcaaatcccttcattccatcatcartcctcccatagctaaaatccgtaatattggaattatggctcatattgatgcaggcaaaactaccaccacagaaagaatattgtactattccggatatacaagatcactgggagatgttgatgatggagacacagtgacagatttcatggcccaagagcgagaaagaggcattactattcaatcagctgctgttacatttgattggaaaggttatagagtcaatctaattgatacaccaggtcatgtggactttaccttggaggttgagcggtgcctaagagtgttggatggtgcagtggctgtatttgatgcctctgctggtgtagaggcccagactctcacagtatggaggcaagctgataaacacaatatacctcgaatctgttttttaaacaagatggacaaaactggagcaagctttaagtatgcagttgaaagcatcagagagaagttaaaggcaaagcctttgcttttacagttaccaattggtgaagccaaaactttcaaaggagtggtggatgtagtaatgaaagaaaaacttctttggaattgcaattcaaatgatggaaaagactttgagagaaagcccctcttggaaatgaatgatcctgaattgctgaaggaaacaactgaagcaaggaatgccttaattgaacaagttgcagatttggatgatgaatttgctgacttggttttagaagaatttwgtgagaattttgatttrttaccagctgaaaagctacagactgcaatacatagagtgacactagctcagacagcagtgcctgtgctttgtggaagtgccctgaraaacaaagggatacagcccttgttagatgctgttactatgtacttaccttcacctgaagagcgtaactatgaatttctggagagaataagtcgtctgcttttgccgtttgctgaccaacatgtagaaatcccttcattgactgctggtaacattgctttgactgttgggcttaaacatactgccactggagacaccattgtctcatccaagtccagtgcattagctgcagctcgtagagccgaacgggagggagaaaagaagcacagacaaaacaatgaagcagagagacttttattggctggagtggagattccagaacctgttttcttctgtaccatagaacccccatcactgtctaagcagccagatttggaacatgcgttgaaatgtcttcagcgtgaagatcccagtttgaaagtgaggctagatcctgactctggacaaactgttctgtgtggtatgggggagttacatatagagattattcatgatcgaatcaagagggaatatggactggagacctatctcgggcctctccaggtggcatatcgagagaccatcctaaactcagttcgtgccacagataccttagatagaactttaggagacaaaaggcatcttgtgactgtagaagtggaagcaaggccaattgaaacatcatctgttatgcctgtgattgagtttgagtatgctgaaagtatcaatgaaggcyttttgaaggtctcccaagaggccaytgaaaatggaattcacagcgcatgtctccaaggaccattgcttggatccccaattcaggatgtagcaattactttacattccctgacaattcatcctggcacctccacaactatgatttctgcctgtgtctcaagatgcgtgcaaaaggctctgaagaaagctgataagcaagttttggagcctctgatgaatcttgaggttacagtagctagagattatctcagccctgtcctggcagatctggcacaaagaagaggaaacattcaggaaattcagactcgccaggacaacaaagttgttattggatttgttcccttagcagaaattatgggttattcaactgtgcttsgaacgctaacatcaggctcagctacttttgccttagaactatctacttatcaagccatgaatcctcaagatcaaaatacactgctcaaccrgagaagtggtttgacctaaatgttttagtttttggagagaaattcaggagcacctagctacttcattttcagtaagaacaatttttattgctttatttattggacgaataaagtactgtttcagtacattcagagaactagataaaagatataacttaagctttgatagtggcactggagccacccgttttaatttatataatgagaaatgtgctttgatgtttaaagccactgtacctgaatcatgctgttcatctatgaagttattactataagtagccttcagaagagtggtatcacaaagttgtgtttcttttgtgtccttaagcttgtctcacaagaaagatgccaggcytctaaatgtaataagatagagggtcaaaggttcaatcaataaaaatattttattcaaaaaacagtctaatatcttattttacatgatttcaaaataaagttgattgtagtac

SEQ ID NO: 6404 - DNA, 2975 bp, Homo sapiens
cgtttagatacattrccttttgcctaggctggcgtcgagacttgaggccgttgcagactttggsgcggctcgcgcctcctgcttcaagagcccagcggtgagagctggcctgcggcacgcggcctaatgccagttttttgattttgtatatttattttttcagacagtaacagtttggaggatcaagatgttgaccaacttgaggatatttgcaatgagtcatcagacaatacccagtgtgtatattaataatatatgctgctataaaataagagcaagtttaaaaagattaaagccacatgtgccgcttggaagaaattgcagttctctaccaggcttaataggaaatgatatcaaatcccttcattccatcatcartcctcccatagctaaaatccgtaatattggaattatggctcatattgatgcaggcaaaactaccaccacagaaagaatattgtactattccggatatacaagatcactgggagatgttgatgatggagacacagtgacagatttcatggcccaagagcgagaaagaggcattactattcaatcagctgctgttacatttgattggaaaggttatagagtcaatctaattgatacaccaggtcatgtggactttaccttggaggttgagcggtgcctaagagtgttggatggtgcagtggctgtatttgatgcctctgctggtgtagaggcccagactctcacagtatggaggcaagctgataaacacaatatacctcgaatctgttttttaaacaagatggacaaaactggagcaagctttaagtatgcagttgaaagcatcagagagaagttaaaggcaaagcctttgcttttacagttaccaattggtgaagccaaaactttcaaaggagtggtggatgtagtaatgaaagaaaaacttctttggaattgcaattcaaatgatggaaaagactttgagagaaagcccctcttggaaatgaatgatcctgaattgctgaaggaaacaactgaagcaaggaatgccttaattgaacaagttgcagatttggatgatgaatttgctgacttggttttagaagaatttwgtgagaattttgatttrttaccagctgaaaagctacagactgcaatacatagagtgacactagctcagacagcagtgcctgtgctttgtggaagtgccctgaraaacaaagggatacagcccttgttagatgctgttactatgtacttaccttcacctgaagagcgtaactatgaatttctgcagtggtataaggatgacttatgtgcattggcatttaaagttctccatgacaagcagcgaggaccactggtttttatgcgcatttactcaggcactataaaaccccagttggccattcataatattaatggaaactgcacggagagaataagtcgtctgcttttgccgtttgctgaccaacatgtagaaatcccttcattgactgctggtaacattgctttgactgttgggcttaaacatactgccactggagacaccattgtctcatccaagtccagtgcattagctgcagctcgtagagccgaacgggagggagaaaagaagcacagacaaaacaatgaagcagagagacttttattggctggagtggagattccagaacctgttttcttctgtaccatagaacccccatcactgtctaagcagccagatttggaacatgcgttgaaatgtcttcagcgtgaagatcccagtttgaaagtgaggctagatcctgactctggacaaactgttctgtgtggtatgggggagttacatatagagattattcatgatcgaatcaagagggaatatggactggagacctatctcgggcctctccaggtggcatatcgagagaccatcctaaactcagttcgtgccacagataccttagatagaactttaggagacaaaaggcatcttgtgactgtagaagtggaagcaaggccaattgaaacatcatctgttatgcctgtgattgagtttgagtatgctgaaagtatcaatgaaggcyttttgaaggtctcccaagaggccaytgaaaatggaattcacagcgcatgtctccaaggaccattgcttggatccccaattcaggatgtagcaattactttacattccctgacaattcatcctggcacctccacaactatgatttctgcctgtgtctcaagatgcgtgcaaaaggctctgaagaaagctgataagcaagttttggagcctctgatgaatcttgaggttacagtagctagagattatctcagccctgtcctggcagatctggcacaaagaagaggaaacattcaggaaattcagactcgccaggacaacaaagttgttattggatttgttcccttagcagaaattatgggttattcaactgtgcttsgaacgctaacatcaggctcagctacttttgccttagaactatctacttatcaagccatgaatcctcaagatcaaaatacactgctcaaccrgagaagtggtttgacctaaatgttttagtttttggagagaaattcaggagcacctagctacttcattttcagtaagaacaatttttattgctttatttattggacgaataaagtactgtttcagtacattcagagaactagataaaagatataacttaagctttgatagtggcactggagccacccgttttaatttatataatgagaaatgtgctttgatgtttaaagccactgtacctgaatcatgctgttcatctatgaagttattactataagtagccttcagaagagtggtatcacaaagttgtgtttcttttgtgtccttaagcttgtctcacaagaaagatgccaggcytctaaatgtaataagatagagggtcaaaggttcaatcaataaaaatattttattcaaaaaacagtctaatatcttattttacatgatttcaaaataaagttgattgtagtac

SEQ ID NO: 6405 - DNA, 2371 bp, Homo sapiens
acttccgggagcctggggcccaggactgcagcggcttcggaaggtgggctctgccagcgggaccatgctgctccgagccgcttggaggcgggcggcagtggcggtgacagcggctccagggccgaagcccgcggcgcccactcgggggctgcgcctgcgcgttggagaccgtgctcctcagtctgcggttcccgcagatacagccgctgccccggaggtggggccagtgctgcgacctctctatatggatgtgcaagctacaactcctctggacccccgggtgcttgatgccatgctcccttacctaatcaactactatgggaacccacactcccggacacatgcttatggctgggagagtgaggcagccatggaacgtgctcgtcagcaagtagcatctctgattggagctgatcctcgtgagatcatttttactagtggtgctactgaatccaacaacatagcaattaagggggtggcccgattctacaggtcacggaaaaagcacttgatcaccacccagacagaacacaaatgtgtcttggactcctgccgttcactggaagctgagggctttcaggtcacctwcctcccagtgcagaagagtgggatcattgacctaaaggaactagaggctgctatccagccagatactagcctggtgtcagtcatgactgtgaacaatgagattggagtgaagcagcctattgcagaaatagggcggatttgcagttccagaaaggtatatttccatactgatgcagcccaggctgttggaaaaatcccacttgatgtcaatgacatgaaaattgatctcatgagcattagtggtcacaaaatctacggtcccaaaggggttggtgccatctacatccgtcgccggccccgtgtgcgtgtggaggccctgcagagtggaggggggcaggagcggggtatgcggtctgggacagtgcccacacccttagtggtggggctgggggctgcgtgtgaggtggcacagcaagagatggagtatgaccacaagcgaatctcaaagttgtcagagcggctgatacagaatataatgaagagccttccagatgtggtgatgaatggggaccctaagcaccattatcccggctgtatcaacctctcctttgcatatgtggaaggggaaagtctgctgatggcactgaaggacgttgccttatcctcagggagtgcctgcacctctgcatccctggagccctcttatgtgcttagagcaattggcactgatgaggatttagcgcactcttctatcaggtttggaattggccgcttcactacagaggaggaagtggactacacagtggagaaatgcattcagcatgtgaagcgtcttcgagaaatgagccctctctgggagatggttcaggatggcattgacctcaagagcatcaagtggacccaacactagaagaatagggccctgactttgtgctggtctggcccctcctgcctcaccaacccgtgcacaaccagacaccttgttacacctagtggatgctctagattggtatagaccagttgacttcagcatcagtccacctctatgacagaaacacaagaaaactgtctttccctagcttcagttccttgggtgtggagcrctccccatttcttctcgggtcttaaagtgtgtggacattttcatcccgaagccatagagacatttgctgtcatattgctgctgggcacatctgtgctcttggtgaggagagcaagaggaaccagaagaagtctctttggtcagggaccatgatgctctacatggacatttgagtcttcgtcttctgctgctgctcggctggaccagcttctttaacagcaagcataatccacttcaatgtaatattttctgtagctccaaaggctatctcttcatattgactgcagacagactgaatggacagtttcttagagggcttgtctcctttctacccttgtcctctttcctttcctttgacctaatggagctagaaatatgtctgtgactccaccagttattctaataatttgttttcttgaaaattgttaatttcaagactggagaaataaactcaccttctatttactctgtgactttatgagaggttgagggaaaagtggaagctgtacttgggaattgtggagaagaccgccactccatctgatttgcataaatgactcagtgggcttttgtatctcttcatttaagaattatttgaatgcctgccaggagccagatttgttctgggtattaggaatacactggttaacaggaccaaaaaagaccctgccctcactgagttttaaattttagtggagagatggaaaataattaaacaaataaacaatgttatagattgtg

SEQ ID NO: 6406 - DNA, 1724 bp, Homo sapiens
acttccgggagcctggggcccaggactgcagcggcttcggaaggtgggctctgccagcgggaccatgctgctccgagccgcttggaggcgggcggcagtggcggtgacagcggctccagggccgaagcccgcggcgcccactcgggggctgcgcctgcgcgttggagaccgtgctcctcagtctgcggttcccgcagatacagccgctgccccggaggtggggccagtgctgcgacctctctatatggatgtgcaagctacaactcctctggacccccgggtgcttgatgccatgctcccttacctaatcaactactatgggaacccacactcccggacacatgcttatggctgggagagtgaggcagccatggaacgtgctcgtcagcaagtagcatctctgattggagctgatcctcgtgagatcatttttactagtggtgctactgaatccaacaacatagcaattaagggggtggcccgattctacaggtcacggaaaaagcacttgatcaccacccagacagaacacaaatgtgtcttggactcctgccgttcactggaagctgagggctttcaggtcacctwcctcccagtgcagaagagtgggatcattgacctaaaggaactagaggctgctatccagccagatactagcctggtgtcagtcatgactgtgaacaatgagattggagtgaagcagcctattgcagaaatagggcggatttgcagttccagaaaggtatatttccatactgatgcagcccaggctgttggaaaaatcccacttgatgtcaatgacatgaaaattgatctcatgagcattagtggtcacaaaatctacggtcccaaaggggttggtgccatctacatccgtcgccggccccgtgtgcgtgtggaggccctgcagagtggaggggggcaggagcggggtatgcggtctgggacagtgcccacacccttagtggtggggctgggggctgcgtgtgaggtggcacagcaagagatggagtatgaccacaagcgaatctcaaagttgtcagagcggctgatacagaatataatgaagagccttccagatgtggtgatgaatggggaccctaagcaccattatcccggctgtatcaacctctcctttgcatatgtggaaggggaaagtctgctgatggcactgaaggacgttgccttatcctcagggagtgcctgcacctctgcatccctggagccctcttatgtgcttagagcaattggcactgatgaggatttagcgcactcttctatcaggtttggaattggccgcttcactacagaggaggaagtggactacacagtggagaaatgcattcagcatgtgaagcgtcttcgagaaatgagccctctctgggagatggttcaggatggcattgacctcaagagcatcaagtggacccaacactagaagaatagggccctgactttgtgctggtctggcccctcctgcctcaccaacccgtgcacaaccagacaccttgttacacctagtggatgctctagattggtatagaccagttgacttcagcatcagtccacctctatgacagaaacacaagaaaactgtctttccctagcttcagttccttgggtgtggagcrctccccatttcttctcgggtcttaaactgctgggcacatctgtgctcttggtgaggagagcaagaggaaccagaagaagtctctttggtcagg

SEQ ID NO: 6407 - DNA, 1009 bp, Homo sapiens
atgattcgatacaggagtttgggcctggtggctgcctatgtcctttcattgtggctgatcacctccttcctacaccagcactccagccagaaggacctccgtaatatggccaagatacacccaggaatctgccaccatcccagcaacttttccagaaaatgcaactgctcatctgaggtccacacatgctctgcctgcctccacgtgcctggcgagtctgactggtttgacagacgcttcgacagtaccgttgaacccctacagaggccacaagatcccacgtccaatgatgctctgatattgtggctgggactcgagagggtcaagtcagagaaggaggttgagaataagcagcagcagctgattaaagcacctcccctgtgcccactgggccatgtggtgtccaactgccgggtctgtgcagtggtgggaaactcaagatttcagacggttcaggttcctggtggaaccgaagacagcaaagataaggtgctggtgatcagcctctacttcctcaggtatatccaggaaagttggctggagaaccatggtcagtatccgtccttggagtttgtggctctgttgtatgccttgcatacctgtgaccaggtatccttgtttggttttggggaagacaattgcaaaaggtggtcccattactgggatgacaaatattggtttgagaacaccatgcaaaatttcccagcagaataccagatcatcttgaaactgcagtgtgagaggaagattgctgtctacggctgagatgtttccagtggagtccccaggaggcttgacaggtagccaaggggaccttgtggtgtcagagagggactagggcttcaagcagaccctggatggagattactctgctactgaataaaaccctagcttatttctctctctggatttctggtggcattaaagggctacattctattactgattctgtcttatcaccatgtgactctcttatgytgtatcttaccaaaaaataaaattaaatgag

SEQ ID NO: 6408 - DNA, 1293 bp, Homo sapiens
agcagcgggcgcgctcataaagggcacagccsagggtacgtggatcgcggtgcggagactgaggttagaaggcacaggtggcgagatgagccgggtaccagcgttcctgagcgcggccgaggtggaggaacacctccgcagctccagcctcctcatcccgcctctagagacggccctggccaacttctccagcggtcccgaaggaggggtcatgcagcccgtgcgcaccgtggtgccggtgaccaagcacaggggctacctgggggtcatgcccgcctacagtgctgcagaggatgcactgaccaccaagttggtcaccttctacgaggaccgcggcatcacctcggtcgtcccttcccaccaggctactgtgctactctttgagcccagcaatggcaccctgctggcggtcatggatggaaatgtcataactgcaaagagaacagctgcagtttctgccattgccaccaagtttctgaaacctcccagcagtgaagtgctgtgcatccttggggctggggtccaggcctacagccattatgagatcttcacagagcagttctcctttaaggaggtgaggatatggaaccgcaccaaagaaaatgcagagaagtttgcagacacagtgcaaggagaggtacgggtctgttcttcggtccaggaggctgtggcaggtgcagatgtgatcatcacagtcaccctggcaacagagcccattttgtttggtgaatgggtgaagccaggggctcacatcaatgctgttggagccagcagacctgactggagagaactggatgatgagctcatgaaagaagctgtgctgtaygtggattcccaggaggctgccctgaaggagtctggagatgtcctgctgtcaggggccgagatctttgctgagctgggagaagtgattaagggagtgaaaccagcccactgtgagaagaccacsgtgttcaagtctttgggaatggcagtggaagacacagttgcagccaaactcatctatgattcctggtcatctggtamataaaacaaaggaacttgatgttgagatggatgcttgaggaatattgctgctggttctcataatttctagagtaaatgagggagtccagtccccrgygaactctccttttgtgcttatcatgttttaccttaaatgctgagatcctcatttatgtttgtagttggaaagcaaagctaggtagccatttcttctgttctaccaagttataatagcattcatttccctttatatttccctgaaataaagcacattccaattgtgcagtg

SEQ ID NO: 6409 - DNA, 1161 bp, Homo sapiens
tttcaaatggggagtttccctgcacaagctttcttgtctgccactatgtgagatatacctttcaccttctgccgtgattgtgaggcctcctcagccacgtggaactagacggccctggccaacttctccagcggtcccgaaggaggggtcatgcagcccgtgcgcaccgtggtgccggtgaccaagcacaggggctacctgggggtcatgcccgcctacagtgctgcagaggatgcactgaccaccaagttggtcaccttctacgaggaccgcggcatcacctcggtcgtcccttcccaccaggctactgtgctactctttgagcccagcaatggcaccctgctggcggtcatggatggaaatgtcataactgcaaagagaacagctgcagtttctgccattgccaccaagtttctgaaacctcccagcagtgaagtgctgtgcatccttggggctggggtccaggcctacagccattatgagatcttcacagagcagttctcctttaaggaggtgaggatatggaaccgcaccaaagaaaatgcagagaagtttgcagacacagtgcaaggagaggtacgggtctgttcttcggtccaggaggctgtggcaggtgcagatgtgatcatcacagtcaccctggcaacagagcccattttgtttggtgaatgggtgaagccaggggctcacatcaatgctgttggagccagcagacctgactggagagaactggatgatgagctcatgaaagaagctgtgctgtaygtggattcccaggaggctgccctgaaggagtctggagatgtcctgctgtcaggggccgagatctttgctgagctgggagaagtgattaagggagtgaaaccagcccactgtgagaagaccacsgtgttcaagtctttgggaatggcagtggaagacacagttgcagccaaactcatctatgattcctggtcatctgctgcacccatttcactgaatcttaaatgatgctttcaagacagaaggaagaacagtacacctgagatgaccccaaaggtgggccttcttttgagaaaatttcaaatgcaaaattccagatttacagatgaaactgtcagtaagacaattcatgggttttcctagtggctttaagctattaaaacttgcaaaactttggct

SEQ ID NO: 6410 - DNA, 1505 bp, Homo sapiens
cgcagaggacgcaggcagaaggaggaagggctggccggggctcccgagcactcactgctcaagcctcgccgccgcctccgccgctgcggggtgcgcgtccatctggttggggctcctcatcccaacaccctccccaacggcccgccgcgcagccgcccgcgggcgagtctgtagcctgatcctgcgcggacccgccagaggcacaccaggagagcagcgggcgcgctcataaagggcacagccsagggtacgtggatcgcggtgcggagactgaggttagaaggcacaggtggcgagatgagccgggtaccagcgttcctgagcgcggccgaggtggaggaacacctccgcagctccagcctcctcatcccgcctctagagacggccctggccaacttctccagcggtcccgaaggaggggtcatgcagcccgtgcgcaccgtggtgccggtgaccaagcacaggggctacctgggggtcatgcccgcctacagtgctgcagaggatgcactgaccaccaagttggtcaccttctacgaggaccgcggcatcacctcggtcgtcccttcccaccaggctactgtgctactctttgagcccagcaatggcaccctgctggcggtcatggatggaaatgtcataactgcaaagagaacagctgcagtttctgccattgccaccaagtttctgaaacctcccagcagtgaagtgctgtgcatccttggggctggggtccaggcctacagccattatgagatcttcacagagcagttctcctttaaggaggtgaggatatggaaccgcaccaaagaaaatgcagagaagtttgcagacacagtgcaaggagaggtacgggtctgttcttcggtccaggaggctgtggcaggtgcagatgtgatcatcacagtcaccctggcaacagagcccattttgtttggtgaatgggtgaagccaggggctcacatcaatgctgttggagccagcagacctgactggagagaactggatgatgagctcatgaaagaagctgtgctgtaygtggattcccaggaggctgccctgaaggagtctggagatgtcctgctgtcaggggccgagatctttgctgagctgggagaagtgattaagggagtgaaaccagcccactgtgagaagaccacsgtgttcaagtctttgggaatggcagtggaagacacagttgcagccaaactcatctatgattcctggtcatctggtamataaaacaaaggaacttgatgttgagatggatgcttgaggaatattgctgctggttctcataatttctagagtaaatgagggagtccagtccccrgygaactctccttttgtgcttatcatgttttaccttaaatgctgagatcctcatttatgtttgtagttggaaagcaaagctaggtagccatttcttctgttctaccaagttataatagcattcatttccctttatatttccctgaaataaagcacattccaattgtgcagtg

SEQ ID NO: 6411 - DNA, 3010 bp, Homo sapiens
gcgacttccggcagctggacttggaaaagcaaggagtgtcgggaatggcgaccaagcggctcgcgcggcagcttggattaattaggagaaagtcaattgcgccagcaaatggaaatctcggaagaagcaaatccaagcagttgtttgactacttaattgtcattgattttgaatcgacatgctggaatgatgggaagcaccaccatagccaggaaataattgagtttccagcagtgttgctgaacacatcaactggacagattgactctgagttccaggcttatgttcaacctcaggaacatccaattctttcagaattttgcatggaattgacaggcataaagcaggctcaagttgatgaaggagtccctctgaagatttgcttatctcagttctgtaaatggattcataagattcagcaacagaagaacattatttttgctactgggatttcagagccttctgcttctgaagtaaaattatgtgcatttgttacttggtcagactgggacttgggggtttgcctggagtatgagtgtaaaagaaarcagctgttaaaacctgtgtttttaaattcttggattgatctcagagcaacttacaagcttttctataggagaaaaccaaaaggactaagtggtgccttgcaggaagtaggaatagaattctcaggacgagaacattctgggttggacgattctcggaatactgcccttcttgcttggaaaatgatcagagatggttgtgtaatgaaaattacaaggtcgttgaacaaggttcccactaagaagaatttcagcattctggccagaaatttgaatacaattcaagttgaagaaatgtctgcctgtaacattagcatccagggtcccagcatatataataaggagcctaaaaatrtaataaatcctcatgaaaaagttcaaatgaagtcaatttgtgcaaattctcctataaaggcacaacaggatcaattacaagtaaaaaacaatataaaagcaagtcttcacaatgtcaaaagttccttacctctttttaatactaagtcctctacttctgtggggcagttgcagtctcctaccttgaattcayctatctrtatgcaaaagcaaggaaaaaatgaacatcttgcatttaataccaaatctaaggcttcaacagttggttcagaattggtacttgtttctaccaccgttccaactgttcatcatgtttctgatttggaaatgagctctactctggactgtttacctgtgttggctgattgggaggatgtggttttactgccagcatctcagcctgaggaaaacgtagactgtacagttcccattagtgactcagacttagagatttcatttaattctggagaaagattaatggttttgaaagaattggaaatgtcaagtcatgaaaactttggagacatagaggaaactcctcaaaaatctgagacttctaagtctattgtgtacaagagtcctcacactactatttataatgtaaaagaagccaaagatccaggttcagatatttctgcctttaagttacctgaacacaaatcaagtaccttcaacagagttaatgccaatatgtctcatcctttagttttggggaaacatcctcttctttcaggtggtaccaaaaggaatccatgcagtccccaagctttcccacyagcaaaaaaacaacccttcactattcatgaagaaaagcctacatcatctgattgctccccagtaagaagttcttcctggaggcgtctcccatctatattaacttctacagttaacctacaagagccatggaagagtgggaaaatgacacctccattatgcaagtgtggtcggagatctaagagacttgttgtttctaataatggacckaaccatggaaaagtcttctattgttgccctatcgggaaatacmaagaaaacagaaaatgttgtggttatttcaaatgggaacaaacacttcaaaaggaargagccaacagcatggttccatctcattccacagggggactcacttttagttctccagaaacaagccatatttgtgacagaaatttaagtatttccaccaaaaattctttgagactcaggccttcaatgaggaattgataacctttcatgtatgaatcctaattgttccttgaatttccaaacatgagtattctgataacatcttacactattttatttttattttatatattaatgtttactgcatttaccatactttcttcaggaaccacaagtgtaatcttttgtaaacagtatttattagattacatataataagcaacaatagtatatgatccttcttttatagttagaccttgaaacaagtctaaactatttttaaattatttgcaaaaaatgtgactaataaaaatccctagtctattttcaggtagattcttgtactttgagattatcataatcttctaactgatattttatatttttctaaaaacttttataagttctttagttttatttcaggcttgaacattggttctgatttgtatatcaacatatcagaagaattagtcaactaaagtttgaaaacctatgtagcagagatctggttcagaaactgcttctatactatacatttaaaaattaatcagcaattgatggtattatttttatattaagaaatgataggaacattgacactaatgtggaggaatttgccaaatattttatttcaaaatttagcctctgatatcataaccacaagatattttaaatcaacagtttctaagcatactaccacagtttttatgacctctccatcatcttgtggtttctagagattgacagatactatgtttgttttatagatatggtaattaatgaaacaactttaaattgtcttccattctttcttcctcagttcatttctttttgtcttcccwctgatagtctttggcagctcttgaataaattctacctgttggcatcaaggggaagaaaattagcctggaaatttttatctttacata

SEQ ID NO: 6412 - DNA, 2403 bp, Homo sapiens
agtcgctcgacttctacttccggtccgttcaaaaagcccgcgaggctgaggggcggttgttgttggcagctgtggctaaggaggggagaacctctgctccccgcccgtcttctcttctgcgtttcccgggctagggggcgtggggagtggttttaggcggcgaagccgctcggcagcaccttccttctttgccaggcagacgcccgttgtagccgttggggaaccgttgagaatccgccatggagccagagagggaagggaccgagagacaccccaggaaggtcagggaaagcaggcaggccccaaataagctggtcggggcagctgaggcgatgaaagccggttgggatctygaggagagtcagcccgaggccaagaaagcccgcttatctaccattttatttactgacaactgtgaagtaacccatgaccagctgtgtgaattgctgaagtatgcagttctgggcaaatccaatgttccaaaacccagggaatgagtcagctacacttttacaggttctatttggagtttggatgtcttcgaaaagcattcagacataaattccgcttgcctccaccatcatctgattttctagctgatgttgttgggctacaaactgaacaaagagctggagatctgcccaagacaatggaagggcctttaccttctaatgcaaaagccgccatcaaccttcaggatgatcccatcattcaaaagtatggctctaagaaagtgggcttgaccagatgccttctgacaaaggaggaaatgagaacgtttcactttccattacaaggttttcctgattgtgaaaactttttacttaccaaatgtaatggttctatagcagacaatagtcctctctttggacttgactgtgaaatggcacgtactacttttaatttttcaattggagtgttgcaagctgagtgcctcacatccaaggggagagagctaacacgcatctcactggttgctgaaggaggctgctgtgttatggatgaactggtcaaacctgaaaacaagattctggactacctcaccagcttttcgggaatcacgaagaagattcttaacccagtgacgaccaaactcaaagatgtacagaggcagttaaaagcactgcttcctcctgatgctgtgttagtgggccactccttagatttggatctcagagcactgaaaatgatacatccatatgttattgatacatcgttgctttatgtcagagagcagggcagaagatttaagctcaagttcttagccaaagttattttggggaaggatatacagtgtccagacagacttggtcatgatgccacagaagatgctagaacaatccttgaattggctcggtatttccttaagcatggcccaaaaaagattgcagaactaaatctagaagcactagctaatcaccaagaaatacaagcagcaggccaagagcctaaaaacacagcagaagtacttcagcacccaaacacaagtgttttagaatgcttggattcagtgggtcagaagcttctttttttgacccgggagacagatgctggtgaacttccatcttccagaaattgtcaaactattaagtgtctttcaaataaagaggtgcagaggcctgtgacagagctcacgcttgattgtgacaccctcgtgaatgagctggaaggagattctgaaaaccaaggctctatatatctgtctggagtgagtgaaaccttcaaagaacagctattgcaggagccccgcctctttcttggcctggaagctgtgatcttgcctaaagatcttaaaagtggaaagcagaaaaaatactgtttcctgaaattcaaaagttttggcagtgcccagcaggccctcaacattctcacaggcaaggactggaagctgaaaggcaggcatgccctaacccccaggcacctccatgcctggctcagaggcttaccacctgaatcaacaaggctcccagggcttcgtgttgtacctcccccctttgaacaggaggccttgcagactctgaaactggaccacccgaagatagcagcctggcgctggagccggaagattggaaagctctacaacagcttgtgcccgggcactctctgcctcatcctgctgccaggaaccaagagcactcatggttcactctctggtctaggactgatgggaataaaagaggaagaagaaagcgctggcccaggcctgtkttcgtgagtcggcctgccatgtttccatgtgccatttcttaccccttgtaggcaatggcaaagaatgtggtcaggctgtagcctccccaaccagcagacagytttatggaaacttggtatagcagctaaaagagtttagtttgtttatatggcatgtataagttttcaataaatgcctaaagttcaagcatagta

SEQ ID NO: 6413 - DNA, 2752 bp, Homo sapiens
agtcgctcgacttctacttccggtccgttcaaaaagcccgcgaggctgaggggcggttgttgttggcagctgtggctaaggaggggagaacctctgctccccgcccgtcttctcttctgcgtttcccgggctagggggcgtggggagtggttttaggcggcgaagccgctcggcagcaccttccttctttgccaggcagacgcccgttgtagccgttggggaaccgttgagaatccgccatggagccagagagggaagggaccgagagacaccccaggaaggtcagggaaagcaggcaggccccaaataagctggtcggggcagctgaggcgatgaaagccggttgggatctygaggagagtcagcccgaggccaagaaagcccgcttatctaccattttatttactgacaactgtgaagtaacccatgaccagctgtgtgaattgctgaagtatgcagttctgggcaaatccaatgttccaaaacccagctggtgccagctttttcatcaaaaccacctaaacaacgtagtggtttttgttctgcagggaatgagtcagctacacttttacaggttctatttggagtttggatgtcttcgaaaagcattcagacataaattccgcttgcctccaccatcatctgattttctagctgatgttgttgggctacaaactgaacaaagagctggagatctgcccaagacaatggaagggcctttaccttctaatgcaaaagccgccatcaaccttcaggatgatcccatcattcaaaagtatggctctaagaaagtgggcttgaccagatgccttctgacaaaggaggaaatgagaacgtttcactttccattacaaggttttcctgattgtgaaaactttttacttaccaaatgtaatggttctatagcagacaatagtcctctctttggacttgactgtgaaatgtgcctcacatccaaggggagagagctaacacgcatctcactggttgctgaaggaggctgctgtgttatggatgaactggtcaaacctgaaaacaagattctggactacctcaccagcttttcgggaatcacgaagaagattcttaacccagtgacgaccaaactcaaagatgtacagaggcagttaaaagcactgcttcctcctgatgctgtgttagtgggccactccttagatttggatctcagagcactgaaaatgatacatccatatgttattgatacatcgttgctttatgtcagagagcagggcagaagatttaagctcaagttcttagccaaagttattttggggaaggatatacagtgtccagacagacttggtcatgatgccacagaagatgctagaacaatccttgaattggctcggtatttccttaagcatggcccaaaaaagattgcagaactaaatctagaagcactagctaatcaccaagaaatacaagcagcaggccaagagcctaaaaacacagcagaagtacttcagcacccaaacacaagtgttttagaatgcttggattcagtgggtcagaagcttctttttttgacccgggagacagatgctggtgaacttccatcttccagaaattgtcaaactattaagtgtctttcaaataaagaggttcttgagcaggccagagtggaaatccccctgtttcccttcagcattgttcagttctcttttaaggccttttcacctgtcctcactgaggagatgaacaaaaggatgaggatcaagtggacagagatatcaactgtctatgctgggccatttagcaaaaattgcaatctcagggctctgaagaggctgtttaaaagctttggcccagtccagtcaatgacttttgttcttgaaacccgtcagcctcatctctgtatacagtatgaagtcctagaagctgcccagctggccatagartccttggatggtattctggtagatggtatctgcatcaaggtgcagaggcctgtgacagagctcacgcttgattgtgacaccctcgtgaatgagctggaaggagattctgaaaaccaaggctctatatatctgtctggagtgagtgaaaccttcaaagaacagctattgcaggagccccgcctctttcttggcctggaagctgtgatcttgcctaaagatcttaaaagtggaaagcagaaaaaatactgtttcctgaaattcaaaagttttggcagtgcccagcaggccctcaacattctcacaggcaaggactggaagctgaaaggcaggcatgccctaacccccaggcacctccatgcctggctcagaggcttaccacctgaatcaacaaggctcccagggcttcgtgttgtacctcccccctttgaacaggaggccttgcagactctgaaactggaccacccgaagatagcagcctggcgctggagccggaagattggaaagctctacaacagcttgtgcccgggcactctctgcctcatcctgctgccaggaaccaagagcactcatggttcactctctggtctaggactgatgggaataaaagaggaagaagaaagcgctggcccaggcctgtkttcgtgagtcggcctgccatgtttccatgtgccatttcttaccccttgtaggcaatggcaaagaatgtggtcaggctgtagcctccccaaccagcagacagytttatggaaacttggtatagcagctaaaagagtttagtttgtttatatggcatgtataagttttcaataaatgcctaaagttcaagcatagta

SEQ ID NO: 6414 - DNA, 4726 bp, Homo sapiens
ccgaaactgacacaaagtagcgggccgaggccccgggggagcggggccgcagctgggggggcgggagcccgtggggagccgagccgagcgccccccgccccagcccccggcatgggcagtacggggccgccggggcgggcgccgagcgctgagcgctgagggtctcccatgggattgctgggatcttgctgggtgagatggcagtgtgygcaaaaaagcgccccccagaagaagaaaggagggcgcgggctaatgaccgagaatacaatgagaaattccagtatgcgagtaactgcatcaagacctccaagtacaatattctcaccttcctgcctgtcaacctctttgagcagttccaggaagttgccaacacttacttcctgttcctcctcattctgcagttgatcccccagatctcttccctgtcctggttcaccaccattgtgcctttggttcttgtcctcaccatcacagctgttaaagatgccactgatgactatttccgccacaagagcgataaccaggtgaataaccgccagtctcrggtgctgatcaayggaatcctccagcaggagcagtggatgaatgtctgtgttggtgatattatcaagctagaaaataaccagtttgtggcggctgtagactggaccttaagcagtggaattcttgtctcctgttcaggtgaagtgatctgtgaacctcccaacaacaaactggacaaattcagcggaaccctstactggaaggaaaataagttccctctgagcaaccagaacatgctgctgcggggctgtgtgctgcgaaacaccgagtggtgcttcgggctggtcatctttgcaggtcccgacactaagctgatgcaaaacagcggcagaacaaagttcaaaagaacgagtatcgatcgcctaatgaataccctggtgctctggatttttggattcctggtttgcatgggggtgatcctggccattggcaatgccatctgggagcacgaggtggggatgcgtttccaggtctacctgccgtgggatgaggcagtggacagtgccttcttctctggcttcctctccttctggtcctacatcatcatcctcaacaccgttgtgcccatttcactctatgtcagtgtggaggtcatccgtctgggccacagctacttcatcaactgggataagaagatgttctgcatgaagaagcggacgcctgcagaagcccgcaccaccaccctaaaygaggagctgggccaggtggagtacatcttctccgacaagacgggcaccctcacccagaacatcatggttttcaacaagtgctccatcaatggccacagctatggtgatgtgtttgacgtcctgggacacaaagctgaattgggagagaggcctgaacctgttgacttctccttcaatcctctggctgacaagaagttcttattttgggaccccagcctgctggaggctgtcaagatcggggacccccacacgcatgagttcttccgcctcctttccctgtgtcatactgtcatgtcagaagaaaagaacgaaggagagctgtactacaaagctcagtccccagatgagggggccctggtcaccgcagccaggaactttggttttgttttccgctctcgcacccccaaaacaatcaccgtccatgagatgggcacagccatcacctaccagctgctggccatcctggacttcaacaacatccgcaagcggatgtcggtcatagkgcggaatccagaggggaagatccgactctactgcaaaggggctgacactatcctactggacagactgcaccactccactcaagagctgctcaacaccaccatggaccaccttaatgagtacgcaggggaagggctgaggaccctggtgctggcctacaaggatctggatgaagagtactaygaggagtgggctgagcgacgcctccaggccagcctggcccaggacagccgggaggacaggctggctagcatctatgaggaggttgagaacaacatgatgctgctgggtgcaacggccattgaggacaaacttcagcaaggggttccagagaccattgccctcctgacactggccaacatcaagatttgggtgctaaccggagacaagcaagagacggctgtgaacatcggctattcctgcaagatgctgacggatgacatgactgaggttttcatagtcactggccatactgtcctggaggtgcgggaggagctcaggaaagcccgggagaagatgatggactcatcccgctcygtaggcaacggcttcacctatcaggacaagctttcttcttccaagctaacttctgtcctggaggccgttgctggggagtacgccctggtcataaatggtcacagcctggcccacgcactggaggcagacatggagctggagtttctggagacagcgtgtgcctgcaaagctgtcatctgctgccgggtgacccccttgcagaaggcacaggtggtagaactggtcaagaagtacaagaaggctgtgacgcttgccattggagacggagccaatgatgtcagcatgatcaaaacggctcacattggtgtggggatcagtgggcaggaagggatccaggctgtcttggcctccgattactccttctcccagttcaagttcctgcagcgcctcctgctggtgcatgggcgctggtcctacctgcgaatgtgcaagtttctttgctatttcttctacaaaaactttgctttcaccatggtccacttctggtttggcttcttctgtggcttctcagcccagaccgtctatgaccagtatttcatcaccctgtataacatcgtgtacacctccctgccagtcctggctatgggggtctttgatcaggatgtccccgagcagcggagcatggagtaccctaagctgtatgagccgggccagctgaaccttctcttcaacaagcgggagttcttcatctgcatcgcccagggcatctacacctccgtgctcatgttcttcattccctatggggtgtttgctgatgccacccgggatgatggcactcagctggctgactaccagtcctttgcagtcactgtggccacatccttggtcattgtggttagcgtgcagattgggctcgacacaggctactggacggccatcaaccacttcttcatctggggaagccttgctgtttactttgccatcctctttgccatgcacagcaatgggctcttcgacatgtttcccaaccagttccggtttgtggggaatgcccagaacaccttggcccagcccacggtgtggctgaccattgtgctcaccacrgtcgtctgcatcatgcccgtggttgccttccgattcctcaggctcaacctgaagccggatctctccgacacggtccgctacacacagctcgtgaggaagaagcagaaggcccagcaccgctgcatgcggcgggttggccgcactggctcccggcgctccggctatgccttctcccatcaggagggcttcggggagctcatcatgtctggcaagaacatgcggctgagctctctcgcgctctccagcttcaccacccgctccagctccagctggattgagagcctgcgcaggaagaagagtgacagtgccagtagccccagtggcggtgccgacaagcccctcaagggctgaaggccgaggatggatgccctgtgccagtgaccagagcacccagggctggccagtcactgagggaacagygtctcggaactgctggtcctcattccttgcttcccgtccccccggtagactctgtcctgctggtcccaccacacatggctgggacatctgttcccagctgtaggcccttccaccagctggggagctagagggagcaggyccaagggcagagcagaggctgaggcacggggagccagccccactcggggaccagaagtggaaccaaaaacaagaaaaaactgtgagagattgtgtctgcccctgccctgcctgggacccacagggagactataatctccttatttttttactcctactccccagaggggccctagtgcctctgttcctgaattacataagaatgtaccatgccgggaagccagagacctgcaggggcctcggcccctcacatcgtgtatgtctctccttgatttgtgttgtgtccagtttggttttgtctttttttatttggcaagtggaggaggcttttatgtgacttttatgttgtggttggtgtcttaactctcctgggaaaaggaggctggcacacactgggatgccgcagcctggccggctgtggggtggtttgggaggatccatgtcggctctgcctgcagtgaccagtgctctgtggggcagaggagctgaccagggagggaggtacccatgagcagagggtagtgggagagtgtaaaggagggtttggtcctgtctgcttcctcaccttgagagtaaagtgctgccctctgcccccaacacacacacatatcaattcctggattccttagtcctgctggccttgggctggagcctaggaaagtggcccccaaatccttagtgagctaaagctgggtctgaaatttggtcagtggggaggggtagttttcttttcttttttctttttctttttttctttttttttttgagatggagtctcactcttgtcacctaggcaagagtgcaatggcacaatctcagctcactgcaacctccacctcctgggttcaagcgat

SEQ ID NO: 6415 - DNA, 1143 bp, Homo sapiens
atgacggtccccaaggagatgcccgagaagtgggcccgggcccaggcgcctccctcttggagccgaaagaagccctcttgggggacagaagaagaaaggagggcgcgggctaatgaccgagaatacaatgagaaattccagtatgcgagtaactgcatcaagacctccaagtacaatattctcaccttcctgcctgtcaacctctttgagcagttccaggaagttgccaacacttacttcctgttcctcctcattctgcagttgatcccccagatctcttccctgtcctggttcaccaccattgtgcctttggttcttgtcctcaccatcacagctgttaaagatgccactgatgactatttccgccacaagagcgataaccaggtgaataaccgccagtctcrggtgctgatcaayggaatcctccagcaggagcagtggatgaatgtctgtgttggtgatattatcaagctagaaaataaccagtttgtggcggcggatctcctcctcctttccagcagtgagccccatgggctgtgttacatagagacagcagaacttgatggcgagaccaacatgaaagtacgtcaggcgattccagtcacctcagaattgggagacatcagtaagcttgccaagtttgacggtgaagtgatctgtgaacctcccaacaacaaactggacaaattcagcggaaccctstactggaaggaaaataagttccctctgagcaaccagaacatgctgctgcggggctgtgtgctgcgaaacaccgagtggtgcttcgggctggtcatctttgcaggtcccgacactaagctgatgcaaaacagcggcagaacaaagttcaaaagaacgagtatcgatcgcctaatgaataccctggtgctctggatttttggattcctggtttgcatgggggtgatcctggccattggcaatgccatctgggagcacgaggtggggatgcgtttccaggtctacctgccgtgggatgaggcagtggacagtgccttcttctctggcttcctctccttctggtcctacatcatcatcctcaacaccgttgtgcccatttcactctatgtcagtcctgagtgtggaggtcatccgtctgggccacagctacttcatcaactggga

SEQ ID NO: 6416 - DNA, 4753 bp, Homo sapiens
ccgaaactgacacaaagtagcgggccgaggccccgggggagcggggccgcagctgggggggcgggagcccgtggggagccgagccgagcgccccccgccccagcccccggcatgggcagtacggggccgccggggcgggcgccgagcgctgagcgctgagggtctcccatgggattgctgggatcttgctgggtgagatggcagtgtgygcaaaaaagcgccccccagaagaagaaaggagggcgcgggctaatgaccgagaatacaatgagaaattccagtatgcgagtaactgcatcaagacctccaagtacaatattctcaccttcctgcctgtcaacctctttgagcagttccaggaagttgccaacacttacttcctgttcctcctcattctgcagttgatcccccagatctcttccctgtcctggttcaccaccattgtgcctttggttcttgtcctcaccatcacagctgttaaagatgccactgatgactatttccgccacaagagcgataaccaggtgaataaccgccagtctcrggtgctgatcaayggaatcctccagcaggagcagtggatgaatgtctgtgttggtgatattatcaagctagaaaataaccagtttgtggcggctgtagactggaccttaagcagtggaattcttgtctcctgttcaggtgaagtgatctgtgaacctcccaacaacaaactggacaaattcagcggaaccctstactggaaggaaaataagttccctctgagcaaccagaacatgctgctgcggggctgtgtgctgcgaaacaccgagtggtgcttcgggctggtcatctttgcaggtcccgacactaagctgatgcaaaacagcggcagaacaaagttcaaaagaacgagtatcgatcgcctaatgaataccctggtgctctggatttttggattcctggtttgcatgggggtgatcctggccattggcaatgccatctgggagcacgaggtggggatgcgtttccaggtctacctgccgtgggatgaggcagtggacagtgccttcttctctggcttcctctccttctggtcctacatcatcatcctcaacaccgttgtgcccatttcactctatgtcagtgtggaggtcatccgtctgggccacagctacttcatcaactgggataagaagatgttctgcatgaagaagcggacgcctgcagaagcccgcaccaccaccctaaaygaggagctgggccaggtggagtacatcttctccgacaagacgggcaccctcacccagaacatcatggttttcaacaagtgctccatcaatggccacagctatggtgatgtgtttgacgtcctgggacacaaagctgaattgggagagaggcctgaacctgttgacttctccttcaatcctctggctgacaagaagttcttattttgggaccccagcctgctggaggctgtcaagatcggggacccccacacgcatgagttcttccgcctcctttccctgtgtcatactgtcatgtcagaagaaaagaacgaaggagagctgtactacaaagctcagtccccagatgagggggccctggtcaccgcagccaggaactttggttttgttttccgctctcgcacccccaaaacaatcaccgtccatgagatgggcacagccatcacctaccagctgctggccatcctggacttcaacaacatccgcaagcggatgtcggtcatagkgcggaatccagaggggaagatccgactctactgcaaaggggctgacactatcctactggacagactgcaccactccactcaagagctgctcaacaccaccatggaccaccttaatgtgggtgagtacgcaggggaagggctgaggaccctggtgctggcctacaaggatctggatgaagagtactaygaggagtgggctgagcgacgcctccaggccagcctggcccaggacagccgggaggacaggctggctagcatctatgaggaggttgagaacaacatgatggaatccttgtggtattttcagctgctgggtgcaacggccattgaggacaaacttcagcaaggggttccagagaccattgccctcctgacactggccaacatcaagatttgggtgctaaccggagacaagcaagagacggctgtgaacatcggctattcctgcaagatgctgacggatgacatgactgaggttttcatagtcactggccatactgtcctggaggtgcgggaggagctcaggaaagcccgggagaagatgatggactcatcccgctcygtaggcaacggcttcacctatcaggacaagctttcttcttccaagctaacttctgtcctggaggccgttgctggggagtacgccctggtcataaatggtcacagcctggcccacgcactggaggcagacatggagctggagtttctggagacagcgtgtgcctgcaaagctgtcatctgctgccgggtgacccccttgcagaaggcacaggtggtagaactggtcaagaagtacaagaaggctgtgacgcttgccattggagacggagccaatgatgtcagcatgatcaaaacggctcacattggtgtggggatcagtgggcaggaagggatccaggctgtcttggcctccgattactccttctcccagttcaagttcctgcagcgcctcctgctggtgcatgggcgctggtcctacctgcgaatgtgcaagtttctttgctatttcttctacaaaaactttgctttcaccatggtccacttctggtttggcttcttctgtggcttctcagcccagaccgtctatgaccagtatttcatcaccctgtataacatcgtgtacacctccctgccagtcctggctatgggggtctttgatcaggatgtccccgagcagcggagcatggagtaccctaagctgtatgagccgggccagctgaaccttctcttcaacaagcgggagttcttcatctgcatcgcccagggcatctacacctccgtgctcatgttcttcattccctatggggtgtttgctgatgccacccgggatgatggcactcagctggctgactaccagtcctttgcagtcactgtggccacatccttggtcattgtggttagcgtgcagattgggctcgacacaggctactggacggccatcaaccacttcttcatctggggaagccttgctgtttactttgccatcctctttgccatgcacagcaatgggctcttcgacatgtttcccaaccagttccggtttgtggggaatgcccagaacaccttggcccagcccacggtgtggctgaccattgtgctcaccacrgtcgtctgcatcatgcccgtggttgccttccgattcctcaggctcaacctgaagccggatctctccgacacggtccgctacacacagctcgtgaggaagaagcagaaggcccagcaccgctgcatgcggcgggttggccgcactggctcccggcgctccggctatgccttctcccatcaggagggcttcggggagctcatcatgtctggcaagaacatgcggctgagctctctcgcgctctccagcttcaccacccgctccagctccagctggattgagagcctgcgcaggaagaagagtgacagtgccagtagccccagtggcggtgccgacaagcccctcaagggctgaaggccgaggatggatgccctgtgccagtgaccagagcacccagggctggccagtcactgagggaacagygtctcggaactgctggtcctcattccttgcttcccgtccccccggtagactctgtcctgctggtcccaccacacatggctgggacatctgttcccagctgtaggcccttccaccagctggggagctagagggagcaggyccaagggcagagcagaggctgaggcacggggagccagccccactcggggaccagaagtggaaccaaaaacaagaaaaaactgtgagagattgtgtctgcccctgccctgcctgggacccacagggagactataatctccttatttttttactcctactccccagaggggccctagtgcctctgttcctgaattacataagaatgtaccatgccgggaagccagagacctgcaggggcctcggcccctcacatcgtgtatgtctctccttgatttgtgttgtgtccagtttggttttgtctttttttatttggcaagtggaggaggcttttatgtgacttttatgttgtggttggtgtcttaactctcctgggaaaaggaggctggcacacactgggatgccgcagcctggccggctgtggggtggtttgggaggatccatgtcggctctgcctgcagtgaccagtgctctgtggggcagaggagctgaccagggagggaggtacccatgagcagagggtagtgggagagtgtaaaggagggtttggtcctgtctgcttcctcaccttgagagtaaagtgctgccctctgcccccaacacacacacatatcaattcctggattccttagtcctgctggccttgggctggagcctaggaaagtggcccccaaatccttagtgagctaaagctgggtctgaaatttggtcagtggggaggggtagttttcttttcttttttctttttctttttttctttttttttttgagatggagtctcactcttgtcacctaggcaagagtgcaatggcacaatctcagctcactgcaacctccacctcctgggttcaagcgat

SEQ ID NO: 6417 - DNA, 1964 bp, Homo sapiens
cctgctcagtgcgcgccggccgggcaaccctatgctggcgtaatcgggttcctccgagccgccgtaggactggttccggcgggctggtgaggaatggagccggtaggctgctgcggcgagtgccgcggctcctccgtagacccgcggagcaccttcgtgttgagtaacctggcggaggtggtggagcgtgtgctcaccttcctgcccgccaaggcgttgctgcgggtggcctgcgtgtgccgcttatggagggagtgtgtgcgcagagtattgcggacccatcggagcgtaacctggatctccgcaggcctggcggaggccggccacctggaggggcattgcttggttcgcgtggtagcagaggagcttgaggcaaaatgttcgcatcttaccacatacagttctttacatggctgattcagaaactttcattagtctggaagagtgtcgtggccataagagagcaaggaaaagaactagtatggaaacagcacttgcccttgagaagctattccccaaacaatgccaagtccttgggattgtgaccccaggaattgtagtgactccaatgggatcaggtagcaatcgacctcaggaaatagaaattggagaatctggttttgctttattattccctcaaattgaaggaataaaaatacaaccctttcattttattaaggatccaaagaatttaacattagaaagacatcaactcactgaagtaggtcttttagataaccctgaacttcgtgtggtccttgtctttggttataattgctgtaaggtgggagccagtaattatctgcagcaagtagtcagcactttcagtgatatgaatatcatcttggctggaggccaggtggacaacctgtcatcactgacttctgaaaagaaccctctggataytgatgcctcgggtgtggttggactgtcatttagtggacaccgaatccagagtgccactgtgctcctcaacgaggacgtcagtgatgagaagactgctgaggctgcgatgcagcgcctcaaagcggccaacattccagagcataacaccattggcttcatgtttgcatgcgttggcaggggctttcagtattacagagccaaggggaatgttgaggctgatgcatttagaaagttttttcctagtgttcccttattcggyttctttggaaatggagaaattggatgtgatcggatagtcactgggaactttatattgaggaaatgtaatgaggtaaaagatgatgatctgtttcatagctatacaacaataatggcactcatacatctggggtcatctaaataataattaaagtggctttcataatatgtaacttttgggttctgcctttttcagaaaatggaaacttgggccatgtgtatttcaaacaaaaataactttagatatatcttttttgtagctttgattgatgctctaagatcacatgagggtagtatttaatatattagatgaaggacaactttggacataacactgactaggagttgagagcttttgcatcaggcagaagcaaactgattatagttgtgttgcaccagatcatgtagctgctgtgtaacatgaccttaaatagtcttcctgcataggaagagcaaaagggtattcatcaataggatatagatttaagacattccctgactaccccttgcgttgttaggtgatgtcttttagcagaatcatgaagaccttttttctcccttaataaaggagaaaaatatactgatggctggagaaatttttctctgcctttcagttttatgaattttttcagaagtaacaatattattattgactttttacttatttgataaaaattaaagaactatttttgttttggtcagataaattgacaagactaatcagtattttattataagtaaaagatttttcttctttccttaaaaatatttttttttcacctaggtctaaatagctaact

SEQ ID NO: 6418 - DNA, 1960 bp, Homo sapiens
cctgctcagtgcgcgccggccgggcaaccctatgctggcgtaatcgggttcctccgagccgccgtaggactggttccggcgggctggtgaggaatggagccggtaggctgctgcggcgagtgccgcggctcctccgtagacccgcggagcaccttcgtgttgagtaacctggcggaggtggtggagcgtgtgctcaccttcctgcccgccaaggcgttgctgcgggtggcctgcgtgtgccgcttatggagggagtgtgtgcgcagagtattgcggacccatcggagcgtaacctggatctccgcaggcctggcggaggccggccacctggaggggcattgcttggttcgcgtggtagcagaggagcttgagaatgttcgcatcttaccacatacagttctttacatggctgattcagaaactttcattagtctggaagagtgtcgtggccataagagagcaaggaaaagaactagtatggaaacagcacttgcccttgagaagctattccccaaacaatgccaagtccttgggattgtgaccccaggaattgtagtgactccaatgggatcaggtagcaatcgacctcaggaaatagaaattggagaatctggttttgctttattattccctcaaattgaaggaataaaaatacaaccctttcattttattaaggatccaaagaatttaacattagaaagacatcaactcactgaagtaggtcttttagataaccctgaacttcgtgtggtccttgtctttggttataattgctgtaaggtgggagccagtaattatctgcagcaagtagtcagcactttcagtgatatgaatatcatcttggctggaggccaggtggacaacctgtcatcactgacttctgaaaagaaccctctggataytgatgcctcgggtgtggttggactgtcatttagtggacaccgaatccagagtgccactgtgctcctcaacgaggacgtcagtgatgagaagactgctgaggctgcgatgcagcgcctcaaagcggccaacattccagagcataacaccattggcttcatgtttgcatgcgttggcaggggctttcagtattacagagccaaggggaatgttgaggctgatgcatttagaaagttttttcctagtgttcccttattcggyttctttggaaatggagaaattggatgtgatcggatagtcactgggaactttatattgaggaaatgtaatgaggtaaaagatgatgatctgtttcatagctatacaacaataatggcactcatacatctggggtcatctaaataataattaaagtggctttcataatatgtaacttttgggttctgcctttttcagaaaatggaaacttgggccatgtgtatttcaaacaaaaataactttagatatatcttttttgtagctttgattgatgctctaagatcacatgagggtagtatttaatatattagatgaaggacaactttggacataacactgactaggagttgagagcttttgcatcaggcagaagcaaactgattatagttgtgttgcaccagatcatgtagctgctgtgtaacatgaccttaaatagtcttcctgcataggaagagcaaaagggtattcatcaataggatatagatttaagacattccctgactaccccttgcgttgttaggtgatgtcttttagcagaatcatgaagaccttttttctcccttaataaaggagaaaaatatactgatggctggagaaatttttctctgcctttcagttttatgaattttttcagaagtaacaatattattattgactttttacttatttgataaaaattaaagaactatttttgttttggtcagataaattgacaagactaatcagtattttattataagtaaaagatttttcttctttccttaaaaatatttttttttcacctaggtctaaatagctaact

SEQ ID NO: 6419 - DNA, 1497 bp, Homo sapiens
cctgctcagtgcgcgccggccgggcaaccctatgctggcgtaatcgggttcctccgagccgccgtaggactggttccggcgggctggtgaggaatggagccggtaggctgctgcggcgagtgccgcggctcctccgtagacccgcggagcaccttcgtgttgagtaacctggcggaggtggtggagcgtgtgctcaccttcctgcccgccaaggcgttgctgcgggtggcctgcgtgtgccgcttatggagggagtgtgtgcgcagagtattgcggacccatcggagcgtaacctggatctccgcaggcctggcggaggccggccacctggaggggcattgcttggttcgcgtggtagcagaggagcttgaggcaaaatgttcgcatcttaccacatacagttctttacatggctgattcagaaactttcattagtctggaagagtgtcgtggccataagagagcaaggaaaagaactagtatggaaacagcacttgcccttgagaagctattccccaaacaatgccaagtccttgggattgtgaccccaggaattgtagtgactccaatgggatcaggtagcaatcgacctcaggaaatagaaattggagaatctggttttgctttattattccctcaaattgaaggaataaaaatacaaccctttcattttattaaggatccaaagaatttaacattagaaagacatcaactcactgaagtaggtcttttagataaccctgaacttcgtgtggtccttgtctttggttataattgctgtaaggtgggagccagtaattatctgcagcaagtagtcagcactttcagtgatatgaatatcatcttggctggaggccaggtggacaacctgtcatcactgacttctgaaaagtatgtcttgtgtgcttctgatttcgtctgtgaatgaagggaaatggtctcaggttttgtcactttggggttaacaatttaaaaaaygtgtttaaagaattattaagataatagttcattccattttgtagtagacattggctaaggggcttactgaacataattctgcttacggttgaataattacatttttatatatattgtccttcaagaacttccttgagtcacattctccttaaaatttgacattgcctgttgatctttcctttgacagatgtggtactctgtgtgacctcaatgtgtcacctcctttctagtttcctcctttaaaggaaacacatggttagagtgtatctttatggcaaaacttctcagagcttctaatatgcccagtgctgtggaaatctggaaggagaatagcattacctgtgacagttcccaaatstgtttggtcacaaaacttttttccacagaatgtcttgcaagtcgtactggtttttggaaattctgtattagatcttttgaaaggctttttcaagcttaaaaattgtggatcttttttgttactaaggcttttgctttcaaagataaaaatatttgctcttc

SEQ ID NO: 6420 - DNA, 1773 bp, Homo sapiens
agaagtggttctcatctttttttgcagcttaagatctgccttggtatttgaagagatataaactagatcaatttctttcacaggatcaactaaacagtgtaccacaatgaattctgaacttgactattatgaaaagtttgaagaagtccatgggattctaatgtataaagattttgtcaaatattgggataatgtggaagcgttccaggcaagaccagatgatcttgtcattgccacctaccctaaatctggtacaacctgggttagtgaaattgtgtatatgatctataaagagggtgatgtggaaaagtgcaaagaagatgtaatttttaatcgaatacctttcctggaatgcagaaaagaaaacctcatgaatggagtaaaacaattagatgagatgaattctcctagaattgtgaagactcatttgccacctgaacttcttcctgcctcattttgggaaaaggattgtaagataatctatctttgccggaatgcaaaggatgtggctgtttccttttattatttctttctaatggtggctggtcatccaaatcctggatcytttccagagtttgtggagaaattcatgcaaggacaggttccttatggttcctggtataaacatgtaaaatcttggtgggaaaagggaaagagtccacgtgtactatttcttttctacgaagacctgaaagaggatatcagaaaagaggtgataaaattgatacatttcctggaaaggaagccatcagaggagcttgtggacaggattatacatcatacttcgttccaagagatgaagaacaatccatccacaaattacacaacactgccagacgaaattatgaaccagaaattgtcgcccttcatgagaaagggaattacaggagactggaaaaatcactttacagtagccctgaatgaaaaatttgataaacattatgagcagcaaatgaaggaatctacactgaagtttcgaactgagatctaagaaggtctttctttacttaacatatctgatattaaagatttcttttcattattctccactttttcttattttagattgctagaaaagacataatcatggattatgttgacattttctttttaaatttttgtttaactttttttttttttttttgagacagagtctcactctgttgcctaggctggaggacagtggcacaatcatggctgattgcagccttgacctccttgactcaattgatcctcccatctcagcctcccaagtagctaggrctacagacatgtgcaaccatgtttggctaatttttttaatgtttttttgtagagatgaggtcttattatattgtccaggctggtcttgaattcctgggctcaagcttcccaagtagctgcaacaacaggcacacaccaccatgctcaactaattttatttctattttttgtatagacaggggcttgctatagtgtccaggctggtctgaaacccttgagctcaagtgatcttcccacaccagcctcccaaaatactgggattacaggcttgagcctccatgcctggcccaggtaacatgtttattgagctgtacatgcatatgagaaataagaaacttttttttcctactatcatctcttaaattttgttttctttttcttttgcttcytcttcttcttttctattttttataaatatcatgcacaactataacctatgggaatgatgtagtaacacagattattcatcttgttagagttgtattaaaaataaacaagcatttcaaatta

SEQ ID NO: 6421 - DNA, 3499 bp, Homo sapiens
agtcgggaagactgcatccggctccaggaaaagcgagtgggatatcccaatctttggactgcatcctggttgcctctactgtggtcacctttgggaagaaatgtcttctgtaaaaagaagtctgaagcaagaaatagttactcagtttcactgttcagctgctgaaggagatattgccaagttaacaggaatactcagtcattctccatctcttctcaatgaaacttctgaaaatggctggactgctttaatgtatgcggcaaggaatgggcacccagagatagtccaatttctgcttgagaaagggtgtgacagatcaattgtcaataaatcaaggcagactgcactrgayattgctgtattttggggttataagcatatagctaatttactagctactgctraaggtgggaagaagccttggttcctaacgaatgaagtggaagaatgtgaaaattattttagcaaaacactactggaccggraaagtgaaaagagraataattctgactggctgctagctaaagaaagccatccagccacagtttttattcttttctcagatttaaatcccttggttactctaggtggcaataaagaaagtttccaacagccagaagttaggctttgtcagctgaactacacagatataaaggattatttggcccagcctgagaagatcaccttgatttttcttggagtagaacttgaaataaaagacaaactacttaattatgctggtgaartcccgagagaggaggaagatggattggttgcctggtttgctctaggtatagatcctrttgctgctgaagaattcaagcaaagacatgaaaattgttactttcttcatcctcctatgccagcccttctgcaattgaaagaaaaagaagctggggttgtagctcaagcaagatctgttcttgcctggcacagtcgatacaagttttgcccaacctgtggaaatgcaactaaaattgaagaaggtggctataagagaytatgtttaaaagaagactgtcctagtctcaatggcgtccataatacctcatacccaagagttgatccagtagtaatcatgcaagttattcatccagatgggaccaaatgccttttaggcaggcagaaaagatttcccccaggcatgtttacttgccttgctggatttattgagcctggagagacaatagaagatgctgttaggagagaagtagaagaggaaagtggagtcaaagttggccatgttcagtatgttgcttgtcaaccatggccaatgccttcctccttaatgattggttgcttagctctagcagtgtctacagaaattaaagttgacaagaatgaaatagaggatgcccgctggttcactagagaacaggtcctggatgttctgaccaaagggaagcagcaggcattctttgtgccaccaagccgagctattgcacatcaattaatcaaacactggattagaataaatcctaatctctaaatctaagaactaagctttgagtattatttaataatttctaataacactcrttcctcaagtgatattagagattattcagtactcttgagagtgtcacaacacaaaatacgatgttgggttttcgaaatattttcaaagtgttctgtcttaatcacaaattcatatttttacacatttttacaatattgcctcagattatgttaaatttgggtcagtcttctctgaactttttctctcttggtttcttttcttccttcacagttttatctcacaaaaccatttttctaataagagacatcatgttggaaagatgttctagaaatgtgcataaatttcagtgcctcttgtaagcattaaactgatgatgaagaaagttcctgatttgagaaatgaatcaaagtaattttaatgaatttttagcttgtattagcttgagttagctggcattgattttttagtccttttgttacctttaagttgtcaatatatggtttttgttcatctccccattgtagtcccacttgctctttcctgggggttccattgttctagcagtggaggtgttayagtgtcgccactcrtctaatttgaccagtgttaagaattttctaatttaataatttaatagtgatctcaataccacaccctcatggaaggagaaaagcatactattatatctgggacctctcttttagacctaaaattaattaacatatctacttatatgttacttatacctaaagctgttattaagacaaaccaagattctctgcttttgcactgaaattaaacttgaaaggaattctcctcaaaggtcggatattaaataagtcccaggcagatttacatatttaatttaaaacattggctttatttcattttgtgatgagtgatgtatctgtgttaacaaaaaattgtataatcattaccaatactatttattatgctcaaatatatcttggctttgaccttatttcaacacattctaagaagccttgacaaagtaagtatattttagagctgaatcagtaagattctagagaaagcaaaacatagtagttcacaattttgcaacatagaaagtcacattttgaaaggctattttgaaattgatttaatagctattatagtttatgaatatcaaaatttgtataatttgcatctttactaatgtatgctagagctacaagagaccttaaggataatatatgaaattagctttccttattttatagataaggaaaaagaaattgtgaaaggtgaatttacctaattagtgaaagttacataactaattacaacagtctgtactatataatgcagaggacgattctccctgtaaaaggaactagaagctattactaaaaatatatatagacaaaattaaaagaaggaatgataagaataaatttaatttaccaaatattgttaattaaaattttagatacttaacatttatttaacttaaataaaagataactgtcagataaaactttattttactaatgagcagtgattttcttaggaattgatgaaggcttattggtatcaagaatttaaaccaaattaaaactgacagaggacatttagatacataataaaattcgagctacataagtatatggaaaataatgtaccttgattattatgaaatagagcatcttgaaattcagttttactctaaatgtacttttaatacttgcagattctaagattacattgtaaaattccaggttttcataatgttaaaataggaaagtagaatataaagtatcaacaagtgtagttatacattttgttttggatatttaatccttacttgggaaaaaatcagcatctaggtaaattattattttaataasaactcttaaattgccaacctctgagaggtgaaaagctatgtaaatagaaggaatggccagttcaaaagaatagtagatgtgatagtgccgtgaatgtattctactggaaatgaatgtaataatacattaaatttttaaaatctatttt

SEQ ID NO: 6422 - DNA, 928 bp, Homo sapiens
cttccggttactagggcaatctgccggaagagtcaggttctgtgtatgtctccgcgtcttccgcggagcgggtgtgcagggcctgcagcattgaactagatgtygtccccgcaggccccagaagatgggcagggctgtggcgaccgcgrcgatccccctggggacctccgtagcgtcttggtcacgaccgtgctcaacctcgagccgctggacgaggatctcttcagaggaaggcattactgggtaccggccaagaggctgtttggtggtcagatcgtgggccaggccctggtggctgcagccaagtctgtgagtgaagacgtccacgtgcactccctgcactgctactttgttcgggcagagcagatgccctcatgtgttctgcgtagatccccagctgagaagagtttgtggacctttacagtatgtgatttgtattaagaaaaccatggggtttcccccttcattttgtaaatatgaaagttatccctgtaatggtaaatacactttttcatactgtcccgtgtctcttactcctcatccctgaggagtattgattggcccccctcttctcggcccccagtcactgctataaagtatttgaatacttaccttgggctcagccaggttcttatctttatgctagttgggagtaaatatgtgctttgtttctttaatttgtttgtaagtaccagccttttgatattgtaatccttccagcctagtgaaatacctggctgttttcttttgtgtgggtgggggcattacttgaactctgaatctcttcatcctgtgatggaagaattcaatgagtctttgccagtaaagtatctagtgcagggcttggcataatctagttttccataaatattattagtttttgatgattaacttatgggaataattaaaatttgcatgatacagagca

SEQ ID NO: 6423 - DNA, 1980 bp, Homo sapiens
cttccggttactagggcaatctgccggaagagtcaggttctgtgtatgtctccgcgtcttccgcggagcgggtgtgcagggcctgcagcattgaactagatgtygtccccgcaggccccagaagatgggcagggctgtggcgaccgcgrcgatccccctggggacctccgtagcgtcttggtcacgaccgtgctcaacctcgagccgctggacgaggatctcttcagaggaaggcattactgggtaccggccaagaggctgtttggtggtcagatcgtgggccaggccctggtggctgcagccaagtctgtgagtgaagacgtccacgtgcactccctgcactgctactttgttcgggcaggggacccgaagctgccagtactgtaccaagtggagcggacacgaacagggtcgagcttctcggtgcgctctgtgaaggccgtgcaacatgggaagcccatcttcatctgccaggcctccttccagcaggcccagcccagccccatgcagcaccagttctccatgcccactgtgccaccaccagaagagctgcttgactgtgagaccctcattgaccagtatttaagggaccctaacctccaaaagaggtacccattggcgctcaaccgaattgctgctcaggaggtccccawtgagatcaagccagtaaacccatcccccctgagccagctgcagagaatggagcccaaacagatgttctgggtgcgagcccggggctatattggcgagggcgacatgaagatgcactgctgcgtggccgcctatatctccgactatgccttcttgggcactgcactgctgcctcaccagtggcagcacaaggtgcacttcatggtctcactggaccattccatgtggttccacgcccccttccgagctgaccactggatgctctatgaatgcgagagcccctgggccggtggctctcgggggctggtccatgggcggctgtggcgtcaggatggagtcctagctgtgacctgtgcccaggagggcgtgatccgagtgaagccccaggtytcagagagcaagctgtagccagaggtaccagcttcgcctggggcttcaagaacctcccatctatccccattcctgagacaggagttacagtcccttttggccctcacatccaataaagagactgataccactggagtggctggcttttaattcccctgggccagacctgcagccttgccttcatcccttaactccaggactccaggggcagagtccctggccttcagccaagaggccttgccagcttgggggcccaccaacaagggaacattgccccaacctgtgccacagccccccggctgtttataggctggagaggctgtgtcagacttccctgtactacacaagggcaaccccagccaaagctcaccctgagcctagctcaacagaagtttccttgatctgcttcacattctcttttggaacttctaggggctcccagcaccctctgcagcctcccagctattctgttctcatcaggtccttcccctgccttctggggcaacccctctcctcacagtggccttaaatctaggcaagggttagtccagcacctccttgatgagcaattctttgagactggggggtggtgtgggggtaaggcctgcctcctgcagggcttggagccgagcctctgattgacgtttgtccaggcccaggcgccaggagagccggacatgggcctccaraaagggtgccagcaaagggtggaggctcttgtccccaagcagctgcagggccttctcacagcatgcccgggcctctccagggtcttccagctcctggtggcacacggccagcccagccagggtcagcagggggcggtctgggccagagggggtgcccagctgggcttgcagctgccaggcattggcccagagtgccagagcctcacgatagaggccagtacaggtgaggctctgtgcccgccgcagctcc

SEQ ID NO: 6424 - DNA, 1370 bp, Homo sapiens
acccgcagtccatcagactgccatttggggatgccttttcaaaatagattctgattccaccctcaagattctcactcagtaggtcttggataaggtccaggaaactgtatttttaagttctctaagtgattctgattaacctgattgggatcggggcattcagtggtccctaagggcctgcttggaccttccttgcaggggagagaaacaagactcgttcatcaatgtctagcttcagaaccctgacctcctttccaagggagtacatttcaaatgaagaaaagctttgcttgataaaccaaggacaaaactcaaggattctttatactcagataaggggtattctcaagtaccaatagcatcacaatccaagattgataaccttgaagtgaggacatgggttcagatttggcttcatcatggggccaaattcctgaccctctctggatttcagtcctggtctggaaaacwggacaacacataactgcttcatttggctactgtgagaactgagtgagctctgctatgtgtaagrgaaaccagcaatcatcctcataaacatcaaacttgggcccaaagccagcragggagaaagagtctccagatggggagggaagaggccagacctcatggcctcaagtcctctcttctgagtccyttcttccccttggtggtggtagtggggatatttttcatgaattaccacttggaggacctggcttgatttattatacagggagccgatagttttcctaacacaagtggtcagaggtacagcagttctgcttggccgarctgttgaaggagactgttctcagagctcctccctctgtgatctttttgaggaagcgaggagaggtgtgaaagtgcttttaaactgtcaactggggttcctgtgggaggagttacccctcaatgacggtccataataagctcatgaaggggcatttggagcagccacgacactcagtgcacccttgtgtggggcagccctgccctgggccagaccctttgcaagaagtccacttggaggttgggcatggtgatgtgcgcctgtaatcccagctgctcaggaggctgaggcgggaggatcccttgaacccaggcgcttgagaccagcctggcaacttagtgrgactctgtttcaggaaaaaaaaaaaaagtgtatttggctgttctgaagcaggccatcatcacccttcacctcacccacaggtggctctcgggggctggtccatgggcggctgtggcgtcaggatggagtcctagctgtgacctgtgcccaggagggcgtgatccgagtgaagccccaggtytcagagagcaagctgtagccagaggtaccagcttcgcctggggcttcaagaacc

SEQ ID NO: 6425 - DNA, 805 bp, Homo sapiens
cgggcgggcgggcccgcagtcctgcagttgcagtcgtgttctccgagttcctgtctctctgccaacgccgcccggatggcttcccaaaaccgcgacccagccgccactagcgtcgccgccgcccgtaaaggagctgagccgagsgggggcgccgcccggggtccggtgggcaaaaggctacagcaggagctgatgaccctcatgatgtctggcgataaagggatttctgccttccctgaatcagacaaccttttcaaatgggtagggaccatccatggagcagctggaacagtatatgaagacctgaggtataagctctcgctagagttccccagtggctacccttacaatgcgcccacagtgaagttcctcacgccctgctatcaccccaacgtggacacccagggtaacatatgcctggacatcctgaaggaaaagtggtctgccctgtatgatgtcaggaccattctgctctccatccagagccttctaggagaacccaacattgatagtcccttgaacacacatgctgccgagctctggaaaaaccccacagcttttaagaagtacctgcaagaaacctactcaaagcaggtcaccagccaggagccctgacccaggctgcccagcctgtccttgtgtcgtctttttaatttttccttagatggtctgtcctttttgtgatttctgtataggactctttatcttgagctgtggtatttttgttttgtttttgtcttttaaattaagcctcggttgagcccttgtatattaaataaatgcatttttgtccttttttagacaa

SEQ ID NO: 6426 - DNA, 751 bp, Homo sapiens
cgggcgggcgggcccgcagtcctgcagttgcagtcgtgttctccgagttcctgtctctctgccaacgccgcccggatggcttcccaaaaccgcgacccagccgccactagcgtcgccgccgcccgtaaaggagctgagccgagsgggggcgccgcccggggtccggtgggcaaaaggctacagcaggagctgatgaccctcatgatgtctggcgataaagggatttctgccttccctgaatcagacaaccttttcaaatgggtagggaccatccatggagcagctggaacagcagtggggagcatcagaaccagctcaacagtttgtctactgtccggtcccagagaaactcaagattctagcaagccccttgtgtggggcttgggttgggacatgaggctgctgctggagcttactctgcaactgtttctccaaatgccagaacccaacattgatagtcccttgaacacacatgctgccgagctctggaaaaaccccacagcttttaagaagtacctgcaagaaacctactcaaagcaggtcaccagccaggagccctgacccaggctgcccagcctgtccttgtgtcgtctttttaatttttccttagatggtctgtcctttttgtgatttctgtataggactctttatcttgagctgtggtatttttgttttgtttttgtcttttaaattaagcctcggttgagcccttgtatattaaataaatgcatttttgtccttttttagacaa

SEQ ID NO: 6427 - DNA, 1539 bp, Homo sapiens
aggaagctgcccgagcggcgctctgagcggcctgagcccrgcggagccctgcagaacccggccgayctccatgggctgcggggggctgcacccggacccctggggcgcggcgcgcccctgaatgcaccgtgggacgcaggagggtgccatggcctcccggctcctgcaccggctgcggcacgccttggccggcgacggccccggggaggcggcggccagtccagaggccgagcagtttccggagagctcagagctggaggacgacgacgccgagggcctgtcctcccgactcagcggcaccctcagcttcaccagcgccgaggacgacgaggacgacgaggacgaggacgacgaggaggctggccctgaccagctgcccctcggggatgggacgtcaggagaagacgcaggcgaccccccacctgatgggcagtggggcagtcagctcctggcgcggcagctgcaggatttctggaagaagtcccggaacaccttggcaccccagcggctgctcttcgaagtgaccagcgctaacgttgtcaaggacccgccctccaagtacgtgctctacaccctcrccgtgatcggcccaggaccgccagattgccagccagcccagatctctcgccgttactcggacttwgagcggctgcmccgaaacctgcagcgscaattccggggcccaatggctgccatctccttcccccagtcycactaagttgccaggctggtctcaagcgcctgggttcaagggatcctcccgcctcagcctcctgagcagctgggattacaggcgcacatcaccatgcccaacctccaagtggacttcttgcaaagggtctggcccagggcagggctgccccacacaagggtgcactgagtgtcgtggctgctccaaatgccccttcatgagcttattatggaccgtcattgaggggtaactcctcccacaggaaccccagttgacagtttaaaagcactttcacacctctcctcgcttcctcaaaaagatcacagagggaggagctctgagaacagtctccttcaacagytcggccaagcagaactgctgtacctctgaccacttgtgttaggaaaactatcggctccctgtataataaatcaagccaggtcctccaagtggtaattcatgaaaaatatccccactaccaccaccaaggggaagaarggactcagaagagaggacttgaggccatgaggtctggcctcttccctccccatctggagactctttctccctygctggctttgggcccaagtttgatgtttatgaggatgattgctggtttcycttacacatagcagagctcactcagttctcacagtagccaaatgaagcagttatgtgttgtccwgttttccagaccaggactgaaatccagagagggtcaggaatttggccccatgatgaagccaaatctgaacccatgtcctcacttcaaggttatcaatcttggattgtgatgctattggtacttgagaataccccttatctgagtataaagaatccttgagttt

SEQ ID NO: 6428 - DNA, 1732 bp, Homo sapiens
aggaagctgcccgagcggcgctctgagcggcctgagcccrgcggagccctgcagaacccggccgayctccatgggctgcggggggctgcacccggacccctggggcgcggcgcgcccctgaatgcaccgtgggacgcaggagggtgccatggcctcccggctcctgcaccggctgcggcacgccttggccggcgacggccccggggaggcggcggccagtccagaggccgagcagtttccggagagctcagagctggaggacgacgacgccgagggcctgtcctcccgactcagcggcaccctcagcttcaccagcgccgaggacgacgaggacgacgaggacgaggacgacgaggaggctggccctgaccagctgcccctcggggatgggacgtcaggagaagacgcagaacggagccccccacctgatgggcagtggggcagtcagctcctggcgcggcagctgcaggatttctggaagaagtcccggaacaccttggcaccccagcggctgctcttcgaagtgaccagcgctaacgttgtcaaggacccgccctccaagtacgtgctctacaccctcrccgtgatcggcccaggaccgccagattgccagccagcccagatctctcgccgttactcggacttwgagcggctgcmccgaaacctgcagcgscaattccggggcccaatggctgccatctccttcccccgtaagcggctgcgccggaattttactgcagagaccattgcccgccgtagccgggcctttgagcagtttttgggtcacctgcaggcagtgcctgagctgcgccatgccccggacctgcaggacttcttcgtgctgccggagctgcggcgggcacagagcctcacctgtactggcctctatcgtgaggctctggcactctgggccaatgcctggcagctgcaagcccagctgggcaccccctctggcccagaccgccccctgctgaccctggctgggctggccgtgtgccaccaggagctggaagaccctggagaggcccgggcatgctgtgagaaggccctgcagctgcttggggacaagagcctccaccctttgctggcaccctttytggaggcccatgtccggctctcctggcgcctgggcctggacaaacgtcaatcagaggctcggctccaagccctgcaggaggcaggccttacccccacaccaccccccagtctcaaagaattgctcatcaaggaggtgctggactaacccttgcctagatttaaggccactgtgaggagaggggttgccccagaaggcaggggaaggacctgatgagaacagaatagctgggaggctgcagagggtgctgggagcccctagaagttccaaaagagaatgtgaagcagatcaaggaaacttctgttgagctaggctcagggtgagctttggctggggttgcccttgtgtagtacagggaagtctgacacagcctctccagcctataaacagccggggggctgtggcacaggttggggcaatgttcccttgttggtgggcccccaagctggcaaggcctcttggctgaaggccagggactctgcccctggagtcctggagttaagggatgaaggcaaggctgcaggtctggcccaggggaattaaaagccagccactccagtggtatcagtctctttattggatgtgagggccaaaagggactgtaactcctgtctcaggaatggggatagatgggag

SEQ ID NO: 6429 - DNA, 1646 bp, Homo sapiens
ctgcgccgggctggggtacccctcctccgggatccggtacacagcgtcgcgcgctccccccagggtgccatggcctcccggctcctgcaccggctgcggcacgccttggccggcgacggccccggggaggcggcggccagtccagaggccgagcagtttccggagagctcagagctggaggacgacgacgccgagggcctgtcctcccgactcagcggcaccctcagcttcaccagcgccgaggacgacgaggacgacgaggacgaggacgacgaggaggctggccctgaccagctgcccctcggggatgggacgtcaggagaagacgcagaacggagccccccacctgatgggcagtggggcagtcagctcctggcgcggcagctgcaggatttctggaagaagtcccggaacaccttggcaccccagcggctgctcttcgaagtgaccagcgctaacgttgtcaaggacccgccctccaactctacaccctcrccgtgatcggcccaggaccgccagattgccagccagcccagatctctcgccgttactcggacttwgagcggctgcmccgaaacctgcagcgscaattccggggcccaatggctgccatctccttcccccgtaagcggctgcgccggaattttactgcagagaccattgcccgccgtagccgggcctttgagcagtttttgggtcacctgcaggcagtgcctgagctgcgccatgccccggacctgcaggacttcttcgtgctgccggagctgcggcgggcacagagcctcacctgtactggcctctatcgtgaggctctggcactctgggccaatgcctggcagctgcaagcccagctgggcaccccctctggcccagaccgccccctgctgaccctggctgggctggccgtgtgccaccaggagctggaagaccctggagaggcccgggcatgctgtgagaaggccctgcagctgcttggggacaagagcctccaccctttgctggcaccctttytggaggcccatgtccggctctcctggcgcctgggcctggacaaacgtcaatcagaggctcggctccaagccctgcaggaggcaggccttacccccacaccaccccccagtctcaaagaattgctcatcaaggaggtgctggactaacccttgcctagatttaaggccactgtgaggagaggggttgccccagaaggcaggggaaggacctgatgagaacagaatagctgggaggctgcagagggtgctgggagcccctagaagttccaaaagagaatgtgaagcagatcaaggaaacttctgttgagctaggctcagggtgagctttggctggggttgcccttgtgtagtacagggaagtctgacacagcctctccagcctataaacagccggggggctgtggcacaggttggggcaatgttcccttgttggtgggcccccaagctggcaaggcctcttggctgaaggccagggactctgcccctggagtcctggagttaagggatgaaggcaaggctgcaggtctggcccaggggaattaaaagccagccactccagtggtatcagtctctttattggatgtgagggccaaaagggactgtaactcctgtctcaggaatggggatagatgggag

SEQ ID NO: 6430 - DNA, 4921 bp, Homo sapiens
caactgctcctggagtgacctaaggccagtgtttatcagaacttagccagggccagccaagcaggcacagatgctctgctatgaaatgccacgcaggcagagactgacaagcggtaggaactgagctttccccttggactgctgcttcctgctgtgttcaggggagggggtcactttctggcaactctgctgctgctgctgctgctgctgctrcttcagcttcctctccactcaaggtaagcaggctaagggagggcaggctgctagggaaagctttgtaccatgaacaggatccgaaagtttttccgaggaagtgggcgagtcttggcatttatctttgtagcttctgtcatctggctcctctttgacatggcagctctccgcctctcattcagtgagatcaacactcgggtcatcaaggaagacattgtgaggagggagcggataggattcagagttcagccagaccaaggaaaaattttttacagcagcataaaagagatgaaacctcycctaaggggacatgggaaaggggcatggggcaaagagaatgttagaaaaactgaggagagtgtgctcaaggttgaggtggacttggaccaaacccagagggaaagaaaaatgcagaatgccctgggaaggggcaaggttgtgccgttgtggcatcctgcacatctgcagaccctccctgtgactcctaacaagcagaagacagacgggagaggcaccaaacctgaagcctcctctcaccaggggacaccaaagcaaacgacagctcagggggctccaaagacctcattcatagcagcaaaaggaactcaggtagtcaaaatatcagtacacatgggacgtgtcagtttaaaacaggagccccggaagagtcatagtcccagcagtgacacatcaaaactagcagctgaaagggacttgaatgtgaccatcagtcttagtactgatagaccaaagcagcgatcacaggcagtagcaaacgagagggcacaccctgccagcacagcagtgccgaagtctggggaagccatggccttaaacaaaactaagactcagagcaaagaagtcaatgcaaataaacacaaagccaatacgagtcttccttttcctaagttcactgtcaattcaaatcgcttaaggaagcaatctattaatgagacacctttgggaagtttgtcaaaggatgatggagctagaggggctcatgggaagaaactcaatttctctgaaagccatcttgtgattataaccaaagaggaagagcaaaaggcagaccccaaagaggtctctaattctaaaaccaaaacaatatttcctaaagtattgggtaaaagccaaagtaaacacatttccaggaatagaagtgagatgtcttcctcttcacttgctccacatagagtgccactgtcccaaactaaccatgctttaactggagggctagagccagcaaaaatcaacataactgccaaagccccctctacagaatacaaccagagtcatataaaagcccttttacctgaagacagtggaacgcaccaggtgttaagaattgatgtgacactttctccaagggaccccaaagctccagggcagtttgggcgtcctgtagttgtcccccatggaaaggagaaggaggcagaaagaagatggaaagaaggaaacttcaatgtctaccttagcgatttgatcccagtggatagagccattgaagacaccagacctgctggatgtgcagagcasctagttcacaataacctcccaaccaccagtgtcatcatgtgctttgtggatgaagtgtggtccactctcctgagatctgttcacagtgtcatcaatcgctctcctccacacctcatcaaggagattctgctggtagatgacttcagcaccaaagactatctaaaagataatttggataaatacatgtcccagtttccaaaagttcggattcttcgcctcaaagagagacatggcttaataagggccaggctggcaggagcacagaatgcaacaggtgatgtgttgacatttttagattctcatgtggaatgtaacgttggttggttggaacctcttctggaaagagtttatttaagtagaaagaaagtggcctgtccagtaatcgaagtcatcaatgataaggatatgagttacatgacagtggataactttcaaagaggcatctttgtgtggcccatgaactttggttggagaacaattcctccagatgtcattgcaaaaaacagaattaaagaaactgatacaataaggtgccctgtcatggctggtggattgttttctattgacaaaagttacttttttgaacttggaacatacgaccctggccttgatgtttggggtggggaaaatatggagctctcattcaaggtgtggatgtgtggtggtgaaattgagatcattccctgctcccgagtgggccatatattcagaaatgacaatccatattccttccccaaagaccggatgaagacagtggagcggaacttggtgcgggttgccgaggtctggctggatgagtataaggagctgttctatggccayggagaccacctcatcgaccaagggctagatgttggcaacctcacccagcaaagggagctgcgaaagaaactgaagtgcaaaagtttcaaatggtacttrgagaatgtctttcctgacttaagggctcccattgtgagagctagtggtgtgcttattaatgtggctttgggtaaatgcatttccattgaaaacactacagtcattctggaagactgcgatgggagcaaagagcttcaacaatttaattacacctggttaagacttattaaatgtggagaatggtgtatagcccccatccctgataaaggagccgtaaggctgcacccttgtgataacagaaacaaagggctaaaatggctgcataaatcaacatcagtctttcatccagaactggtgaatcacattgtttttgaaaacaatcagcaattattatgcttggaaggaaatttttctcaaaagatcctgaaagtagctgcctgtgacccagtgaagccatatcaaaagtggaaatttgaaaaatattatgaagcctgaagtgtaactgatgtttttatatagtaaacccattaaatactgtgaaaataacactgaacttggaaactatatttctcagcggtagtttaaattttcaattttaataacatttgaatggaagattttttataaatcacaatatttggaataccaaaagatgactcaggaaaacagtccaacattggactgaagtccttcttcggaactgggtggcctttgaattgcctgctttccaccctrtgctagacctcatcatgcaaatttccctgtgaaagctaacaggtaactggaaatgaagacagaaggacttgagaaagcatgaggatattcccaatgactatgtttggtaataatcagctcttctggcccacaagtaggaatgatcaatgagaacttaacttagtcctttatttggggattttttcatcaaacaaaaatttcttgagttcttatggctagaagacctcagatgcccacagctgtcacgtttgtgaaatccctccagactacatgcatgcttacctaacagtttgaaatagtattgatctactgctggtaaccctgcttgatggcagcattttgatctaaattacataatggtttttcccaatctgaatcagtggaaaaaaatttaagtgaggaagaagaggccttcaaatgcttatttaattctaggtatgaacactatttcagttcattttgtgcytttaaaactacagttttaaagatttatgataccaataacttcctagattcatgtggattttttttaaggcaatgaaaaaaggctggattataacacactgtagtaatcaaaaatgcatttaagcattgaatgcactctagtgcagggccaagtaagaggagttgaaatgagtaaagcagaaatagagctgctgaaagtttcttttatataaaaataataaaatactactttagatatagtagcattcacagggatgaaatatgcgaaaaatgggttctaaaatatttcaaagggaaaatgaagtgaaggaaacatcatgaaaggggaaaggaatgaggtaaacaagtcttaggaagagagttaagaaaaaattccgctggacttggccaaagaaagaaggggatctagtatctctatgaaggaaaaaagagtaaagccctcagtgtgaacccagtgagaacactgacaaatttgggaaaagttaaatactgatttcatccaaataaagcctctaatcttaagcataccaatactttggcataccagaagacaccttagaaatcaggatagcctttgcattcattttggtaagaaaactgatgctgagaggataaattacctaaaaatcttaaaacccaggcaagttagtcaaagaatcaagattagaattcaggtttccagagacagggctcattctaatgcctcaggtcactggcccgaacaaatctgcttcacagaattccttagaaagagatacacaattctttgctgggattgggtccctggaggacaaccatactatattcttgttaatatgttttttctttttttaaatttaaacttttgttcagttgagatgattgtgaaactaggtatctttcattctgactcctagtttaacatttaattttgactcccaatgagttacgtaaaagcaaaactataactaagaatgggaaaaagaactatttctgcacatttgtaacatatttaagatgttttcttcatataattgaaaactgcagatgagtaagagaatgactaggaaatgagatacagttatatgacacataatgatgttttagtcaacaatgaaccacatatttgaca

SEQ ID NO: 6431 - DNA, 2145 bp, Homo sapiens
tgacmgtttccgcttccgtccacttggcgagtgagacgctgatgggaggatggacrtactggtgtctgagtgctccgcgcggctgctgcagcaggaagaagagattaaatctctgactgctgaaattgaccggttgaaaaactgtggctgtttaggagcttctccaaatttggagcagttacaagaagaaaatttaaaattaaagtatcgactgaatattcttcgaaagagtcttcaggcagaaaggaacaaacyaactaaaaatatgattaacattattagccgcctacargaggtctttggtcatgcaattaaggctgcatatccagatttggaaaatcctcctctgctagtgacaccaagtcagcaggccaagtttggggactatcartgtaatagtgctatgggtatttctcagatgctcaaaaccaaggaacagaaagttaatccaagagaaattgctgaaaacattaccaaacacctcccagacaatgaatgtattgaaaaagttgaaattgctggtcctggttttattaatgtccacttaagaaaggattttgtatcagaacaattgaccagtcttctagtgaatggagttcaactacctgctctgggagagaataaaaaggttatagttgacttttcctcccctaatatagctaaagagatgcatgtaggccacctgaggtcaactatcataggagagagtataagccgcctctttgaatttgcagggtatgacgtgctcaggttaaatcatgtaggagactgggggacccagtttggcatgctcatcgctcacctgcaagacaaatttccagattatctaacagtttcacctcctattggggatcttcaggtcttttataaggaatctaagaagaggtttgatactgaggaggaatttaagaagcgagcatatcagtgtgtagttctgctccagggtaaaaacccagatattacaaaagcttggaagcttatctgtgatgtctcccgccaagagttaaataaaatctatgatgcattggacgtctctttaatagagagaggggaatccttctatcaagataggatgaatgatattgtaaaggaatttgaagatagaggatttgtgcaggtggatgatggcagaaagattgtrtttgtcccagggtgttccataccattaaccatagtaaaatcagatggaggttatacctatgatacatctgacctggctgctattaaacaaagactrtwtgaggaaaaagcagatatgattatctatgttgtggacaatggacaatctgtgcacttccagacaatatttgctgctgctcaaatgattggttggtatgaccctaaagtaactcgagtcttccatgctggatttggtgtggtgctaggggaagacaagaaaaagtttaaaacacgttcrggtgaaacagtgcgcctcatggatcttctgggagaaggactwaaacgatccatggacaagttgaaggaaaaagaaagagacaaggtcttaactgcagaggaattgaatgctgctcagacatccgttgcrtatggctgcatcaaatatgctgacctttcccataaccggttgaatgactacatcttctcctttgacaaaatgctagatgacagaggaaatacagctgcttacttgttgtatgccttcactagaatcaggtctattgcacgtctggccaatattgatgaagaaatgctccaaaaagctgctcgagaaaccaagattcttttggatcatgagaaggaatggaaactaggccggkgcattttacggttccctgagattctgcaaaagattttagatgacttatttctccacactctctgtgattawawawatgagctggcaactgctttcacagagttctatgatagctgctactgtgtggagaaagatagacagactggaaaaatattgaaggtgaacatgtggcgtatgctgctatgtgaagcagtagctgctgtcatggccaaggggtttgatatcctgggaataaaacctgtccaaaggatgtaatccttcataggtttgaacactgtgtgtttttaccaaagtggccattggcactgtttgcttttttamaatcatgtggacacargcataagtaaagaaaatttgtcaaccaggca

SEQ ID NO: 6432 - DNA, 5200 bp, Homo sapiens
accggagggggaggggcggagagccaccgcggagcgcgcgcggggttggttgccgcgagcgtgggggagcgtggaccgcggcgctgctcagcggtggggctgccttcccccggccctcctccctggtccctggcgagggcactggcggcggcggggccggggtccgcaaggccggagaaggccgccgggcccgggcatggtggtctggggcaacgcggaagaagctccaccatgaggcgaggtggatggaggaagcgagctgaaaatgatggctgggaaacatggggtgggtatatggctgccaaggtccagaaattggaggaacagtttcgatcagatgctgctatgcagaaggatgggacttcatctacaatttttagtggagttgccatctatgttaatggatacacagatccttccgctgaggaattgagaaaactaatgatgttgcatggaggtcaataccatgtatattattccagatctaaaacaacacatattattgccacaaatcttcccaatgccaaaattaaagaattaaagggggaaaaagtaattcgaccagaatggattgtggaaagcatcaaagctggacgactcctctcctacattccatatcagctgtacaccaagcagtccagtrtgcagaaaggtctcagctttaatcctgtatgcagacctgaggatcctctgccaggtccaagcaatatagccaaacagctcaacaacagggtaaatcacatcgttaagaagattgaaacggaaaatgaagtcaaagtcaatggcatgaacagttggaatgaagaagatgaaaataatgattttagttttgtggatctggagcagacctctccgggaaggaaacagaatggaattccgcatcccagagggagcactgccatttttaatggacacactcctagctctaatggtgccttaaagacacaggattgcttggtgcccatggtcaacagtgttgccagcaggctttctccagcctyttcccaggaggaggataaggctgagaagagcagcactgatttcagagactgcactctgcagcagttgcagcaaagcaccagaaacacagatgctttgcggaatccacacagaactaattctttctcattatcacctttgcacagtaacactaaaatcaatggtgctcaccactccactgttcaggggccttcaagcacaaaaagcacttcttcagtatctacgtttagcaaggcagcaccttcrgtgccatccaaaccttcagactgcaattttatttcaaacttctattctcattcaagactgcatcacatatcaatgtggaagtgtgaattgactgagtttgtcartaccctacaaagacaaagtaatggtatctttccaggaagggaaaagttaaaaaaaatgaaaacaggcaggtctgcacttgttgtaactgacacaggagatatgtcagtattgaattctcccagacatcagagctgtataatgcatgttgatatggattgcttctttgtatcagtgggtatacgaaatagaccagatctcaaaggaaaaccagtggctgttacaagtaacagaggcacaggaagggcacctttacgtcctggcgctaacccccagctggagtggcagtattaccagaataaaatcctgaaaggcaaagcagcagatataccagattcatcattgtgggagaatccagattctgcgcaagcaaatggaattgattctgttttgtcaagggctgaaattgcatcttgtagttatgaggccaggcaacttggcattaagaacggaatgttttttgggcatgctaaacaactatgtcctaatcttcaagctgttccatacgattttcatgcatataaggaagtcgcacaaacattgtatgaaacattggcaagctacactcataacattgaagctgtcagttgtgatgaagcgctggtagacattaccgaaatccttgcagagaccaaacttactcctgatgaatttgcaaatgctgttcgtatggaaatcaaagaccagacgaaatgtgctgcctctgttggaattggttctaatattctcctggctagaatggcaactagaaaagcaaaaccagatgggcagtaccacctaaaaccagaagaagtagatgattttatcagaggccagctagtgaccaatctaccaggagttggacattcartggaatctaagtkggcatctttgggaattaaaacttgtggagacttgcagtatatgaccatggcaaaactccaaaaagaatttggtcccaaaacaggtcagatgctttataggttctgccgtggcttggatgatagaccagttcgaactgaaaaggaaagaaaatctgtttcagctgagatcaactatggaataaggtttactcagccaaaagaggcagaagcttttcttctgagtctttcagaagaaattcaaagaagactagaagccactggcatgaagggtaaacgtctaactctcaaaatcatggtacgaaagcctggggctcctgtagaaactgcaaaatttggaggccatggaatttgtgataacattgccaggactgtaactcttgaccaggcaacagataatgcaaaaataattggaaaggcgatgctaaacatgtttcatacaatgaaactaaatatatcagatatgagaggggttgggattcacgtgaatcagttggttccaactaatctgaacccttccacatgtcccagtcgcccatcagttcagtcaagccactttcctagtgggtcatactctgtccgtgatgtcttccaagttcagaaagctaagaaatccaccgaagaggagcacaaagaagtatttcgggctgctgtggatctggaaatatcatctgcttctagaacttgcactttcttgccaccttttcctgcacatctgccgaccagtcctgatactaacaaggctgagtcttcagggaaatggaatggtctacatactcctgtcaktgtgcagtcgagacttaacctgagtatagaggtcccgtcaccttcccagctggatcagtctgttttagaagcacttccacctgatctccgggaacaagtagagcaagtctgtgctgtccagcaagcagagtcacatggcgacaaaaagaaagaaccagtaaatggctgtaatacaggaattttgccacaaccagttgggacagtcttgttgcaaataccagaacctcaagaatcraacagtgacrcaggaataaatttaatagcccttccagcattttcacaggtggaccctgaggtatttgctgcccttcctgctgaacttcagagggagctgaaagcagcgtatgatcaaagacaaaggcagggcgagaacagcactcaccagcagtcagccagcgcatctgtgccaaagaatmctttacttcatctaaaggcagcagtgaaagaaaaraaaagaaasaagaagaaaaaaaccatyggttcaccaaaaaggattcagagtcctttgamtaacaagctgcttaacagtcctgcaaaaactcygccaggggcctgtggcagtccccagaagttaattgatgggtttctaaaacatgaaggacctcctgcagagaaacccctggaagaactctctgcttctacttcaggtgtgccaggcctttctagtttgcagtctgacccagctggctgtgtgagacctccagcacccaatctagctggagctgttgaattcaatgatgtgaagaccttgctcagagaatggataactacaatttcagatccaatggaagaagacattctccaagttgtgaaatactgtactgatctaatagaagaaaaagatttggaaaaactggatctagttataaaatacatgaaaaggctgatgcagcaatcggtggaatcggtttggaatatggcatttgactttattcttgacaatgtccaggtggttttacaacaaacttatggaagcacattaaaagttacataaatattaccagagagcctgatgctctctgatagctgtgccataagtgcttgtgaggtatttgcaaagtgcatgatagtaatgctcggagtttttataattttaaatttcttttaaagcaagtgttttgtacatttcttttcaaaaagtgccaaatttgtyagtattgcatgtaaataattgtgttaattattttactgtagcatagattctatttacaaaatgtttgtttataaagttttatggatttttacagtgaagtgtttacagttgtttaataaagaactgtatgtatattttgtacaggctcctttttgtgaatccttaaaaactcaactctaggaagcaactactgtttattatactaaaaggctgaaaaacctccaggccagactgctaagctctgaaattcctgagaggtctcagaccgggattctacttgttccaagaaagggtaaagcttctaaaccatcttattcttgtctccaagcatgaacacaggagcatgttaagaaaatctttactacttcttccatgcggagaaatctacatattttgaattagaaacaccctcacacccacttgaagatttttttcctgggaacattatgtcccrtagatcagaggtggtgktgtctttttgcttctactggccattgagaaactttgatgataaaaaagaacggtatagatttttcaaacgtatataaaatatttttatgttatatgttatgccataactttaaaataaaaatagtttaaaattctatgctagtggatatttggaactttttcctcaaacaaacaccccacactgacttcagcaaaaccctaaaactagctacagattactactacgaatgaatcattaagttttgtgtctgcaacaatttagaagcactaagcccaaatatcaggaaatgtgtgtatgatggaattttctaggacaaaacagatcaagattaaaacagatcaagattaatgtataaaaatstctactaaaacagatcaagattaaaacagatcaagattaatgtataaaaatctctactgttaccaggtgctggcatacaaggtagtgtgatgatagtttagtttgtaagataattcttgtcctaggaggacaacttgtgggagagaagctacactaacatggaagcctaacagagcttgcttactggtggatgtctgttttctttattggtagtttggttta

SEQ ID NO: 6433 - DNA, 5197 bp, Homo sapiens
accggagggggaggggcggagagccaccgcggagcgcgcgcggggttggttgccgcgagcgtgggggagcgtggaccgcggcgctgctcagcggtggggctgccttcccccggccctcctccctggtccctggcgagggcactggcggcggcggggccggggtccgcaaggccggagaaggccgccgggcccgggcatggtggtctggggcaacgcggaagaagctccaccatgaggcgaggtggatggaggaagcgagctgaaaatgatggctgggaaacatggggtgggtatatggctgccaaggtccagaaattggaggaacagtttcgatcagatgctgctatgcagaaggatgggacttcatctacaatttttagtggagttgccatctatgttaatggatacacagatccttccgctgaggaattgagaaaactaatgatgttgcatggaggtcaataccatgtatattattccagatctaaaacaacacatattattgccacaaatcttcccaatgccaaaattaaagaattaaagggggaaaaagtaattcgaccagaatggattgtggaaagcatcaaagctggacgactcctctcctacattccatatcagctgtacaccaagcagtccagtrtgcagaaaggtctcagctttaatcctgtatgcagacctgaggatcctctgccaggtccaagcaatatagccaaacagctcaacaacagggtaaatcacatcgttaagaagattgaaacggaaaatgaagtcaaagtcaatggcatgaacagttggaatgaagaagatgaaaataatgattttagttttgtggatctggagcagacctctccgggaaggaaacagaatggaattccgcatcccagagggagcactgccatttttaatggacacactcctagctctaatggtgccttaaagacacaggattgcttggtgcccatggtcaacagtgttgccagcaggctttctccagcctyttcccaggaggaggataaggctgagaagagcagcactgatttcagagactgcactctgcagcagttgcagcaaagcaccagaaacacagatgctttgcggaatccacacagaactaattctttctcattatcacctttgcacagtaacactaaaatcaatggtgctcaccactccactgttcaggggccttcaagcacaaaaagcacttcttcagtatctacgtttagcaaggcagcaccttcrgtgccatccaaaccttcagactgcaattttatttcaaacttctattctcattcaagactgcatcacatatcaatgtggaagtgtgaattgactgagtttgtcartaccctacaaagacaaagtaatggtatctttccaggaagggaaaagttaaaaaaaatgaaaacaggcaggtctgcacttgttgtaactgacacaggagatatgtcagtattgaattctcccagacatcagagctgtataatgcatgttgatatggattgcttctttgtatcagtgggtatacgaaatagaccagatctcaaaggaaaaccagtggctgttacaagtaacagaggcacaggaagggcacctttacgtcctggcgctaacccccagctggagtggcagtattaccagaataaaatcctgaaaggcaaagcagatataccagattcatcattgtgggagaatccagattctgcgcaagcaaatggaattgattctgttttgtcaagggctgaaattgcatcttgtagttatgaggccaggcaacttggcattaagaacggaatgttttttgggcatgctaaacaactatgtcctaatcttcaagctgttccatacgattttcatgcatataaggaagtcgcacaaacattgtatgaaacattggcaagctacactcataacattgaagctgtcagttgtgatgaagcgctggtagacattaccgaaatccttgcagagaccaaacttactcctgatgaatttgcaaatgctgttcgtatggaaatcaaagaccagacgaaatgtgctgcctctgttggaattggttctaatattctcctggctagaatggcaactagaaaagcaaaaccagatgggcagtaccacctaaaaccagaagaagtagatgattttatcagaggccagctagtgaccaatctaccaggagttggacattcartggaatctaagtkggcatctttgggaattaaaacttgtggagacttgcagtatatgaccatggcaaaactccaaaaagaatttggtcccaaaacaggtcagatgctttataggttctgccgtggcttggatgatagaccagttcgaactgaaaaggaaagaaaatctgtttcagctgagatcaactatggaataaggtttactcagccaaaagaggcagaagcttttcttctgagtctttcagaagaaattcaaagaagactagaagccactggcatgaagggtaaacgtctaactctcaaaatcatggtacgaaagcctggggctcctgtagaaactgcaaaatttggaggccatggaatttgtgataacattgccaggactgtaactcttgaccaggcaacagataatgcaaaaataattggaaaggcgatgctaaacatgtttcatacaatgaaactaaatatatcagatatgagaggggttgggattcacgtgaatcagttggttccaactaatctgaacccttccacatgtcccagtcgcccatcagttcagtcaagccactttcctagtgggtcatactctgtccgtgatgtcttccaagttcagaaagctaagaaatccaccgaagaggagcacaaagaagtatttcgggctgctgtggatctggaaatatcatctgcttctagaacttgcactttcttgccaccttttcctgcacatctgccgaccagtcctgatactaacaaggctgagtcttcagggaaatggaatggtctacatactcctgtcaktgtgcagtcgagacttaacctgagtatagaggtcccgtcaccttcccagctggatcagtctgttttagaagcacttccacctgatctccgggaacaagtagagcaagtctgtgctgtccagcaagcagagtcacatggcgacaaaaagaaagaaccagtaaatggctgtaatacaggaattttgccacaaccagttgggacagtcttgttgcaaataccagaacctcaagaatcraacagtgacrcaggaataaatttaatagcccttccagcattttcacaggtggaccctgaggtatttgctgcccttcctgctgaacttcagagggagctgaaagcagcgtatgatcaaagacaaaggcagggcgagaacagcactcaccagcagtcagccagcgcatctgtgccaaagaatmctttacttcatctaaaggcagcagtgaaagaaaaraaaagaaasaagaagaaaaaaaccatyggttcaccaaaaaggattcagagtcctttgamtaacaagctgcttaacagtcctgcaaaaactcygccaggggcctgtggcagtccccagaagttaattgatgggtttctaaaacatgaaggacctcctgcagagaaacccctggaagaactctctgcttctacttcaggtgtgccaggcctttctagtttgcagtctgacccagctggctgtgtgagacctccagcacccaatctagctggagctgttgaattcaatgatgtgaagaccttgctcagagaatggataactacaatttcagatccaatggaagaagacattctccaagttgtgaaatactgtactgatctaatagaagaaaaagatttggaaaaactggatctagttataaaatacatgaaaaggctgatgcagcaatcggtggaatcggtttggaatatggcatttgactttattcttgacaatgtccaggtggttttacaacaaacttatggaagcacattaaaagttacataaatattaccagagagcctgatgctctctgatagctgtgccataagtgcttgtgaggtatttgcaaagtgcatgatagtaatgctcggagtttttataattttaaatttcttttaaagcaagtgttttgtacatttcttttcaaaaagtgccaaatttgtyagtattgcatgtaaataattgtgttaattattttactgtagcatagattctatttacaaaatgtttgtttataaagttttatggatttttacagtgaagtgtttacagttgtttaataaagaactgtatgtatattttgtacaggctcctttttgtgaatccttaaaaactcaactctaggaagcaactactgtttattatactaaaaggctgaaaaacctccaggccagactgctaagctctgaaattcctgagaggtctcagaccgggattctacttgttccaagaaagggtaaagcttctaaaccatcttattcttgtctccaagcatgaacacaggagcatgttaagaaaatctttactacttcttccatgcggagaaatctacatattttgaattagaaacaccctcacacccacttgaagatttttttcctgggaacattatgtcccrtagatcagaggtggtgktgtctttttgcttctactggccattgagaaactttgatgataaaaaagaacggtatagatttttcaaacgtatataaaatatttttatgttatatgttatgccataactttaaaataaaaatagtttaaaattctatgctagtggatatttggaactttttcctcaaacaaacaccccacactgacttcagcaaaaccctaaaactagctacagattactactacgaatgaatcattaagttttgtgtctgcaacaatttagaagcactaagcccaaatatcaggaaatgtgtgtatgatggaattttctaggacaaaacagatcaagattaaaacagatcaagattaatgtataaaaatstctactaaaacagatcaagattaaaacagatcaagattaatgtataaaaatctctactgttaccaggtgctggcatacaaggtagtgtgatgatagtttagtttgtaagataattcttgtcctaggaggacaacttgtgggagagaagctacactaacatggaagcctaacagagcttgcttactggtggatgtctgttttctttattggtagtttggttta

SEQ ID NO: 6434 - DNA, 2131 bp, Homo sapiens
accggagggggaggggcggagagccaccgcggagcgcgcgcggggttggttgccgcgagcgtgggggagcgtggaccgcggcgctgctcagcggtggggctgccttcccccggccctcctccctggtccctggcgagggcactggcggcggcggggccggggtccgcaaggccggagaaggccgccgggcccgggcatggtggtctggggcaacgcggaagaagctccaccatgaggcgaggtggatggaggaagcgagctgaaaatgatggctgggaaacatggggtgggtatatggctgccaaggtccagaaattggaggaacagtttcgatcagatgctgctatgcagaaggatgggacttcatctacaatttttagtggagttgccatctatgttaatggatacacagatccttccgctgaggaattgagaaaactaatgatgttgcatggaggtcaataccatgtatattattccagatctaaaacaacacatattattgccacaaatcttcccaatgccaaaattaaagaattaaagggggaaaaagtaattcgaccagaatggattgtggaaagcatcaaagctggacgactcctctcctacattccatatcagctgtacaccaagcagtccagtrtgcagaaaggtctcagctttaatcctgtatgcagacctgaggatcctctgccaggtccaagcaatatagccaaacagctcaacaacagggtaaatcacatcgttaagaagattgaaacggaaaatgaagtcaaagtcaatggcatgaacagttggaatgaagaagatgaaaataatgattttagttttgtggatctggagcagacctctccgggaaggaaacagaatggaattccgcatcccagagggagcactgccatttttaatggacacactcctagctctaatggtgccttaaagacacaggattgcttggtgcccatggtcaacagtgttgccagcaggctttctccagcctyttcccaggaggaggataaggctgagaagagcagcactgatttcagagactgcactctgcagcagttgcagcaaagcaccagaaacacagatgctttgcggaatccacacagaactaattctttctcattatcacctttgcacagtaacactaaaatcaatggtgctcaccactccactgttcaggggccttcaagcacaaaaagcacttcttcagtatctacgtttagcaaggcagcaccttcrgtgccatccaaaccttcagactgcaattttatttcaaacttctattctcattcaagactgcatcacatatcaatgtggaagtgtgaattgactgagtttgtcartaccctacaaagacaaagtaatggtatctttccaggaagggaaaagttaaaaaaaatgaaaacaggcaggtctgcacttgttgtaactgacacaggtagatacttattaaaattgtcttcttaakaaacagtcatgcttgatcattttgctcttatgctattattggtatttctggtcaatatgaagttctcataaaagtctctaagtatgtcaaatcatgtaagttacagtaagcataacatagaaagctaatttattaaaatatttttaaaacaattagatataattgtggctgactgaaaattttcagagaatttaaacagtaagatggttgggattctgagcattcattcctcacgtagaccttatcagttggtgaagttttgaactgtgttaatataacatctatccagtgcttaaactcctgtaagaatgaaattggtttgataagagtaattgttaatttctagaagcttgcatcataatgattttttaattttgacatagagctgttgtaattaacagtggtaaactttcagtgagattatttcacatcttaagtacattggttcattgtattttgttttttaatacttttcttgtcatcaaaaacaaatgcacacacagtagcatactgtttttctgggccagtcattataaattagtatctggtttgaaattttagttccttttacagattataggatttttttatggggagagacctcagagattaatactctataatttatagctgtggaaactgaggtatagagagaag

SEQ ID NO: 6435 - DNA, 6393 bp, Homo sapiens
cccggcgtctagagcggcggcggctggctagggctgcggcgcgcgtggagggttcgctgctggtttgccgccgggtcgggctccgtgggccggggcaggaggaccagcacctgaggccgggcccgcagcccgcgacttcacagccaggcggcggcgctgctgctgctgcggggctctggcgcgcagcccggcgggacagcggggcggctggcgccgggggccggggagcgccagatgatggatttggacatgcttctatgaagaaatgccacatggtccgagagcaaacatgtccaggctactgccactttagtggactagggctcggtgccagcacttcccgggtaatcaggcgtggtctgaccgaggatcaagaagcacatcatcaccaatgacatcatgacagcaagagagcacagccctcgccatggtgccagggcccgtgcaatgcagcgggcttccaccatcgacgtggcggccgacatgctgggcctctctctggcaggaaatatacaagacccagatgagcccattttagaatttagcttagcttgcagtgagctgcatactccatcgctagatcgaaagccaaatagttttgttgcggtgagtgtcaccacccctcctcaggcattctggacgaagcatgcacagacrgagatcattgagggaaccaacaatcctatatttctaagcagtattgccttctttcaagactctcttatcaatcagatgacacaagtcaaactctccgtgtatgatgtcaaagatagatctcagggaacaatgtatttactgggctctggaacgttcattgtcaaagatctgctccaggacaggcatcataggttgcatttaacactaaggtctgcagagagtgaccgtgtaggtaacatcaccgtgattggctggcagatggaggagaagtcagaccaacggccccctgtgacccggtctgtggacactgtcaatgggaggatggttcttcctgtcgatgagagcttgacggaggcgttaggaatccgatccaaatacgcttcattgcgaaaggacactttgctgaaatcggtgttcggyggtgccatctgccgcatgtaccggtttccaaccactgatggtaaccatttgcggatcctggagcagatggcagagagcgtgctctccctgcacgtgccccggcagttcgtgaagctcctactagaggaagatgcagccagkgtgtgtgagctggaggagctgggagagctgtccccttgctgggagagcctccggcgccaaattgtcacccagtaccagaccatcatcctcacataccaggagaacctgaccgacctccatcagtacagagggccctcgtttaaagcaagcagtttgaaagcagataaaaagttagaatttgttcccacaaacttgcacatacaaaggatgagagttcaagacgatggaggatcagatcagaactacgacatcgtcaccattggggcgccagcagcacactgccaaggttttaagtcaggaggtctccgcaaaaagctgcacaaatttgaagagaccaagaaacatacatcatctggctgccagtccataatctacataccccaggatgttgtcagagccaaggagatcatcgcccagatcaacaccctgaaaacccaagtgagttactacgcagagcggctgtcaagggcagccaaggacaggtctgccactggccttgagaggacactcgccatcttggcagacaagacacggcagctggtcacggtctgcgactgcaagctcctggccaactccatccatgggctgaacgctgcacggcctgactacattgcctccaaggcctctcccacttcgactgaggaggagcaggtgatgcttagaaatgaccaggacaccctcatggcccggtggacagggagaaacagccgatcttccctgcaggtggactggcacgaggaggagtgggagaaagtgtggctgaacgtggacaagagcctagagtgcatcattcagcgtgtggacaagctgctgcagaaggagcggctgcatggcgagggctgtgaggatgtcttcccctgtgcaggcagctgcaccagcaagaaagattgcagtccccctcctgaagagtccagcccaggtgaatggagtgaggccctttacccgctgctgaccactctcaccgactgcgtggccatgatgagtgacaaggccaagaaggccatggtattcctgctcatgcaggacagcgcgcccaccatagccacctacctgagcctgcagtaccgccgtgacgtggtcttctgccagacgctgaccgccctcatctgcggcttcatcattaagctgaggaactgcctgcatgacgacggcttcctgcgccagctctacaccatcgggctgctggcccagttcgagagcctgctgagcacctacggggaggagctggcaatgctggaggacatgagccttgggatcatggacttgaggaacgtgaccttcaaagtcactcaggccacttccagcgcctccgcagacatgctgcccgtcatcacaggaaatcgcgacgggtttaacgtgcgggtccctctgccgggcccgctgtttgacgccttgccccgggagatccagagtggcatgctgctgcgagtgcagcccgtcctcttcaacgtgggcatcaatgagcagcagacactggccgagaggtttggcgatacgtctttacaagaagtcatcaacgtggagagtttggtgcggttaaattcctactttgagcagtttaaggaagttttgcctgaggattgcctgcctcggtctcgcagtcagacgtgcctgccagagctgctgcggtttctgggtcagaacgtgcatgcccggaagaataagaacgtcgacattctctggcaagctgctgagatctgccgccgccttaatggggtccggttcaccagctgcaagagygctaaggaccgtacagccatgtcggtgacactggagcagtgcctgatcctgcaacacgagcatggcatggccccgcaggtcttcacccaggccctggagtgcatgcgcagtgagggttgtcgaagagaaaatacaatgaagaatgttggaagtcgcaaatatgcatttaattccctgcagctgaaggctttccccaagcattacaggcctcccgaagggacttacggaaaagttgaaacgtgaacacacggtttcctctaattagctgttacataataaatgtgggtaccctctagtgtcatatatgaattcttcaagaagacctgaaggattggtttttattttttgtggtttttttaaaaaaaacatttcactaaagagtctctggagcatgttttttgttttttgggtttttttccccattggaatcaataggaggtaatgtttggctcaatagtgtggatagtaacaactgcctatttaaattaaatagcctttggctgtaactacacagatctcatcaatagttacctacatgaatcaagctaggtttgtctgaaatgctagaagactttttcaaatgcctgcttgctcacttacttttctacagagtaactcaaaagtaaccattgaattacaatccactttgtaaaaatctgaatgtaaaacagtaaataataaattaaataattggatcctaggcataccaataaatgttatttggggaaagaagctagcactatctcatgcagtgagaataacgggttctagtgaattatcctatctacactaccacctgaagaagttgaaagaaagattgataaatcaacgggagataagactttattagaaggtaacacctgcaaggtaccccacatagttggggccactcttttttctgtcccttatgasttacagaacagggagtctgctggagacacaaagccagcagtaaggtccctttagcctgtctcctgttctctgaagctccctgccgaggctccctcacgcccagaggacacatctccccttcttctctagatgttaatgtagggcctcagatgtggcatgtcaacactcccatggggaatttatgaccatagagatagtagaaacctaaatattttcagaaaaaaaattttttttgcaggatttccaatttatctttgaaaagacagtacaatcatgtttgaatgtctgatgaaagtgtcttatttttaggtttgcaataattgttactttcttattctcattcttatgtaagatgactattgagaaacagttgaaatttattctcctcaaatgagattttgaaagggatttatgggccataaaacttaggaatttcatagaaaattttgtctggtcatcttttataagatgatgatgagtcttatctgcacatagcagagtttgtttcttaggagtttatatgttttattgattctgtttacgatgtttacatgttcttgaaaaggttgtaaaagaaatacatatggcacatattaatgatgctgatcctaatgatttgtgaacctcttagaaattcttttgtctaaaagcctagagattcttctggttcctttagaaacatgtaacaaacttgggccaggggtgctgaggcatggggaggactgcttattggcaggaacacagagggggtgggcatcaggtagggtggaactggatgaccttccagaccccctcctactcagaagtcagcatgcaagcagcgcctgctgtctcccgatgcctgcagggaggaaaatgtctgtgaaggacactttaatgaaggacgaagctctctgctgctccctcaaagctgagttcactgtggcaggcaggaagcagagaagctcctgcccgccaaacccactgcacaggtggctgctgctggtatcagattctcctttttaagtgtcaatttctgttcacagacagtttgttttcaatatggctgatttaccctttcacctctccaccatctcatttaatttgtaaatttttagttctgtcttttctcattttaacttttaaaaaatctccttgctttttaaaaataaatattacccacatagttttcagatcttttttgtctggagagcattaaatatctgcactcatcaaagggaayatagcaaatgttgatcatctgtcagcagttttgcatgtgacacctttatatgaattattttcccaatttttgctctatgtaatgggtcaccataaaactgtaagacttggcaaatgctatagaaaaggttcaggtttcagtattctctctgaaggcatcattcctgggcttccggcagcatcacacgcttccagtgcctgcagggtgagggtgtgtggcacagaggcaagcagctcctctcttctgtaggagctttgggttttcagaggtgcagggaaggcagttttacaggttaccgtaaaacagaggttccgtccagtgttccttatgatgcctccccatttaaaaagaaaagagatctatggaaaactgggaatgtaatgtggattctgtcagagctcctacagagcacagttgcctttagtttcctttaaagatgtaaaaatattgtataatacagttttktccctacacaattgtatttgccaagcttagtgcattatgatacctttatttatttgttttgggcagtattactatatatatataaacatacagttactgttttatatattcttaggtcattcaaagccatgtatgctgtaaatgtgctagtctttagaatgacacataataaataactgacaagatattaaatgtggtcttgcctgattcatcctattaggaggactagttctatgtgaccagcctgtgactggaccattgttcttgggcattgcattgagtgctcgggtgctgaatacatgtttgtaaacatgggaccatgggagacttccattttataagcttgtttctgcctaatttgaagcagaggggcaacagcgttgaggttaagagcacggactttgggagcacacagaccaggtcccaatcctggttctgcccctgactggctggtgactctgagcaagttgcttgacctctccaagcctccgtttcctcatgtgcaaagtgtggacaacaacagtaccttcctcataaggaacgtgcgacgcgcctcagaagtacgtgttcataaatggtagccattgttgtwaccttcccgtctgtgaacatggatcacatcatctctgtgggtaacccagtcctcgttgtatgacttgtcaaaatgcagttccacttgtattaatattgaccctgttcatcgtcaccaggactgcatcttgcaccactgtgccgtcttctaggcacacacgrcccgttatctcccttggaaaaattcctctcactggaaatgtacaattaaaggatgattgaaatgtttaactcttggagttttt

SEQ ID NO: 6436 - DNA, 3834 bp, Homo sapiens
cccggcgtctagagcggcggcggctggctagggctgcggcgcgcgtggagggttcgctgctggtttgccgccgggtcgggctccgtgggccggggcaggaggaccagcacctgaggccgggcccgcagcccgcgacttcacagccaggcggcggcgctgctgctgctgcggggctctggcgcgcagcccggcgggacagcggggcggctggcgccgggggccggggagcgccagatgatggatttggacatgcttctatgaagaaatgccacatggtccgagagcaaacatgtccaggctactgccactttagtggactagggctcggtgccagcacttcccgggtaatcaggcgtggtctgaccgaggatcaagaagcacatcatcaccaatgacatcatgacagcaagagagcacagccctcgccatggtgccagggcccgtgcaatgcagcgggcttccaccatcgacgtggcggccgacatgctgggcctctctctggcaggaaatatacaagacccagatgagcccattttagaatttagcttagcttgcagtgagctgcatactccatcgctagatcgaaagccaaatagttttgttgcggtgagtgtcaccacccctcctcaggcattctggacgaagcatgcacagacrgagatcattgagggaaccaacaatcctatatttctaagcagtattgccttctttcaagactctcttatcaatcagatgacacaagtcaaactctccgtgtatgatgtcaaagatagatctcagggaacaatgtatttactgggctctggaacgttcattgtcaaagatctgctccaggacaggcatcataggttgcatttaacactaaggtctgcagagagtgaccgtgtaggtaacatcaccgtgattggctggcagatggaggagaagtcagaccaacggccccctgtgacccggtctgtggacactgtcaatgggaggatggttcttcctgtcgatgagagcttgacggaggcgttaggaatccgatccaaatacgcttcattgcgaaaggacactttgctgaaatcggtgttcggyggtgccatctgccgcatgtaccggtttccaaccactgatggtaaccatttgcggatcctggagcagatggcagagagcgtgctctccctgcacgtgccccggcagttcgtgaagctcctactagaggaagatgcagccagagtgtgtgagctggaggagctgggagagctgtccccttgctgggagagcctccggcgccaaattgtcacccagtaccagaccatcatcctcacataccaggagaacctgaccgacctccatcagtacagagggccctcgtttaaagcaagcagtttgaaagcagataaaaagttagaatttgttcccacaaacttgcacatacaaaggatgagagttcaagacgktggaggatcagatcagaactacgacatcgtcaccattggggcgccagcagcacactgccaaggttttaagtcaggaggtctccgcaaaaagctgcacaaatttgaagagaccaagaaacagtaatacatcatctggctgccagtccataatctacataccccaggatgttgtcagagccaaggagatcatcgcccagatcaacaccctgaaaacccaagtgagttactacgcagagcggctgtcaagggcagccaaggacaggtctgccactggccttgagaggacactcgccatcttggcagacaagacacggcagctggtcacggtctgcgactgcaagctcctggccaactccatccatgggctgaacgctgcacggcctgactacattgcctccaaggcctctcccacttcgactgaggaggagcaggtgatgcttagaaatgaccaggacaccctcatggcccggtggacagggagaaacagccgatcttccctgcaggtggactggcacgaggaggagtgggagaaagtgtggctgaacgtggacaagagcctagagtgcatcattcagcgtgtggacaagctgctgcagaaggagcggctgcatggcgagggctgtgaggatgtcttcccctgtgcaggcagctgcaccagcaagaaagattgcagtccccctcctgaagagtccagcccaggtgaatggagtgaggccctttacccgctgctgaccactctcaccgactgcgtggccatgatgagtgacaaggccaagaaggccatggtattcctgctcatgcaggacagcgcgcccaccatagccacctacctgagcctgcagtaccgccgtgacgtggtcttctgccagacgctgaccgccctcatctgcggcttcatcattaagctgaggaactgcctgcatgacgacggcttcctgcgccagctctacaccatcgggctgctggcccagttcgagagcctgctgagcacctacggggaggagctggcaatgctggaggacatgagccttgggatcatggacttgaggaacgtgaccttcaaagtcactcaggccacttccagcgcctccgcagacatgctgcccgtcatcacaggaaatcgcgacgggtttaacgtgcgggtccctctgccgggcccgctgtttgacgccttgccccgggagatccagagtggcatgctgctgcgagtgcagcccgtcctcttcaacgtgggcatcaatgagcagcagacactggccgagaggtttggcgatacgtctttacaagaagtcatcaacgtggagagtttggtgcggttaaattcctactttgagcagtttaaggaagttttgcctgaggattgcctgcctcggtctcgcagtcagacgtgcctgccagagctgctgcggtttctgggtcagaacgtgcatgcccggaagaataagaacgtcgacattctctggcaagctgctgagatctgccgccgccttaatggggtccggttcaccagctgcaagagygctaaggaccgtacagccatgtcggtgacactggagcagtgcctgatcctgcaacacgagcatggcatggccccgcaggtcttcacccaggccctggagtgcatgcgcagcattggaacacgggaggtagtcacccagaagaacttgagcggcctggtgcccatccgagacttaaggctagaccccagcctcctctgttccatccctttattagctctgagccccaatttactgattgtgtggctctttctgagcatagcatacctggtgaccaaattgcgttgcaaatgaatatcattatgaaaaattaataagtcacaagaaaaacaaaagtgccagaacatgtccagccaccgtgtacctaactggacagaaggaatgtgtcaaaccgtggtctgccaagaaatatttcatgccttacattttgacgttttgttcttctgaactgtaaatatctgccaaattatttcaccaagaagacttgtttgtttagctcctgtagcatcttcagtgcttgtaacatgttcttacggtgccctgtcactgcatcgtttagctggcctggaattccttgtaccacrtctctaccttctgatgtacaactatttatcacctgtacctctcatgtgccctgtttccaagagaaacgagttctgtttaaagagaatttgtatatttgatactattctttaagtgtactgctaacccttcctttccttttgatgacaaacgaaaagaaaaaaacatgctttataactggcttatctagaaaaacctatctaataggacatgtactttctgctttcatttcaaagcgtagtccctgaattacagtagcaaacagtttgcagaatcctaccatttccttgctt

SEQ ID NO: 6437 - DNA, 6385 bp, Homo sapiens
cccggcgtctagagcggcggcggctggctagggctgcggcgcgcgtggagggttcgctgctggtttgccgccgggtcgggctccgtgggccggggcaggaggaccagcacctgaggccgggcccgcagcccgcgacttcacagccaggcggcggcgctgctgctgctgcggggctctggcgcgcagcccggcgggacagcggggcggctggcgccgggggccggggagcgccagatgatggatttggacatgcttctatgaagaaatgccacatggtccgagagcaaacatgtccaccactttagtggactagggctcggtgccagcacttcccgggtaatcaggcgtggtctgaccgaggatcaagaagcacatcatcaccaatgacatcatgacagcaagagagcacagccctcgccatggtgccagggcccgtgcaatgcagcgggcttccaccatcgacgtggcggccgacatgctgggcctctctctggcaggaaatatacaagacccagatgagcccattttagaatttagcttagcttgcagtgagctgcatactccatcgctagatcgaaagccaaatagttttgttgcggtgagtgtcaccacccctcctcaggcattctggacgaagcatgcacagacrgagatcattgagggaaccaacaatcctatatttctaagcagtattgccttctttcaagactctcttatcaatcagatgacacaagtcaaactctccgtgtatgatgtcaaagatagatctcagggaacaatgtatttactgggctctggaacgttcattgtcaaagatctgctccaggacaggcatcataggttgcatttaacactaaggtctgcagagagtgaccgtgtaggtaacatcaccgtgattggctggcagatggaggagaagtcagaccaacggccccctgtgacccggtctgtggacactgtcaatgggaggatggttcttcctgtcgatgagagcttgacggaggcgttaggaatccgatccaaatacgcttcattgcgaaaggacactttgctgaaatcggtgttcggyggtgccatctgccgcatgtaccggtttccaaccactgatggtaaccatttgcggatcctggagcagatggcagagagcgtgctctccctgcacgtgccccggcagttcgtgaagctcctactagaggaagatgcagccagkgtgtgtgagctggaggagctgggagagctgtccccttgctgggagagcctccggcgccaaattgtcacccagtaccagaccatcatcctcacataccaggagaacctgaccgacctccatcagtacagagggccctcgtttaaagcaagcagtttgaaagcagataaaaagttagaatttgttcccacaaacttgcacatacaaaggatgagagttcaagacgatggaggatcagatcagaactacgacatcgtcaccattggggcgccagcagcacactgccaaggttttaagtcaggaggtctccgcaaaaagctgcacaaatttgaagagaccaagaaacatacatcatctggctgccagtccataatctacataccccaggatgttgtcagagccaaggagatcatcgcccagatcaacaccctgaaaacccaagtgagttactacgcagagcggctgtcaagggcagccaaggacaggtctgccactggccttgagaggacactcgccatcttggcagacaagacacggcagctggtcacggtctgcgactgcaagctcctggccaactccatccatgggctgaacgctgcacggcctgactacattgcctccaaggcctctcccacttcgactgaggaggagcaggtgatgcttagaaatgaccaggacaccctcatggcccggtggacagggagaaacagccgatcttccctgcaggtggactggcacgaggaggagtgggagaaagtgtggctgaacgtggacaagagcctagagtgcatcattcagcgtgtggacaagctgctgcagaaggagcggctgcatggcgagggctgtgaggatgtcttcccctgtgcaggcagctgcaccagcaagaaagattgcagtccccctcctgaagagtccagcccaggtgaatggagtgaggccctttacccgctgctgaccactctcaccgactgcgtggccatgatgagtgacaaggccaagaaggccatggtattcctgctcatgcaggacagcgcgcccaccatagccacctacctgagcctgcagtaccgccgtgacgtggtcttctgccagacgctgaccgccctcatctgcggcttcatcattaagctgaggaactgcctgcatgacgacggcttcctgcgccagctctacaccatcgggctgctggcccagttcgagagcctgctgagcacctacggggaggagctggcaatgctggaggacatgagccttgggatcatggacttgaggaacgtgaccttcaaagtcactcaggccacttccagcgcctccgcagacatgctgcccgtcatcacaggaaatcgcgacgggtttaacgtgcgggtccctctgccgggcccgctgtttgacgccttgccccgggagatccagagtggcatgctgctgcgagtgcagcccgtcctcttcaacgtgggcatcaatgagcagcagacactggccgagaggtttggcgatacgtctttacaagaagtcatcaacgtggagagtttggtgcggttaaattcctactttgagcagtttaaggaagttttgcctgaggattgcctgcctcggtctcgcagtcagacgtgcctgccagagctgctgcggtttctgggtcagaacgtgcatgcccggaagaataagaacgtcgacattctctggcaagctgctgagatctgccgccgccttaatggggtccggttcaccagctgcaagagygctaaggaccgtacagccatgtcggtgacactggagcagtgcctgatcctgcaacacgagcatggcatggccccgcaggtcttcacccaggccctggagtgcatgcgcagtgagggttgtcgaagagaaaatacaatgaagaatgttggaagtcgcaaatatgcatttaattccctgcagctgaaggctttccccaagcattacaggcctcccgaagggacttacggaaaagttgaaacgtgaacacacggtttcctctaattagctgttacataataaatgtgggtaccctctagtgtcatatatgaattcttcaagaagacctgaaggattggtttttattttttgtggtttttttaaaaaaaacatttcactaaagagtctctggagcatgttttttgttttttgggtttttttccccattggaatcaataggaggtaatgtttggctcaatagtgtggatagtaacaactgcctatttaaattaaatagcctttggctgtaactacacagatctcatcaatagttacctacatgaatcaagctaggtttgtctgaaatgctagaagactttttcaaatgcctgcttgctcacttacttttctacagagtaactcaaaagtaaccattgaattacaatccactttgtaaaaatctgaatgtaaaacagtaaataataaattaaataattggatcctaggcataccaataaatgttatttggggaaagaagctagcactatctcatgcagtgagaataacgggttctagtgaattatcctatctacactaccacctgaagaagttgaaagaaagattgataaatcaacgggagataagactttattagaaggtaacacctgcaaggtaccccacatagttggggccactcttttttctgtcccttatgasttacagaacagggagtctgctggagacacaaagccagcagtaaggtccctttagcctgtctcctgttctctgaagctccctgccgaggctccctcacgcccagaggacacatctccccttcttctctagatgttaatgtagggcctcagatgtggcatgtcaacactcccatggggaatttatgaccatagagatagtagaaacctaaatattttcagaaaaaaaattttttttgcaggatttccaatttatctttgaaaagacagtacaatcatgtttgaatgtctgatgaaagtgtcttatttttaggtttgcaataattgttactttcttattctcattcttatgtaagatgactattgagaaacagttgaaatttattctcctcaaatgagattttgaaagggatttatgggccataaaacttaggaatttcatagaaaattttgtctggtcatcttttataagatgatgatgagtcttatctgcacatagcagagtttgtttcttaggagtttatatgttttattgattctgtttacgatgtttacatgttcttgaaaaggttgtaaaagaaatacatatggcacatattaatgatgctgatcctaatgatttgtgaacctcttagaaattcttttgtctaaaagcctagagattcttctggttcctttagaaacatgtaacaaacttgggccaggggtgctgaggcatggggaggactgcttattggcaggaacacagagggggtgggcatcaggtagggtggaactggatgaccttccagaccccctcctactcagaagtcagcatgcaagcagcgcctgctgtctcccgatgcctgcagggaggaaaatgtctgtgaaggacactttaatgaaggacgaagctctctgctgctccctcaaagctgagttcactgtggcaggcaggaagcagagaagctcctgcccgccaaacccactgcacaggtggctgctgctggtatcagattctcctttttaagtgtcaatttctgttcacagacagtttgttttcaatatggctgatttaccctttcacctctccaccatctcatttaatttgtaaatttttagttctgtcttttctcattttaacttttaaaaaatctccttgctttttaaaaataaatattacccacatagttttcagatcttttttgtctggagagcattaaatatctgcactcatcaaagggaayatagcaaatgttgatcatctgtcagcagttttgcatgtgacacctttatatgaattattttcccaatttttgctctatgtaatgggtcaccataaaactgtaagacttggcaaatgctatagaaaaggttcaggtttcagtattctctctgaaggcatcattcctgggcttccggcagcatcacacgcttccagtgcctgcagggtgagggtgtgtggcacagaggcaagcagctcctctcttctgtaggagctttgggttttcagaggtgcagggaaggcagttttacaggttaccgtaaaacagaggttccgtccagtgttccttatgatgcctccccatttaaaaagaaaagagatctatggaaaactgggaatgtaatgtggattctgtcagagctcctacagagcacagttgcctttagtttcctttaaagatgtaaaaatattgtataatacagttttktccctacacaattgtatttgccaagcttagtgcattatgatacctttatttatttgttttgggcagtattactatatatatataaacatacagttactgttttatatattcttaggtcattcaaagccatgtatgctgtaaatgtgctagtctttagaatgacacataataaataactgacaagatattaaatgtggtcttgcctgattcatcctattaggaggactagttctatgtgaccagcctgtgactggaccattgttcttgggcattgcattgagtgctcgggtgctgaatacatgtttgtaaacatgggaccatgggagacttccattttataagcttgtttctgcctaatttgaagcagaggggcaacagcgttgaggttaagagcacggactttgggagcacacagaccaggtcccaatcctggttctgcccctgactggctggtgactctgagcaagttgcttgacctctccaagcctccgtttcctcatgtgcaaagtgtggacaacaacagtaccttcctcataaggaacgtgcgacgcgcctcagaagtacgtgttcataaatggtagccattgttgtwaccttcccgtctgtgaacatggatcacatcatctctgtgggtaacccagtcctcgttgtatgacttgtcaaaatgcagttccacttgtattaatattgaccctgttcatcgtcaccaggactgcatcttgcaccactgtgccgtcttctaggcacacacgrcccgttatctcccttggaaaaattcctctcactggaaatgtacaattaaaggatgattgaaatgtttaactcttggagttttt

SEQ ID NO: 6438 - DNA, 6510 bp, Homo sapiens
cccggcgtctagagcggcggcggctggctagggctgcggcgcgcgtggagggttcgctgctggtttgccgccgggtcgggctccgtgggccggggcaggaggaccagcacctgaggccgggcccgcagcccgcgacttcacagccaggcggcggcgctgctgctgctgcggggctctggcgcgcagcccggcgggacagcggggcggctggcgccgggggccggggagcgccagatgatggatttggacatgcttctatgaagaaatgccacatggtccgagagcaaacatgtccaggctactgccactttagtggactagggctcggtgccagcacttcccgggtaatcaggcgtggtctgaccgaggatcaagaagcacatcatcaccaatgacatcatgacagcaagagagcacagccctcgccatggtgccagggcccgtgcaatgcagcgggcttccaccatcgacgtggcggccgacatgctgggcctctctctggcaggaaatatacaagacccagatgagcccattttagaatttagcttagcttgcagtgagctgcatactccatcgctagatcgaaagccaaatagttttgttgcggtgagtgtcaccacccctcctcaggcattctggacgaagcatgcacagacrgagatcattgagggaaccaacaatcctatatttctaagcagtattgccttctttcaagactctcttatcaatcagatgacacaagtcaaactctccgtgtatgatgtcaaagatagatctcagggaacaatgtatttactgggctctggaacgttcattgtcaaagatctgctccaggacaggcatcataggttgcatttaacactaaggtctgcagagagtgaccgtgtaggtaacatcaccgtgattggctggcagatggaggagaagtcagaccaacggccccctgtgacccggtctgtggacactgtcaatgggaggatggttcttcctgtcgatgagagcttgacggaggcgttaggaatccgatccaaatacgcttcattgcgaaaggacactttgctgaaatcggtgttcggyggtgccatctgccgcatgtaccggtttccaaccactgatggtaaccatttgcggatcctggagcagatggcagagagcgtgctctccctgcacgtgccccggcagttcgtgaagctcctactagaggaagatgcagccagkgtgtgtgagctggaggagctgggagagctgtccccttgctgggagagcctccggcgccaaattgtcacccagtaccagaccatcatcctcacataccaggagaacctgaccgacctccatcagtacagagggccctcgtttaaagcaagcagtttgaaagcagataaaaagttagaatttgttcccacaaacttgcacatacaaaggatgagagttcaagacgatggaggatcagatcagaactacgacatcgtcaccattggggcgccagcagcacactgccaaggttttaagtcaggaggtctccgcaaaaagctgcacaaatttgaagagaccaagaaacatacatcatctggctgccagtccataatctacataccccaggatgttgtcagagccaaggagatcatcgcccagatcaacaccctgaaaacccaagtgagttactacgcagagcggctgtcaagggcagccaaggacaggtctgccactggccttgagaggacactcgccatcttggcagacaagacacggcagctggtcacggtctgcgactgcaagctcctggccaactccatccatgggctgaacgctgcacggcctgactacattgcctccaaggcctctcccacttcgactgaggaggagcaggtgatgcttagaaatgaccaggacaccctcatggcccggtggacagggagaaacagccgatcttccctgcaggtggactggcacgaggaggagtgggagaaagtgtggctgaacgtggacaagagcctagagtgcatcattcagcgtgtggacaagctgctgcagaaggagcggctgcatggcgagggctgtgaggatgtcttcccctgtgcaggcagctgcaccagcaagaaaggtaacccggacagccacgcctactggatcagaccagaagaccccttctgtgatgtcccctcctcaccatgcccctccaccatgccctccrctgcatgccatcctcatctgaccacacattgcagtccccctcctgaagagtccagcccaggtgaatggagtgaggccctttacccgctgctgaccactctcaccgactgcgtggccatgatgagtgacaaggccaagaaggccatggtattcctgctcatgcaggacagcgcgcccaccatagccacctacctgagcctgcagtaccgccgtgacgtggtcttctgccagacgctgaccgccctcatctgcggcttcatcattaagctgaggaactgcctgcatgacgacggcttcctgcgccagctctacaccatcgggctgctggcccagttcgagagcctgctgagcacctacggggaggagctggcaatgctggaggacatgagccttgggatcatggacttgaggaacgtgaccttcaaagtcactcaggccacttccagcgcctccgcagacatgctgcccgtcatcacaggaaatcgcgacgggtttaacgtgcgggtccctctgccgggcccgctgtttgacgccttgccccgggagatccagagtggcatgctgctgcgagtgcagcccgtcctcttcaacgtgggcatcaatgagcagcagacactggccgagaggtttggcgatacgtctttacaagaagtcatcaacgtggagagtttggtgcggttaaattcctactttgagcagtttaaggaagttttgcctgaggattgcctgcctcggtctcgcagtcagacgtgcctgccagagctgctgcggtttctgggtcagaacgtgcatgcccggaagaataagaacgtcgacattctctggcaagctgctgagatctgccgccgccttaatggggtccggttcaccagctgcaagagygctaaggaccgtacagccatgtcggtgacactggagcagtgcctgatcctgcaacacgagcatggcatggccccgcaggtcttcacccaggccctggagtgcatgcgcagtgagggttgtcgaagagaaaatacaatgaagaatgttggaagtcgcaaatatgcatttaattccctgcagctgaaggctttccccaagcattacaggcctcccgaagggacttacggaaaagttgaaacgtgaacacacggtttcctctaattagctgttacataataaatgtgggtaccctctagtgtcatatatgaattcttcaagaagacctgaaggattggtttttattttttgtggtttttttaaaaaaaacatttcactaaagagtctctggagcatgttttttgttttttgggtttttttccccattggaatcaataggaggtaatgtttggctcaatagtgtggatagtaacaactgcctatttaaattaaatagcctttggctgtaactacacagatctcatcaatagttacctacatgaatcaagctaggtttgtctgaaatgctagaagactttttcaaatgcctgcttgctcacttacttttctacagagtaactcaaaagtaaccattgaattacaatccactttgtaaaaatctgaatgtaaaacagtaaataataaattaaataattggatcctaggcataccaataaatgttatttggggaaagaagctagcactatctcatgcagtgagaataacgggttctagtgaattatcctatctacactaccacctgaagaagttgaaagaaagattgataaatcaacgggagataagactttattagaaggtaacacctgcaaggtaccccacatagttggggccactcttttttctgtcccttatgasttacagaacagggagtctgctggagacacaaagccagcagtaaggtccctttagcctgtctcctgttctctgaagctccctgccgaggctccctcacgcccagaggacacatctccccttcttctctagatgttaatgtagggcctcagatgtggcatgtcaacactcccatggggaatttatgaccatagagatagtagaaacctaaatattttcagaaaaaaaattttttttgcaggatttccaatttatctttgaaaagacagtacaatcatgtttgaatgtctgatgaaagtgtcttatttttaggtttgcaataattgttactttcttattctcattcttatgtaagatgactattgagaaacagttgaaatttattctcctcaaatgagattttgaaagggatttatgggccataaaacttaggaatttcatagaaaattttgtctggtcatcttttataagatgatgatgagtcttatctgcacatagcagagtttgtttcttaggagtttatatgttttattgattctgtttacgatgtttacatgttcttgaaaaggttgtaaaagaaatacatatggcacatattaatgatgctgatcctaatgatttgtgaacctcttagaaattcttttgtctaaaagcctagagattcttctggttcctttagaaacatgtaacaaacttgggccaggggtgctgaggcatggggaggactgcttattggcaggaacacagagggggtgggcatcaggtagggtggaactggatgaccttccagaccccctcctactcagaagtcagcatgcaagcagcgcctgctgtctcccgatgcctgcagggaggaaaatgtctgtgaaggacactttaatgaaggacgaagctctctgctgctccctcaaagctgagttcactgtggcaggcaggaagcagagaagctcctgcccgccaaacccactgcacaggtggctgctgctggtatcagattctcctttttaagtgtcaatttctgttcacagacagtttgttttcaatatggctgatttaccctttcacctctccaccatctcatttaatttgtaaatttttagttctgtcttttctcattttaacttttaaaaaatctccttgctttttaaaaataaatattacccacatagttttcagatcttttttgtctggagagcattaaatatctgcactcatcaaagggaayatagcaaatgttgatcatctgtcagcagttttgcatgtgacacctttatatgaattattttcccaatttttgctctatgtaatgggtcaccataaaactgtaagacttggcaaatgctatagaaaaggttcaggtttcagtattctctctgaaggcatcattcctgggcttccggcagcatcacacgcttccagtgcctgcagggtgagggtgtgtggcacagaggcaagcagctcctctcttctgtaggagctttgggttttcagaggtgcagggaaggcagttttacaggttaccgtaaaacagaggttccgtccagtgttccttatgatgcctccccatttaaaaagaaaagagatctatggaaaactgggaatgtaatgtggattctgtcagagctcctacagagcacagttgcctttagtttcctttaaagatgtaaaaatattgtataatacagttttktccctacacaattgtatttgccaagcttagtgcattatgatacctttatttatttgttttgggcagtattactatatatatataaacatacagttactgttttatatattcttaggtcattcaaagccatgtatgctgtaaatgtgctagtctttagaatgacacataataaataactgacaagatattaaatgtggtcttgcctgattcatcctattaggaggactagttctatgtgaccagcctgtgactggaccattgttcttgggcattgcattgagtgctcgggtgctgaatacatgtttgtaaacatgggaccatgggagacttccattttataagcttgtttctgcctaatttgaagcagaggggcaacagcgttgaggttaagagcacggactttgggagcacacagaccaggtcccaatcctggttctgcccctgactggctggtgactctgagcaagttgcttgacctctccaagcctccgtttcctcatgtgcaaagtgtggacaacaacagtaccttcctcataaggaacgtgcgacgcgcctcagaagtacgtgttcataaatggtagccattgttgtwaccttcccgtctgtgaacatggatcacatcatctctgtgggtaacccagtcctcgttgtatgacttgtcaaaatgcagttccacttgtattaatattgaccctgttcatcgtcaccaggactgcatcttgcaccactgtgccgtcttctaggcacacacgrcccgttatctcccttggaaaaattcctctcactggaaatgtacaattaaaggatgattgaaatgtttaactcttggagttttt

SEQ ID NO: 6439 - DNA, 3830 bp, Homo sapiens
cccggcgtctagagcggcggcggctggctagggctgcggcgcgcgtggagggttcgctgctggtttgccgccgggtcgggctccgtgggccggggcaggaggaccagcacctgaggccgggcccgcagcccgcgacttcacagccaggcggcggcgctgctgctgctgcggggctctggcgcgcagcccggcgggacagcggggcggctggcgccgggggccggggagcgccagatgatggatttggacatgcttctatgaagaaatgccacatggtccgagagcaaacatgtccaggctactgccactttagtggactagggctcggtgccagcacttcccgggtaatcaggcgtggtctgaccgaggatcaagaagcacatcatcaccaatgacatcatgacagcaagagagcacagccctcgccatggtgccagggcccgtgcaatgcagcgggcttccaccatcgacgtggcggccgacatgctgggcctctctctggcaggaaatatacaagacccagatgagcccattttagaatttagcttagcttgcagtgagctgcatactccatcgctagatcgaaagccaaatagttttgttgcggtgagtgtcaccacccctcctcaggcattctggacgaagcatgcacagacrgagatcattgagggaaccaacaatcctatatttctaagcagtattgccttctttcaagactctcttatcaatcagatgacacaagtcaaactctccgtgtatgatgtcaaagatagatctcagggaacaatgtatttactgggctctggaacgttcattgtcaaagatctgctccaggacaggcatcataggttgcatttaacactaaggtctgcagagagtgaccgtgtaggtaacatcaccgtgattggctggcagatggaggagaagtcagaccaacggccccctgtgacccggtctgtggacactgtcaatgggaggatggttcttcctgtcgatgagagcttgacggaggcgttaggaatccgatccaaatacgcttcattgcgaaaggacactttgctgaaatcggtgttcggyggtgccatctgccgcatgtaccggtttccaaccactgatggtaaccatttgcggatcctggagcagatggcagagagcgtgctctccctgcacgtgccccggcagttcgtgaagctcctactagaggaagatgcagccagkgtgtgtgagctggaggagctgggagagctgtccccttgctgggagagcctccggcgccaaattgtcacccagtaccagaccatcatcctcacataccaggagaacctgaccgacctccatcagtacagagggccctcgtttaaagcaagcagtttgaaagcagataaaaagttagaatttgttcccacaaacttgcacatacaaaggatgagagttcaagacgatggaggatcagatcagaactacgacatcgtcaccattggggcgccagcagcacactgccaaggttttaagtcaggaggtctccgcaaaaagctgcacaaatttgaagagaccaagaaacatacatcatctggctgccagtccataatctacataccccaggatgttgtcagagccaaggagatcatcgcccagatcaacaccctgaaaacccaagtgagttactacgcagagcggctgtcaagggcagccaaggacaggtctgccactggccttgagaggacactcgccatcttggcagacaagacacggcagctggtcacggtctgcgactgcaagctcctggccaactccatccatgggctgaacgctgcacggcctgactacattgcctccaaggcctctcccacttcgactgaggaggagcaggtgatgcttagaaatgaccaggacaccctcatggcccggtggacagggagaaacagccgatcttccctgcaggtggactggcacgaggaggagtgggagaaagtgtggctgaacgtggacaagagcctagagtgcatcattcagcgtgtggacaagctgctgcagaaggagcggctgcatggcgagggctgtgaggatgtcttcccctgtgcaggcagctgcaccagcaagaaagattgcagtccccctcctgaagagtccagcccaggtgaatggagtgaggccctttacccgctgctgaccactctcaccgactgcgtggccatgatgagtgacaaggccaagaaggccatggtattcctgctcatgcaggacagcgcgcccaccatagccacctacctgagcctgcagtaccgccgtgacgtggtcttctgccagacgctgaccgccctcatctgcggcttcatcattaagctgaggaactgcctgcatgacgacggcttcctgcgccagctctacaccatcgggctgctggcccagttcgagagcctgctgagcacctacggggaggagctggcaatgctggaggacatgagccttgggatcatggacttgaggaacgtgaccttcaaagtcactcaggccacttccagcgcctccgcagacatgctgcccgtcatcacaggaaatcgcgacgggtttaacgtgcgggtccctctgccgggcccgctgtttgacgccttgccccgggagatccagagtggcatgctgctgcgagtgcagcccgtcctcttcaacgtgggcatcaatgagcagcagacactggccgagaggtttggcgatacgtctttacaagaagtcatcaacgtggagagtttggtgcggttaaattcctactttgagcagtttaaggaagttttgcctgaggattgcctgcctcggtctcgcagtcagacgtgcctgccagagctgctgcggtttctgggtcagaacgtgcatgcccggaagaataagaacgtcgacattctctggcaagctgctgagatctgccgccgccttaatggggtccggttcaccagctgcaagagygctaaggaccgtacagccatgtcggtgacactggagcagtgcctgatcctgcaacacgagcatggcatggccccgcaggtcttcacccaggccctggagtgcatgcgcagcattggaacacgggaggtagtcacccagaagaacttgagcggcctggtgcccatccgagacttaaggctagaccccagcctcctctgttccatccctttattagctctgagccccaatttactgattgtgtggctctttctgagcatagcatacctggtgaccaaattgcgttgcaaatgaatatcattatgaaaaattaataagtcacaagaaaaacaaaagtgccagaacatgtccagccaccgtgtacctaactggacagaaggaatgtgtcaaaccgtggtctgccaagaaatatttcatgccttacattttgacgttttgttcttctgaactgtaaatatctgccaaattatttcaccaagaagacttgtttgtttagctcctgtagcatcttcagtgcttgtaacatgttcttacggtgccctgtcactgcatcgtttagctggcctggaattccttgtaccacrtctctaccttctgatgtacaactatttatcacctgtacctctcatgtgccctgtttccaagagaaacgagttctgtttaaagagaatttgtatatttgatactattctttaagtgtactgctaacccttcctttccttttgatgacaaacgaaaagaaaaaaacatgctttataactggcttatctagaaaaacctatctaataggacatgtactttctgctttcatttcaaagcgtagtccctgaattacagtagcaaacagtttgcagaatcctaccatttccttgctt

SEQ ID NO: 6440 - DNA, 6397 bp, Homo sapiens
cccggcgtctagagcggcggcggctggctagggctgcggcgcgcgtggagggttcgctgctggtttgccgccgggtcgggctccgtgggccggggcaggaggaccagcacctgaggccgggcccgcagcccgcgacttcacagccaggcggcggcgctgctgctgctgcggggctctggcgcgcagcccggcgggacagcggggcggctggcgccgggggccggggagcgccagatgatggatttggacatgcttctatgaagaaatgccacatggtccgagagcaaacatgtccaggctactgccactttagtggactagggctcggtgccagcacttcccgggtaatcaggcgtggtctgaccgaggatcaagaagcacatcatcaccaatgacatcatgacagcaagagagcacagccctcgccatggtgccagggcccgtgcaatgcagcgggcttccaccatcgacgtggcggccgacatgctgggcctctctctggcaggaaatatacaagacccagatgagcccattttagaatttagcttagcttgcagtgagctgcatactccatcgctagatcgaaagccaaatagttttgttgcggtgagtgtcaccacccctcctcaggcattctggacgaagcatgcacagacrgagatcattgagggaaccaacaatcctatatttctaagcagtattgccttctttcaagactctcttatcaatcagatgacacaagtcaaactctccgtgtatgatgtcaaagatagatctcagggaacaatgtatttactgggctctggaacgttcattgtcaaagatctgctccaggacaggcatcataggttgcatttaacactaaggtctgcagagagtgaccgtgtaggtaacatcaccgtgattggctggcagatggaggagaagtcagaccaacggccccctgtgacccggtctgtggacactgtcaatgggaggatggttcttcctgtcgatgagagcttgacggaggcgttaggaatccgatccaaatacgcttcattgcgaaaggacactttgctgaaatcggtgttcggyggtgccatctgccgcatgtaccggtttccaaccactgatggtaaccatttgcggatcctggagcagatggcagagagcgtgctctccctgcacgtgccccggcagttcgtgaagctcctactagaggaagatgcagccagagtgtgtgagctggaggagctgggagagctgtccccttgctgggagagcctccggcgccaaattgtcacccagtaccagaccatcatcctcacataccaggagaacctgaccgacctccatcagtacagagggccctcgtttaaagcaagcagtttgaaagcagataaaaagttagaatttgttcccacaaacttgcacatacaaaggatgagagttcaagacgktggaggatcagatcagaactacgacatcgtcaccattggggcgccagcagcacactgccaaggttttaagtcaggaggtctccgcaaaaagctgcacaaatttgaagagaccaagaaacagtaatacatcatctggctgccagtccataatctacataccccaggatgttgtcagagccaaggagatcatcgcccagatcaacaccctgaaaacccaagtgagttactacgcagagcggctgtcaagggcagccaaggacaggtctgccactggccttgagaggacactcgccatcttggcagacaagacacggcagctggtcacggtctgcgactgcaagctcctggccaactccatccatgggctgaacgctgcacggcctgactacattgcctccaaggcctctcccacttcgactgaggaggagcaggtgatgcttagaaatgaccaggacaccctcatggcccggtggacagggagaaacagccgatcttccctgcaggtggactggcacgaggaggagtgggagaaagtgtggctgaacgtggacaagagcctagagtgcatcattcagcgtgtggacaagctgctgcagaaggagcggctgcatggcgagggctgtgaggatgtcttcccctgtgcaggcagctgcaccagcaagaaagattgcagtccccctcctgaagagtccagcccaggtgaatggagtgaggccctttacccgctgctgaccactctcaccgactgcgtggccatgatgagtgacaaggccaagaaggccatggtattcctgctcatgcaggacagcgcgcccaccatagccacctacctgagcctgcagtaccgccgtgacgtggtcttctgccagacgctgaccgccctcatctgcggcttcatcattaagctgaggaactgcctgcatgacgacggcttcctgcgccagctctacaccatcgggctgctggcccagttcgagagcctgctgagcacctacggggaggagctggcaatgctggaggacatgagccttgggatcatggacttgaggaacgtgaccttcaaagtcactcaggccacttccagcgcctccgcagacatgctgcccgtcatcacaggaaatcgcgacgggtttaacgtgcgggtccctctgccgggcccgctgtttgacgccttgccccgggagatccagagtggcatgctgctgcgagtgcagcccgtcctcttcaacgtgggcatcaatgagcagcagacactggccgagaggtttggcgatacgtctttacaagaagtcatcaacgtggagagtttggtgcggttaaattcctactttgagcagtttaaggaagttttgcctgaggattgcctgcctcggtctcgcagtcagacgtgcctgccagagctgctgcggtttctgggtcagaacgtgcatgcccggaagaataagaacgtcgacattctctggcaagctgctgagatctgccgccgccttaatggggtccggttcaccagctgcaagagygctaaggaccgtacagccatgtcggtgacactggagcagtgcctgatcctgcaacacgagcatggcatggccccgcaggtcttcacccaggccctggagtgcatgcgcagtgagggttgtcgaagagaaaatacaatgaagaatgttggaagtcgcaaatatgcatttaattccctgcagctgaaggctttccccaagcattacaggcctcccgaagggacttacggaaaagttgaaacgtgaacacacggtttcctctaattagctgttacataataaatgtgggtaccctctagtgtcatatatgaattcttcaagaagacctgaaggattggtttttattttttgtggtttttttaaaaaaaacatttcactaaagagtctctggagcatgttttttgttttttgggtttttttccccattggaatcaataggaggtaatgtttggctcaatagtgtggatagtaacaactgcctatttaaattaaatagcctttggctgtaactacacagatctcatcaatagttacctacatgaatcaagctaggtttgtctgaaatgctagaagactttttcaaatgcctgcttgctcacttacttttctacagagtaactcaaaagtaaccattgaattacaatccactttgtaaaaatctgaatgtaaaacagtaaataataaattaaataattggatcctaggcataccaataaatgttatttggggaaagaagctagcactatctcatgcagtgagaataacgggttctagtgaattatcctatctacactaccacctgaagaagttgaaagaaagattgataaatcaacgggagataagactttattagaaggtaacacctgcaaggtaccccacatagttggggccactcttttttctgtcccttatgasttacagaacagggagtctgctggagacacaaagccagcagtaaggtccctttagcctgtctcctgttctctgaagctccctgccgaggctccctcacgcccagaggacacatctccccttcttctctagatgttaatgtagggcctcagatgtggcatgtcaacactcccatggggaatttatgaccatagagatagtagaaacctaaatattttcagaaaaaaaattttttttgcaggatttccaatttatctttgaaaagacagtacaatcatgtttgaatgtctgatgaaagtgtcttatttttaggtttgcaataattgttactttcttattctcattcttatgtaagatgactattgagaaacagttgaaatttattctcctcaaatgagattttgaaagggatttatgggccataaaacttaggaatttcatagaaaattttgtctggtcatcttttataagatgatgatgagtcttatctgcacatagcagagtttgtttcttaggagtttatatgttttattgattctgtttacgatgtttacatgttcttgaaaaggttgtaaaagaaatacatatggcacatattaatgatgctgatcctaatgatttgtgaacctcttagaaattcttttgtctaaaagcctagagattcttctggttcctttagaaacatgtaacaaacttgggccaggggtgctgaggcatggggaggactgcttattggcaggaacacagagggggtgggcatcaggtagggtggaactggatgaccttccagaccccctcctactcagaagtcagcatgcaagcagcgcctgctgtctcccgatgcctgcagggaggaaaatgtctgtgaaggacactttaatgaaggacgaagctctctgctgctccctcaaagctgagttcactgtggcaggcaggaagcagagaagctcctgcccgccaaacccactgcacaggtggctgctgctggtatcagattctcctttttaagtgtcaatttctgttcacagacagtttgttttcaatatggctgatttaccctttcacctctccaccatctcatttaatttgtaaatttttagttctgtcttttctcattttaacttttaaaaaatctccttgctttttaaaaataaatattacccacatagttttcagatcttttttgtctggagagcattaaatatctgcactcatcaaagggaayatagcaaatgttgatcatctgtcagcagttttgcatgtgacacctttatatgaattattttcccaatttttgctctatgtaatgggtcaccataaaactgtaagacttggcaaatgctatagaaaaggttcaggtttcagtattctctctgaaggcatcattcctgggcttccggcagcatcacacgcttccagtgcctgcagggtgagggtgtgtggcacagaggcaagcagctcctctcttctgtaggagctttgggttttcagaggtgcagggaaggcagttttacaggttaccgtaaaacagaggttccgtccagtgttccttatgatgcctccccatttaaaaagaaaagagatctatggaaaactgggaatgtaatgtggattctgtcagagctcctacagagcacagttgcctttagtttcctttaaagatgtaaaaatattgtataatacagttttktccctacacaattgtatttgccaagcttagtgcattatgatacctttatttatttgttttgggcagtattactatatatatataaacatacagttactgttttatatattcttaggtcattcaaagccatgtatgctgtaaatgtgctagtctttagaatgacacataataaataactgacaagatattaaatgtggtcttgcctgattcatcctattaggaggactagttctatgtgaccagcctgtgactggaccattgttcttgggcattgcattgagtgctcgggtgctgaatacatgtttgtaaacatgggaccatgggagacttccattttataagcttgtttctgcctaatttgaagcagaggggcaacagcgttgaggttaagagcacggactttgggagcacacagaccaggtcccaatcctggttctgcccctgactggctggtgactctgagcaagttgcttgacctctccaagcctccgtttcctcatgtgcaaagtgtggacaacaacagtaccttcctcataaggaacgtgcgacgcgcctcagaagtacgtgttcataaatggtagccattgttgtwaccttcccgtctgtgaacatggatcacatcatctctgtgggtaacccagtcctcgttgtatgacttgtcaaaatgcagttccacttgtattaatattgaccctgttcatcgtcaccaggactgcatcttgcaccactgtgccgtcttctaggcacacacgrcccgttatctcccttggaaaaattcctctcactggaaatgtacaattaaaggatgattgaaatgtttaactcttggagttttt

SEQ ID NO: 6441 - DNA, 3851 bp, Homo sapiens
cccggcgtctagagcggcggcggctggctagggctgcggcgcgcgtggagggttcgctgctggtttgccgccgggtcgggctccgtgggccggggcaggaggaccagcacctgaggccgggcccgcagcccgcgacttcacagccaggcggcggcgctgctgctgctgcggggctctggcgcgcagcccggcgggacagcggggcggctggcgccgggggccggggagcgccagatgatggatttggacatgcttctatgaagaaatgccacatggtccgagagcaaacatgtccaggctactgccactttagtggactagggctcggtgccagcacttcccgggtaatcaggcgtggtctgaccgaggatcaagaagcacatcatcaccaatgacatcatgacagcaagagagcacagccctcgccatggtgccagggcccgtgcaatgcagcgggcttccaccatcgacgtggcggccgacatgctgggcctctctctggcaggaaatatacaagacccagatgagcccattttagaatttagcttagcttgcagtgagctgcatactccatcgctagatcgaaagccaaatagttttgttgcggtgagtgtcaccacccctcctcaggcattctggacgaagcatgcacagacrgagatcattgagggaaccaacaatcctatatttctaagcagtattgccttctttcaagactctcttatcaatcagatgacacaagtcaaactctccgtgtatgatgtcaaagatagatctcagggaacaatgtatttactgggctctggaacgttcattgtcaaagatctgctccaggacaggcatcataggttgcatttaacactaaggtctgcagagagtgaccgtgtaggtaacatcaccgtgattggctggcagatggaggagaagtcagaccaacggccccctgtgacccggtctgtggacactgtcaatgggaggatggttcttcctgtcgatgagagcttgacggaggcgttaggaatccgatccaaatacgcttcattgcgaaaggacactttgctgaaatcggtgttcggyggtgccatctgccgcatgtaccggtttccaaccactgatggtaaccatttgcggatcctggagcagatggcagagagcgtgctctccctgcacgtgccccggcagttcgtgaagctcctactagaggaagatgcagccagagtgtgtgagctggaggagctgggagagctgtccccttgctgggagagcctccggcgccaaattgtcacccagtaccagaccatcatcctcacataccaggagaacctgaccgacctccatcagtacagagggccctcgtttaaagcaagcagtttgaaagcagataaaaagttagaatttgttcccacaaacttgcacatacaaaggatgagagttcaagacgatggaggatcagatcagaactacgacatcgtcaccattggggcgccagcagcacactgccaaggttttaagtcaggaggtctccgcaaaaagctgcacaaatttgaagagaccaagaaacagtaagtagccagagagggttttacatcatctggctgccagtccataatctacataccccaggatgttgtcagagccaaggagatcatcgcccagatcaacaccctgaaaacccaagtgagttactacgcagagcggctgtcaagggcagccaaggacaggtctgccactggccttgagaggacactcgccatcttggcagacaagacacggcagctggtcacggtctgcgactgcaagctcctggccaactccatccatgggctgaacgctgcacggcctgactacattgcctccaaggcctctcccacttcgactgaggaggagcaggtgktgcttagaaatgaccaggacaccctcatggcccggtggacagggagaaacagccgatcttccctgcaggtggactggcacgaggaggagtgggagaaagtgtggctgaacgtggacaagagcctagagtgcatcattcagcgtgtggacaagctgctgcagaaggagcggctgcatggcgagggctgtgaggatgtcttcccctgtgcaggcagctgcaccagcaagaaagattgcagtccccctcctgaagagtccagcccaggtgaatggagtgaggccctttacccgctgctgaccactctcaccgactgcgtggccatgatgagtgacaaggccaagaaggccatggtattcctgctcatgcaggacagcgcgcccaccatagccacctacctgagcctgcagtaccgccgtgacgtggtcttctgccagacgctgaccgccctcatctgcggcttcatcattaagctgaggaactgcctgcatgacgacggcttcctgcgccagctctacaccatcgggctgctggcccagttcgagagcctgctgagcacctacggggaggagctggcaatgctggaggacatgagccttgggatcatggacttgaggaacgtgaccttcaaagtcactcaggccacttccagcgcctccgcagacatgctgcccgtcatcacaggaaatcgcgacgggtttaacgtgcgggtccctctgccgggcccgctgtttgacgccttgccccgggagatccagagtggcatgctgctgcgagtgcagcccgtcctcttcaacgtgggcatcaatgagcagcagacactggccgagaggtttggcgatacgtctttacaagaagtcatcaacgtggagagtttggtgcggttaaattcctactttgagcagtttaaggaagttttgcctgaggattgcctgcctcggtctcgcagtcagacgtgcctgccagagctgctgcggtttctgggtcagaacgtgcatgcccggaagaataagaacgtcgacattctctggcaagctgctgagatctgccgccgccttaatggggtccggttcaccagctgcaagagygctaaggaccgtacagccatgtcggtgacactggagcagtgcctgatcctgcaacacgagcatggcatggccccgcaggtcttcacccaggccctggagtgcatgcgcagcattggaacacgggaggtagtcacccagaagaacttgagcggcctggtgcccatccgagacttaaggctagaccccagcctcctctgttccatccctttattagctctgagccccaatttactgattgtgtggctctttctgagcatagcatacctggtgaccaaattgcgttgcaaatgaatatcattatgaaaaattaataagtcacaagaaaaacaaaagtgccagaacatgtccagccaccgtgtacctaactggacagaaggaatgtgtcaaaccgtggtctgccaagaaatatttcatgccttacattttgacgttttgttcttctgaactgtaaatatctgccaaattatttcaccaagaagacttgtttgtttagctcctgtagcatcttcagtgcttgtaacatgttcttacggtgccctgtcactgcatcgtttagctggcctggaattccttgtaccacrtctctaccttctgatgtacaactatttatcacctgtacctctcatgtgccctgtttccaagagaaacgagttctgtttaaagagaatttgtatatttgatactattctttaagtgtactgctaacccttcctttccttttgatgacaaacgaaaagaaaaaaacatgctttataactggcttatctagaaaaacctatctaataggacatgtactttctgctttcatttcaaagcgtagtccctgaattacagtagcaaacagtttgcagaatcctaccatttccttgctt

SEQ ID NO: 6442 - DNA, 1198 bp, Homo sapiens
agagggttcccggatacaccttgcgaagaatgccgcactctccgccactcattccccactcaccggcacccgctaaaccttcagcctgaaattttcctccgaagggaagcrgagcagaggaagaactaccaagtgctacactcaaagcctgccgtcgcagtgagcgcgacctccaaaytgaggcatttttgttccggcgaaatccctcccactcaggaaagtccctagaaagagagcgcaggcgcctgggtatcacatgaccacttcccggaagcgcagcagacccgctcaacttcatcctgggttgaggcggaggagaacttccagaattatggcgaagtccgggctgaggcmggacccgcagagcacagctgcagccactgtgctaaagcgggcagtagaactagattcggagtcgcggtatccgcaggctctggtgtgttaccaagaggggattgatctgctcctgcaggttctgaaaggtaccaaagataatactaagagatgtaatctcagagaaaaaatttccaaatacatggacagagcggaaaacataaagaagtacttggaccaagaaaaagaagatggaaaatatcacaagcaaattaaaatagaagagaatgcaacaggtttcagttatgagtcactttttcgcgaataccttaatgagacagttacagaagtttggatagaagatccttatattagacatactcatcagctgtataactttcttcgattttgtgagatgcttattaagagaccatgtaaagtaaaaactattcaccttctcacctctctggatgaaggcattgagcaagtgcagcaaagtagaggcctgcaagaaatagaagagtcactcaggagtcacggagtgctgttggaagttcaatactcttcttcaatacatgaccgagaaattaggttcaacaatggatggatgattaagattggaaggggacttgattattttaagaaaccacagagtcgtttttcccttggatattgtgattttgatttaagaccatgtcatgaaacaacagtagacatttttcataagaagcatacaaaaaatatatgatgggtggtagcctaatttgtattatgtctactttaagtgaatattggattttttttaaaagatcacttttataatgtatgaatttaacaataaacttttatatttctactaatttat

SEQ ID NO: 6443 - DNA, 4584 bp, Homo sapiens
agggaggaggcggcgggcgggcgaacgggcgagcgagggagggggcagaggagccgagttagctcagccaggcggcgacttcggcggcgccacgagagcgggcagcggaggagattgacgtgagtgaattcagatataactcaagcttgttagagggctttttaaaaataaaaagttgattccgtgcaagagagcaagttactgctgcttaccgttcagagacttacaggtgcttgcctgcattgcaataaaggactcatttattgagcaagacttatatttatctcttcattttggagagcctaataaactgttattacagtttctctactgactttcaaaagttttgaagtttgaaagacctttgcaattaaaacagcatgagcacggccagaacagagaaccctgttataatgggtctgtccagtcaaaatggtcagctgagaggccctgtgaaacccactggtggccctggaggagggggcacacagacacagcaacagatgaaccagctgaaaaacaccaacacaatcaataatggcactcagcagcaagcacagagtrtgaccaccactattaaacctggtgatgactggaaaaagactttaaaactccctccaaaggatctaagaatcaaaacttcggatgtgacctccacaaaaggaaatgagtttgaagattactgtttgaaacgggagttactgatgggaatttttgaaatgggctgggaaaatgtcttatctcttttaggaggagagcattcccattgctttatctggtagggatatcttagctagagcaaaaaatggaacaggcaagagcggtgcctacctcattcccttacttgaacggctagacctgaagaaggacaatatacaagcaatggtgattgttcccactagagaacttgctctacaggtcagtcaaatttgcatccaggtcagcaaacacatgggaggggccaaagtgatggcaaccacaggaggaaccaatttacgagatgacataatgaggcttgatgatacagtgcacgtggtgattgctacccctgggagaatcctggatcttattaagaaaggagtagcaaaggttgatcatgtccagatgatagtattggatgaggcagataagttgctgtcacaggattttgtgcagataatggaggatattattctcacgctacctaaaaacaggcagattttactatattccgctactttccctcttagtgtacagaagttcatgaattcccatttgcagaaaccctatgagattaacctgatggaggaactaactctgaagggagtaacccagtactacgcatatgtaactgagcgccaaaaagtacactgcctcaacacacttttctccaggcttcagataaaccagtcgatcattttctgtaactcctctcagcgagttgaattgctagccaagaagatttctcaactgggttattcttgcttctatattcatgctaaaatgaggcaggaacatcgaaatcgtgtatttcatgatttccgaaatggcttatgccgcaatcttgtttgcactgatctgtttacccgaggtattgatatacaagctgtgaatgtggtaataaactttgatttcccaaagctggcagagacctatctccatcgtattggaagatcaggtcgctttggtcatcttggcttagccatcaacttgatcacatatgatgatcgcttcaacctgaaaagtattgaggagcagctgggaacagaaattaaacctattccgagcaacattgataagagcctgtatgtggcagaataccacagcgagcctgtagaagatgagaaaccttaacaagcatgctttgacaaattacaaaaggctcgtttggatctgtgacacatcgttttggggggaatgctcttctctttgtgggtttttcatcttttattttggaactatgaagacttaaaagagctcagacattttctttttttaactggtgaagagaaaaaggctgaaaagaaggaatataccttttttgttccacttgtttgcactgtgtgctgactgaacattagttgcactaactgctggtttttaaaaratgttttctggggaaaggggacmaggaaggaaaagaaagaagagaaggggagaaaccctwaaaagagaagaatcttaatgaacacacaagcttgtcaatgatttcmaaattctccmacagctgactctcgtgcatttcaacttctccctgattcctcatccgttttttaagcctgaagagcttattacttatttgtgcgaagtgccttatgctatgagaccattcagaatatcatcttttagacacagcccgaggaatcaacmatagtaactctttctttccgtttttttttctttttcttttaaaaaatgtcttyttattttggtttcaggttgaagtctcttccctttctacccagtactcgagcccagggctagaagttgaaactcactagtaatgttaaacaccattttttttttcttttkggggaggagttgatatgcaactgcagttcatccgcactgtaaatacatgtatttaaaaaaacaatcccaagtaaaaatttcttctgggctgagtagataaaaaacatcatcgctcccaaaggaaagagcagtctatcattgcaggagccatatgacaagcctttgtgctctatagcagacactaaagactgggttacatatgcctccagtagtagtatggcacttgatgtgtagacatgtcagagccttggccctctttcctctgtggcaaagcgtgtcccatagaaaattgggtgtgtatacttgtataaacttkgtaaataagttttttttctgggttcatatatatatatatatatatacatatatatatatttttttttggatgaaggttgctgggattaaggggattagagtgattatgggagcagctaaagatgagaggggctcagttttacgcaacactaaattctagaaagtactttggcctcgtgctgtagagagcagatttctatggtaccctgtgttagtaaaggggcccagaaatctgggatgtactgtttgctgccacactgtctcatctagtacctttggagtaggtttaccagagagagcaaggaagcttcaaaacattgataattcaasatttattttgagaagctctgattttgcttcttccccctttctaaaagtttgaggaatatttcaagctctgcaacagggggcaaagattaatctaccttgcagtgtaggaattctattgagtggcagtgtcattgagcagtatatatataaagcacagatttgcatttcagaatattagccagtaccagctttggtaatgttagcagttctggagcttaattttctgtggatcatttcctgtagtgtgtaaatgtgttgccctctgcccgctttgatacataaacttttgcaggaatgggcaacctgagagctgttaactttcatgctacagaaagctgcttgccattctcttgcattgtgacaagaattgttacctgtcattttgcactgtaaattgctggcagatgctttacagtcaatagtgttgctttaaattgtgcccctcccaacatgcttgatgtttggcctgatctccaggcaaaaggagtgagatgaatcaaaaccagtgaacttttttttttaatgtttttaattcccttttaacccagtgtactaggtcaatcaggaggcatctggaaagggggggaaaaaagcaaaaaacaaaattaaaaaaaattgatttccatattttatttttcaaaaccctaaaatattacaaaataagtcccgcatatactttaatgttttaactcttttggacaaaggaatcaattacttgaagttgcttttttgactctgcctacttctgagcaaactatttgcgactcacccacaattccttggagatcaaaatcctrcagatgcctcctgatgggacatagccctaactccttaacaactgtagcaagaactgcacggtacaaacccaaaaaagaacaagctcawctatttggaacccaagcctcatattttctgtccagtcaatgttggttactaaatagaaaacctaattaaggaagtaacttttttccagggaggggtgggagagggaatttaaaaggtgtcaacttttgaccaaaaaaattgtgcccttgtaccgatgcagctctctttctcccccacctcttgcgagataagagggatcattcatgtagaagaaaagagtataaatgcaattctgtatctcgctagagaacgtgtgggtgactaaacaaaaagtgcagtctccttcaccaactttagactgcgtggtgccacatgcctgtgggtccctcttaaagcacagacttaaaatggaaagtattactgaagtatagcctctaatgaggagtggcacttaaactatctgggacaccactactggacacggtcttgtagaggcagctgtccagttttggtgcttgactcttgaataggaatwgttaaatggaaagatgctctgaggactaggtcaaagcctggtcttttttttttttttttttttttttt

SEQ ID NO: 6444 - DNA, 4570 bp, Homo sapiens
ccggcgtctccgggtcgctagttccgcgccttcctgcatggaggcgcgccccgagaggctcggacgcggccccttaggcccggcatcagcctccccggccagcwggagaagtcagattgacgtgagtgaattcagatataactcaagcttgttagagggctttttaaaaataaaaagttgattccgtgcaagagagcaagttactgctgcttaccgttcagagacttacaggtgcttgcctgcattgcaataaaggactcatttattgagcaagacttatatttatctcttcattttggagagcctaataaactgttattacagtttctctactgactttcaaaagttttgaagtttgaaagacctttgcaattaaaacagcatgagcacggccagaacagagaaccctgttataatgggtctgtccagtcaaaatggtcagctgagaggccctgtgaaacccactggtggccctggaggagggggcacacagacacagcaacagatgaaccagctgaaaaacaccaacacaatcaataatggcactcagcagcaagcacagagtrtgaccaccactattaaacctggtgatgactggaaaaagactttaaaactccctccaaaggatctaagaatcaaaacttcggatgtgacctccacaaaaggaaatgagtttgaagattactgtttgaaacgggagttactgatgggaatttttgaaatgggctgggaaaaggaggagagcattcccattgctttatctggtagggatatcttagctagagcaaaaaatggaacaggcaagagcggtgcctacctcattcccttacttgaacggctagacctgaagaaggacaatatacaagcaatggtgattgttcccactagagaacttgctctacaggtcagtcaaatttgcatccaggtcagcaaacacatgggaggggccaaagtgatggcaaccacaggaggaaccaatttacgagatgacataatgaggcttgatgatacagtgcacgtggtgattgctacccctgggagaatcctggatcttattaagaaaggagtagcaaaggttgatcatgtccagatgatagtattggatgaggcagataagttgctgtcacaggattttgtgcagataatggaggatattattctcacgctacctaaaaacaggcagattttactatattccgctactttccctcttagtgtacagaagttcatgaattcccatttgcagaaaccctatgagattaacctgatggaggaactaactctgaagggagtaacccagtactacgcatatgtaactgagcgccaaaaagtacactgcctcaacacacttttctccaggcttcagataaaccagtcgatcattttctgtaactcctctcagcgagttgaattgctagccaagaagatttctcaactgggttattcttgcttctatattcatgctaaaatgaggcaggaacatcgaaatcgtgtatttcatgatttccgaaatggcttatgccgcaatcttgtttgcactgatctgtttacccgaggtattgatatacaagctgtgaatgtggtaataaactttgatttcccaaagctggcagagacctatctccatcgtattggaagatcaggtcgctttggtcatcttggcttagccatcaacttgatcacatatgatgatcgcttcaacctgaaaagtattgaggagcagctgggaacagaaattaaacctattccgagcaacattgataagagcctgtatgtggcagaataccacagcgagcctgtagaagatgagaaaccttaacaagcatgctttgacaaattacaaaaggctcgtttggatctgtgacacatcgttttggggggaatgctcttctctttgtgggtttttcatcttttattttggaactatgaagacttaaaagagctcagacattttctttttttaactggtgaagagaaaaaggctgaaaagaaggaatataccttttttgttccacttgtttgcactgtgtgctgactgaacattagttgcactaactgctggtttttaaaaratgttttctggggaaaggggacmaggaaggaaaagaaagaagagaaggggagaaaccctwaaaagagaagaatcttaatgaacacacaagcttgtcaatgatttcmaaattctccmacagctgactctcgtgcatttcaacttctccctgattcctcatccgttttttaagcctgaagagcttattacttatttgtgcgaagtgccttatgctatgagaccattcagaatatcatcttttagacacagcccgaggaatcaacmatagtaactctttctttccgtttttttttctttttcttttaaaaaatgtcttyttattttggtttcaggttgaagtctcttccctttctacccagtactcgagcccagggctagaagttgaaactcactagtaatgttaaacaccattttttttttcttttkggggaggagttgatatgcaactgcagttcatccgcactgtaaatacatgtatttaaaaaaacaatcccaagtaaaaatttcttctgggctgagtagataaaaaacatcatcgctcccaaaggaaagagcagtctatcattgcaggagccatatgacaagcctttgtgctctatagcagacactaaagactgggttacatatgcctccagtagtagtatggcacttgatgtgtagacatgtcagagccttggccctctttcctctgtggcaaagcgtgtcccatagaaaattgggtgtgtatacttgtataaacttkgtaaataagttttttttctgggttcatatatatatatatatatatacatatatatatatttttttttggatgaaggttgctgggattaaggggattagagtgattatgggagcagctaaagatgagaggggctcagttttacgcaacactaaattctagaaagtactttggcctcgtgctgtagagagcagatttctatggtaccctgtgttagtaaaggggcccagaaatctgggatgtactgtttgctgccacactgtctcatctagtacctttggagtaggtttaccagagagagcaaggaagcttcaaaacattgataattcaasatttattttgagaagctctgattttgcttcttccccctttctaaaagtttgaggaatatttcaagctctgcaacagggggcaaagattaatctaccttgcagtgtaggaattctattgagtggcagtgtcattgagcagtatatatataaagcacagatttgcatttcagaatattagccagtaccagctttggtaatgttagcagttctggagcttaattttctgtggatcatttcctgtagtgtgtaaatgtgttgccctctgcccgctttgatacataaacttttgcaggaatgggcaacctgagagctgttaactttcatgctacagaaagctgcttgccattctcttgcattgtgacaagaattgttacctgtcattttgcactgtaaattgctggcagatgctttacagtcaatagtgttgctttaaattgtgcccctcccaacatgcttgatgtttggcctgatctccaggcaaaaggagtgagatgaatcaaaaccagtgaacttttttttttaatgtttttaattcccttttaacccagtgtactaggtcaatcaggaggcatctggaaagggggggaaaaaagcaaaaaacaaaattaaaaaaaattgatttccatattttatttttcaaaaccctaaaatattacaaaataagtcccgcatatactttaatgttttaactcttttggacaaaggaatcaattacttgaagttgcttttttgactctgcctacttctgagcaaactatttgcgactcacccacaattccttggagatcaaaatcctrcagatgcctcctgatgggacatagccctaactccttaacaactgtagcaagaactgcacggtacaaacccaaaaaagaacaagctcawctatttggaacccaagcctcatattttctgtccagtcaatgttggttactaaatagaaaacctaattaaggaagtaacttttttccagggaggggtgggagagggaatttaaaaggtgtcaacttttgaccaaaaaaattgtgcccttgtaccgatgcagctctctttctcccccacctcttgcgagataagagggatcattcatgtagaagaaaagagtataaatgcaattctgtatctcgctagagaacgtgtgggtgactaaacaaaaagtgcagtctccttcaccaactttagactgcgtggtgccacatgcctgtgggtccctcttaaagcacagacttaaaatggaaagtattactgaagtatagcctctaatgaggagtggcacttaaactatctgggacaccactactggacacggtcttgtagaggcagctgtccagttttggtgcttgactcttgaataggaatwgttaaatggaaagatgctctgaggactaggtcaaagcctggtcttttttttttttttttttttttttt

SEQ ID NO: 6445 - DNA, 2344 bp, Homo sapiens
ttttatagtgtcagtcagtcaccccacagtctcctctctcttcttttctactgtgctatcctagaatcaaggatttcagcaacaatgcctctgttcaaactcccaggtaggtgtacaaaaaattgatgatgcaatgcgcaactttgctgaaaaagtgtttgcctctgaagtcaaagatgaaggaggtcgtcaggagatttccccctttgatgtggatgagatctgtcygatttctcatcatgagatgcaagcacacatattccatctggagactctgtccacctccacagaagccaggagaaaaaagyrtttccaaggacggaagactgttaatttgtccattccactaagtgaaacatcttccaccaaactgtcccacattgatgaatacatttcctcatctccaacctaccagaccrtgcctgattttcagagagtgcagattactggtgactatgcctctggggttacagttgaagattttgaaattgtttgcaaaggtctgtatcgggcactatgcatacgtgagaaatacatgcagaagtcgtttcakaggttccctaaaaccccttccaaatacttgcggaacattgatggtgaggcttgggtagcaaatgagagcttctatccagtcttyactcctcctgtgaagaagggagaggaccccttccgaacagacaaccttcctgaaaacctgggctatcacctcaaaatgaaggacggtgtagtttacgtctatcctaatgaagcagcagtcagcaaagatgagcctaagccacttccttacccaaatctggacaccttcttagacgatatgaattttttacttgctttaattgctcaaggacctgttaagacctatacccaccggcgcctgaagttcctctcctcsaagttccaggtccatcagatgcttaacgagatggacgagttaaaggagctgawaaacaacccccaccgagatttttataactgcaggaaggtggacacccatatccatgcagccgcttgcatgaaccagaaacatctgctgcgttttattaagaaatcttaccaaattgatgctgacagagtggtctatagcaccaaagagaagaatctgaccctaaaggaactttttgctaaattaaaaatgcatccttatgacctgactgttgattctctggatgttcatgctggacgccagaccttccagcgttttgataagttcaatgacaaatataatcctgtaggagcaagtgagctaygggacctctacttgaagacagacaattacattaatggggaatattttgccactatcatcaaggaggtaggtgcggacctggtggaggccaagtaccagcatgctgagccccrcctgtccatctatggccgcagtcctgatgagtggagcaaactctcctcctggttcgtctgcaatcgcatccactgccccaacatgacatggatgatccaggttcccaggatctatgatgtgttccgttccaagaatttccttccacattttggaaaaatgctggagaatattttcatgccagtgtttgaggccaccatcaacccccaggctgacccagaactcagtgtcttcctcaagcatatcactggctttgacagtgtggatgatgagtccaaacacagtggccacatgttctcctccaagagtcccaagccccaggagtggacattggaaaagaatccatcttacacttactatgcctactacatgtatgcaaacatcatggtgctcaacagcctgagaaaggaacgaggcatgaatacgtttctgttccgacctcactgtggagaagctggagccctcacccatctcatgacagcattcatgatagcagatgatatctctcatggcctaaatttaaaaaagagtcccgtgctacagtacttgtttttcttagcccaaattcccatygccatgtcaccactaagtaacaatagcctatttctagagtatgccaaaaatccttttttggatttycttcagaaagggctaatgatctcactgtctacagaygacccaatgcaattccactttaccaaggagcccctaatggaagaatatgctattgctgcacaagtcttcaagctgagcacctgtgatatgtgcgaagtggcaaggaacagtgtcttgcagtgtggaatttctcatgaggagaaagtaaagtttctgggcgacaattaccttgaggaaggccctgctggaaatgatatccggaggacaaatgtagcccaaatccgcatggcctatcgctatgaaacctggtgttatgaactcaatttaattgctgagggtcttaaatcaacagaataaaaaaaagtaaaccaa

SEQ ID NO: 6446 - DNA, 4947 bp, Homo sapiens
ttcagctggaagaatgctggaggaatacggaactcctcccatttctcacagccacctccaactcttaaaaaygcttccaactgcctcccagcacacaamcaagggagaaaactattctgtcaaagagacggtgccaaaaggcaaaaacaaaggagctgatggcaaagaaggtagctgtgattggagctggggtcagtggcctaatttctctgaagtgctgtgtggatgagggacttgagcccacttgctttgagagaactgaagrtattggaggagtgtggaggttcaaagagaatgtggaagatggccgagcaagtatctatcaatctgtcgttaccaacaccagcaaagaaatgtcctgtttcagtgactttccaatgcctgaagattttccaaactycctgcataattctaaacttctggaatatttcaggatttttgctaaaaaatttgatctgctaaaatatattcagttccagacaactgtccttagtgtgagaaaatgtccagatttctcatcctctggccaatggaaggttgtcactcagagcaacggcaaggagcagagtgctgtctttgacgcagttatggtttgcagtggccaccacattctacctcatatcccactgaagtcatttccmggtatggagaggttcaaaggccaatatttccatagccgccaatacaagcatccagatggatytgagggaaaacgcatcctggtgattggaatgggaaactyrggctcagatattgctgttgagctgagtaagaatgctgctcaggtttttatcagcaccaggcatggcacctgggtcatgagccgtatctctgaagatggctatccttgggactcagtgttccacacccggtttcgttctatgctccgcaatgtactgccaygaacagctgtaaaatggatgatagaacaacagatgaatcggtggttcaaccatgaaaattatggccttgagcctcaaaacaaatacattatgaaggaacctgtactaaatgatgatgtcccaagtcgtctactctgtggagccatcaaggtgaaatctacagtgaaagagctcacagaaacttctgccatctttgrggatggaacagtggaggagaacattgatgtcatcatttttgcaacaggatatagtttctcttttcccttccttgaagattcactcgttaaagtagagaataatatggtctcactgtataaatacatattccccgctcacctggacaagtcaaccctcgcrtgcattggtctcatccagcccctaggttccattttcccaactgctgaacttcaagctcgttgggtgacaasagttttcaaaggcttgtgtagcctgccctcagagagaactatgatgatggacattatcaaaaggaakgaaaaaagaattgacctgtttggagaaagccagagccagacgttgcagaccamttatgttgactacttggacgagctcgccttagagataggtgcgaagccagatttctgctctctcttgttcaaagatcctaaactggctgtgagactctatttcggaccctgcaactcctatyagtatcgcctggttgggcctgggcaatgggaaggagccagaaatgccatcttcacccagaarcaaagaatactgaagccactcaagactcgggccctgaaggattcatctaatttctcagtttcttttctgttgaaaatcctgggccttcttgctgttgttgtggcctttttttgccaacttcaatggtcctagtcagcataatgctttgggctttattatcttgtcagtcactacctcctaaagaaaaaaaaaaaggctagaagaaaaaacattacattcatgttctaattatagattttagagttaggtagtacaggtaagggggaaattgtaaagaattagcagaattaggcatatgtacaaaaccaaaattttgtcatgaaattttgcctttccacgcttccctcagttcaccaaagttaccaaaatgtaaaataaaataagactggctcaggtaagtagtgctgccaaccctgatataggggagttgtatggaaaaatagtagaattacacagcatgaaaagcagcccatggtttaaattattggacaatttaaattgtgggtaaatatttaaaactcctgaacaatgtttctgatggtcttctatccaccctacttggtaacaaagttctcagatgttaggtcatgtttcatttgctcagtcggggatcactcaaaactactagacaaaaaagtgagaggatagatttagaaaacatcagtgatgctcagataaacttttaggacctcatattaagagctaagcaaatggccacatttcctatattttgacagagatactgctggaaaaattaaaattaaaatgccataatagctacctaacaaatatatatgtttaatgtttatcataggccagacattgtgctatgtgcatatcatatgtattatttcatttaattctcacaacaattctgtgaaatggttacagctattatagtcatttcacagatgatgaaactaagattcagagcagctgatcttgtgaggcagctggaattggaactcagatttgttgaactctagaactaaagatcataatgttgtcttgtaatatatttatttacaaaacacttcattatttataaagaatttactaacagtttatcttatttatacccatacatctgctactttgggaggccctttacatagaaaacagcattctttttgcyaaatatgaccaaattacttttatttataatttttgatttatatttcagctagatctaaaaagcatctgaaggaatttacaatgaaagatacctatgcaataacatttaggataatctttgacattttggaaaaataagaattgaggaaaaaaagtgtatctttcaagtagatgcaaagcattataatgaytgacacttgtatctaactccagtcttacagataactaaggcaaaaagctaaataaacaatatgtaacctctaacatttggtaaaaggaagtatactggtctgttagcagagacaaactttttttagaattgaagtctgaaacaaacaaaagcaattcaatgtcaatagacattaagcaacataatagacaaacatctcctaagggaacatttgttacagctgctccttccctgaactgtgctttggaagataagctctgtcctgagtccaaaccaagcccttccaagagagaacaaaggtcagagatgttgaagattccagcaaatttctcctcttatttctaccaagcctttgtgaacattgctcttcattttggcctgtacttctccctcagggacgtagaacaatggaatgtcagtcagtctctgtagttaaaactttttctttaaaattcaattaagktacttctccctcagggacgtagaacaatggaatgtcagtcagtctctgtagttaaaactttttctttaaaattcaattaagttacaccagaatttacaggcaagattttttttttcattgctcccataagcaaatttgttttaaaataattgtaaatgaggtatatacttagttcttggttaaaaaatatattgctttgttaagtattaaagattatttgtaagtcattgtattaataatactaataaaatttatcaagcctttatagcaagggtcagtgaattaccactgcctgtgggccaaatctagctcactatctgtttttgtaaataaaattttataatagtacacagccacactcattcatttattttctgtggttgctttcaagctacaattgtagagttgggtagtcgcaacagaatctctgtggcccacaaggctaaaatatttacattctcacccattacagaaaaagtttgataattcctgctttataatatgtaaggcattgtcccattttgcataacttgccttatttcatcattatcactacccatttagtagctatggttgttatcttacttctacagtggaagagattgaaaagcatttgtcaggttaatgctaaatcagtgcggaaatatagctccactaggaaaatattattaaatttatatccctaaaatttttagaaatctctcaaaatctttccaaatgttctggtatctttgaaaaatgtaaatagtttatttatagagaaccctacctctgaggttgactcaaaggttaaagaaggctcatcagtctatccttctgcctccatatatcctgaacatcaaactatcccaggaaaaccatctagagtagtttgtttcaaaatattagccacagaccacctacatcacaataactcagggagcttatagaagtgaagattcctgaatataaacatagtaataattcaacctactgaatggaaatctctgctgaaatccacagttttcataagctccccagatgattcctgtgtacattaaatctagaaaccattagtttgagatctctcaaaaataaaaataaaaattgctttcagagagtagcccatgaaatttcccattcttcaaggacaaattccttctgttcagccttggtcctccaactgcagtttacaatttttgttcttctcctgtaaagaatgtcaatggttatcaccttcaatagtttcaatatgtcccccaaagttatgtgtttgaaacttgcaatagtattgggagatggggcctaatgaggtgattaggtgaagtctctgccctcatgaaaagattaatcccattatctcaggagtgtgttggttataaaagcaagtttggctccctcttttcctcacacactctttttcccttctgccttcacctttgccgtgggtgracacagcaagaaggccctcatcagatgctggccccttggtcttgaatttcctagcctctacaactaagccaaataaatttctgtttattataaat

SEQ ID NO: 6447 - DNA, 1899 bp, Homo sapiens
ccgctacagaagattcaaactgagcaaatcgcctaatcttccaaattctttttcctggcttgttagagcagccaagggtggggtggagcttgtgaataaaaagcctgcttcatcttcctcaygcaggagaacatggccaagcgagttgccattgtgggagctggggtcagcggcctggcctccatcaagtgctgtctggaagaaggactggagcccacctgctttgagaggagcgatgaccttggggggctgtggagattcaccaccaaagtctgcagtgtaacaaaatgctcagattctgctgtctctggccaatgggaggtggtcactatgcatgaagagaagcaagagtcagccatctttgatgctgtcatggtctgcactggctttcttactaatccttatttgccactggattcctttccaggtattaatgcctttaaaggccagtactttcatagccggcaatataagcatccagatatatttaaggacaagagagtccttgtgattggaatgggaaattctggcacagacattgctgtggaggccagccacctggcggaaaaggtgttcctcagcaccaccggagggggatgggtgatcagccgaatctttgactcgggctacccatgggacatggtgttcatgacacgctttcagaacatgttgagaaattccctcccaacyccaattgtgacttggttgatggagcgaaagataaacaactggctcaatcatgcaaattacggcttaataccagaagacaggactcagctgaaagagtttgtgctaaatgatgagctcccaggacgcatcatcactgggaaagtgttcatcaggccaagcryaaaagaggtaaaggaaaactctgtcatatttaacaatacttcaaaggaagagcctattgacatcattgtcyttgccactggatacacatttgctttccccttccttgatgagtctgtagtgaaagttgaagatggccaggcctcactgtacaagtatatcttccctgcacatctgcaaaagccaaccctggccattattggcctcatcaracccttgggctccatgatacctacaggagaaacacaagctcggtgggctgttcgagtcctgaaaggtttggcttgtgctactgcaaggctttacaatcagattatatcacatacatagatgaactcctgacctatatcaatgcaaaacccaacctgttctctatgctcctaacggatccacatctggctctgaccgtcttctttggcccrtgctcaccataccagttccgcttgactggcccaggaaaatgggaaggagccagaaatgccatcatgacccagtgggaccgaacattcaaggtcatcaaagctcgagttgtacaagagtctccatctccctttgaaagttttcttaaagtctttagctttctggctttgcttgtggctatttttctgattttcctataagtaaaagatctcctaaatggaagatgcacagagtagatttacaatgctccaattcctctcttacagcaatattgccttcacagttataaactgtattcaaatagtaaaggycaccctctcgcttccctggctggccccagggctaccactggtattcctgagcctctcccagctccacttctaatgctagagaatgataactaagayttctgtgcatttgaaggttgttggaaagttacaggttcattttagaaagaaagctgttcttgacagcactctgagccatcatacctctttcccatataaactattttcacagatctcaactaaaaccccttacttcacaaatgattgtgttgtgctgaaatggtgctcttatagtactggcttattaaaagtaaaaaataaacctaaaaattgattgttttaa

SEQ ID NO: 6448 - DNA, 2161 bp, Homo sapiens
caggtttatccactgtgctggggactcccaagccagcactggctcatactgattcattttgatctctgctaataccagagtcctgcgtggcagagccattggcaccagaaattacaagtacgtaaagagaacatggccaagcgagttgccattgtgggagctggggtcagcggcctggcctccatcaagtgctgtctggaagaaggactggagcccacctgctttgagaggagcgatgaccttggggggctgtggagattcaccgaacatgttgaagaaggcagagccagtctctacaagtctgtggtttccaacagctgcaaggagatgtcttgttactcagactttccattcccagaagattatccaaactatgtgccaaattctcaattcctggaatatctcaaaatgtatgcaaaccactttgaccttctgaaacacattcaattcaagaccaaagtctgcagtgtaacaaaatgctcagattctgctgtctctggccaatgggaggtggtcactatgcatgaagagaagcaagagtcagccatctttgatgctgtcatggtctgcactggctttcttactaatccttatttgccactggattcctttccaggtattaatgcctttaaaggccagtactttcatagccggcaatataagcatccagatatatttaaggacaagagagtccttgtgattggaatgggaaattctggcacagacattgctgtggaggccagccacctggcggaaaaggtgttcctcagcaccaccggagggggatgggtgatcagccgaatctttgactcgggctacccatgggacatggtgttcatgacacgctttcagaacatgttgagaaattccctcccaacyccaattgtgacttggttgatggagcgaaagataaacaactggctcaatcatgcaaattacggcttaataccagaagacaggactcagctgaaagagtttgtgctaaatgatgagctcccaggacgcatcatcactgggaaagtgttcatcaggccaagcryaaaagaggtaaaggaaaactctgtcatatttaacaatacttcaaaggaagagcctattgacatcattgtcyttgccactggatacacatttgctttccccttccttgatgagtctgtagtgaaagttgaagatggccaggcctcactgtacaagtatatcttccctgcacatctgcaaaagccaaccctggccattattggcctcatcaracccttgggctccatgatacctacaggagaaacacaagctcggtgggctgttcgagtcctgaaaggtgtraataagttaccaccaccaagtgtcatgatagaggaaattaatgcaaggaaagaaaacaagcccagttggtttggcttgtgctactgcaaggctttacaatcagattatatcacatacatagatgaactcctgacctatatcaatgcaaaacccaacctgttctctatgctcctaacggatccacatctggctctgaccgtcttctttggcccrtgctcaccataccagttccgcttgactggcccaggaaaatgggaaggagccagaaatgccatcatgacccagtgggaccgaacattcaaggtcatcaaagctcgagttgtacaagagtctccatctccctttgaaagttttcttaaagtctttagctttctggctttgcttgtggctatttttctgattttcctataagtaaaagatctcctaaatggaagatgcacagagtagatttacaatgctccaattcctctcttacagcaatattgccttcacagttataaactgtattcaaatagtaaaggycaccctctcgcttccctggctggccccagggctaccactggtattcctgagcctctcccagctccacttctaatgctagagaatgataactaagayttctgtgcatttgaaggttgttggaaagttacaggttcattttagaaagaaagctgttcttgacagcactctgagccatcatacctctttcccatataaactattttcacagatctcaactaaaaccccttacttcacaaatgattgtgttgtgctgaaatggtgctcttatagtactggcttattaaaagtaaaaaataaacctaaaaattgattgttttaa

SEQ ID NO: 6449 - DNA, 2127 bp, Homo sapiens
tcccaagccagcactggctcatactgattcattttgatctctgctaataccagagtcctgcgtggcagagccattggcaccagaaattacaagagaacatggccaagcgagttgccattgtgggagctggggtcagcggcctggcctccatcaagtgctgtctggaagaaggactggagcccacctgctttgagaggagcgatgaccttggggggctgtggagattcaccgaacatgttgaagaaggcagagccagtctctacaagtctgtggtttccaacagctgcaaggagatgtcttgttactcagactttccattcccagaagattatccaaactatgtgccaaattctcaattcctggaatatctcaaaatgtatgcaaaccactttgaccttctgaaacacattcaattcaagaccaaagtctgcagtgtaacaaaatgctcagattctgctgtctctggccaatgggaggtggtcactatgcatgaagagaagcaagagtcagccatctttgatgctgtcatggtctgcactggctttcttactaatccttatttgccactggattcctttccaggtattaatgcctttaaaggccagtactttcatagccggcaatataagcatccagatatatttaaggacaagagagtccttgtgattggaatgggaaattctggcacagacattgctgtggaggccagccacctggcggaaaaggtgttcctcagcaccaccggagggggatgggtgatcagccgaatctttgactcgggctacccatgggacatggtgttcatgacacgctttcagaacatgttgagaaattccctcccaacyccaattgtgacttggttgatggagcgaaagataaacaactggctcaatcatgcaaattacggcttaataccagaagacaggactcagctgaaagagtttgtgctaaatgatgagctcccaggacgcatcatcactgggaaagtgttcatcaggccaagcryaaaagaggtaaaggaaaactctgtcatatttaacaatacttcaaaggaagagcctattgacatcattgtcyttgccactggatacacatttgctttccccttccttgatgagtctgtagtgaaagttgaagatggccaggcctcactgtacaagtatatcttccctgcacatctgcaaaagccaaccctggccattattggcctcatcaracccttgggctccatgatacctacaggagaaacacaagctcggtgggctgttcgagtcctgaaaggtgtraataagttaccaccaccaagtgtcatgatagaggaaattaatgcaaggaaagaaaacaagcccagttggtttggcttgtgctactgcaaggctttacaatcagattatatcacatacatagatgaactcctgacctatatcaatgcaaaacccaacctgttctctatgctcctaacggatccacatctggctctgaccgtcttctttggcccrtgctcaccataccagttccgcttgactggcccaggaaaatgggaaggagccagaaatgccatcatgacccagtgggaccgaacattcaaggtcatcaaagctcgagttgtacaagagtctccatctccctttgaaagttttcttaaagtctttagctttctggctttgcttgtggctatttttctgattttcctataagtaaaagatctcctaaatggaagatgcacagagtagatttacaatgctccaattcctctcttacagcaatattgccttcacagttataaactgtattcaaatagtaaaggycaccctctcgcttccctggctggccccagggctaccactggtattcctgagcctctcccagctccacttctaatgctagagaatgataactaagayttctgtgcatttgaaggttgttggaaagttacaggttcattttagaaagaaagctgttcttgacagcactctgagccatcatacctctttcccatataaactattttcacagatctcaactaaaaccccttacttcacaaatgattgtgttgtgctgaaatggtgctcttatagtactggcttattaaaagtaaaaaataaacctaaaaattgattgttttaa

SEQ ID NO: 6450 - DNA, 2161 bp, Homo sapiens
ccgctacagaagattcaaactgagcaaatcgcctaatcttccaaattctttttcctggcttgttagagcagccaagggtggggtggagcttgtgaataaaaagcctgcttcatcttcctcaygcaggagaacatggccaagcgagttgccattgtgggagctggggtcagcggcctggcctccatcaagtgctgtctggaagaaggactggagcccacctgctttgagaggagcgatgaccttggggggctgtggagattcaccgaacatgttgaagaaggcagagccagtctctacaagtctgtggtttccaacagctgcaaggagatgtcttgttactcagactttccattcccagaagattatccaaactatgtgccaaattctcaattcctggaatatctcaaaatgtatgcaaaccactttgaccttctgaaacacattcaattcaagaccaaagtctgcagtgtaacaaaatgctcagattctgctgtctctggccaatgggaggtggtcactatgcatgaagagaagcaagagtcagccatctttgatgctgtcatggtctgcactggctttcttactaatccttatttgccactggattcctttccaggtattaatgcctttaaaggccagtactttcatagccggcaatataagcatccagatatatttaaggacaagagagtccttgtgattggaatgggaaattctggcacagacattgctgtggaggccagccacctggcggaaaaggtgttcctcagcaccaccggagggggatgggtgatcagccgaatctttgactcgggctacccatgggacatggtgttcatgacacgctttcagaacatgttgagaaattccctcccaacyccaattgtgacttggttgatggagcgaaagataaacaactggctcaatcatgcaaattacggcttaataccagaagacaggactcagctgaaagagtttgtgctaaatgatgagctcccaggacgcatcatcactgggaaagtgttcatcaggccaagcryaaaagaggtaaaggaaaactctgtcatatttaacaatacttcaaaggaagagcctattgacatcattgtcyttgccactggatacacatttgctttccccttccttgatgagtctgtagtgaaagttgaagatggccaggcctcactgtacaagtatatcttccctgcacatctgcaaaagccaaccctggccattattggcctcatcaracccttgggctccatgatacctacaggagaaacacaagctcggtgggctgttcgagtcctgaaaggtgtraataagttaccaccaccaagtgtcatgatagaggaaattaatgcaaggaaagaaaacaagcccagttggtttggcttgtgctactgcaaggctttacaatcagattatatcacatacatagatgaactcctgacctatatcaatgcaaaacccaacctgttctctatgctcctaacggatccacatctggctctgaccgtcttctttggcccrtgctcaccataccagttccgcttgactggcccaggaaaatgggaaggagccagaaatgccatcatgacccagtgggaccgaacattcaaggtcatcaaagctcgagttgtacaagagtctccatctccctttgaaagttttcttaaagtctttagctttctggctttgcttgtggctatttttctgattttcctataagtaaaagatctcctaaatggaagatgcacagagtagatttacaatgctccaattcctctcttacagcaatattgccttcacagttataaactgtattcaaatagtaaaggycaccctctcgcttccctggctggccccagggctaccactggtattcctgagcctctcccagctccacttctaatgctagagaatgataactaagayttctgtgcatttgaaggttgttggaaagttacaggttcattttagaaagaaagctgttcttgacagcactctgagccatcatacctctttcccatataaactattttcacagatctcaactaaaaccccttacttcacaaatgattgtgttgtgctgaaatggtgctcttatagtactggcttattaaaagtaaaaaataaacctaaaaattgattgttttaa

SEQ ID NO: 6451 - DNA, 1852 bp, Homo sapiens
tacacaactttttttccttagtctgtatactttctgctgtcactagcataacagaaaagacgaatggcttttgttttaaactgagggcacttttacaaaagtcatctttccatttatttttctttcagaaaaaagaatttgggttttgagcttttttaaaaaaaaaagacaaacactttccttgactttgagaaataatttaagtcaaagaatctgctctatgctaaccaagagatagagcacagcaaagatctgccagccccaggcctctacctagtggcctggaaattcaagtattcttattggtggaggccatttgtttctgattagaagctgtctaaacctcctactcctcaactcaaaggaaaacacagagcataccatggccaagaaagttgcagtgattggagctggtgtgagtggcctctcctccatcaaatgcygtgtggatgaggacctggagcccacctgctttgagagaagtgatgacattgggggattatggaagtttactgaatcttccaaagatgggatgaccagggtctataagtcattagtgacaaatgtctgtaaggaaatgtcatgttacagtgacttccctttccacgaagattatcctaatttcatgaaccatgaaaaattttgggactatctccaagaatttgctgagcactttgacctcctgaaatacattcagtttaagaccactgtgtgcagcataacgaagcgtccagacttctccgaaactggtcagtgggatgttgtcacagagacagagggcaagcaaaatagagctgtctttgatgctgttatggtttgcactggacatttcctgaatccccatttacctttggaagcctttcctggaattcataagtttaaaggtcagatcctgcatagtcaagagtacaagatcccagaaggctttcagggcaaacgcgtcttggtgattggtcttgggaacactggaggagacattgctgtggaactcagtcgaacggcagctcaggtacttctcagtactagaactggtacctgggttcttgggcgctcttcagattggggctatccttataatatgatggttacaagaagatgctgtagttttattgcacaagttctgccttcacgttttctaaactggattcaagaaaggaagttgaataagagatttaatcatgaggattatggattaagtattaccaaagggaaaaaagcaaaattyattgtgaatgatgagctgccaaactgtatcctctgtggggcaatcactatgaaaaccagcgtgattgaatttacagaawcctctgctgtctttgaagatgggacagtggaagaaaacattgatgytgtgatcttcactacaggatatacattttcttttccattttttgaagaacctcttaaaagcctctgtacaaagaagatatttctatacaagcaagtctttcccttaaacctagagagagcgacattagccatcatcggccttatcggccttaaaggatccatcttatcaggcacagagctccaagcacgatgggtcacaagagtattcaaaggactctgtaagatacctccatcccaaaaattgatgatggaggctactgaaaaggaacagctcattaaaaggggagtgtttaaagacaccagcaaagacaaatttgactacattgcctacatggatgatatcgctgcctgcataggcacaaagcccagtcatctcctatctgaattattgtattatcttcttctttgttttcagtaccctctttcttgccaccctttccaatgcatcttctaccctgctacctcagtgattattctaaaataaatatatatgatatggttt

SEQ ID NO: 6452 - DNA, 2712 bp, Homo sapiens
tacacaactttttttccttagtctgtatactttctgctgtcactagcataacagaaaagacgaatggcttttgttttaaactgagggcacttttacaaaagtcatctttccatttatttttctttcagaaaaaagaatttgggttttgagcttttttaaaaaaaaaagacaaacactttccttgactttgagaaataatttaagtcaaagaatctgctctatgctaaccaagagatagagcacagcaaagatctgccagccccaggcctctacctagtggcctggaaattcaagtattcttattggtggaggccatttgtttctgattagaagctgtctaaacctcctactcctcaactcaaaggaaaacacagagcataccatggccaagaaagttgcagtgattggagctggtgtgagtggcctctcctccatcaaatgcygtgtggatgaggacctggagcccacctgctttgagagaagtgatgacattgggggattatggaagtttactgaatcttccaaagatgggatgaccagggtctataagtcattagtgacaaatgtctgtaaggaaatgtcatgttacagtgacttccctttccacgaagattatcctaatttcatgaaccatgaaaaattttgggactatctccaagaatttgctgagcactttgacctcctgaaatacattcagtttaagaccactgtgtgcagcataacgaagcgtccagacttctccgaaactggtcagtgggatgttgtcacagagacagagggcaagcaaaatagagctgtctttgatgctgttatggtttgcactggacatttcctgaatccccatttacctttggaagcctttcctggaattcataagtttaaaggtcagatcctgcatagtcaagagtacaagatcccagaaggctttcagggcaaacgcgtcttggtgattggtcttgggaacactggaggagacattgctgtggaactcagtcgaacggcagctcaggtacttctcagtactagaactggtacctgggttcttgggcgctcttcagattggggctatccttataatatgatggttacaagaagatgctgtagttttattgcacaagttctgccttcacgttttctaaactggattcaagaaaggaagttgaataagagatttaatcatgaggattatggattaagtattaccaaagggaaaaaagcaaaattyattgtgaatgatgagctgccaaactgtatcctctgtggggcaatcactatgaaaaccagcgtgattgaatttacagaawcctctgctgtctttgaagatgggacagtggaagaaaacattgatgytgtgatcttcactacaggatatacattttcttttccattttttgaagaacctcttaaaagcctctgtacaaagaagatatttctatacaagcaagtctttcccttaaacctagagagagcgacattagccatcatcggccttatcggccttaaaggatccatcttatcaggcacagagctccaagcacgatgggtcacaagagtattcaaaggactctgtaagatacctccatcccaaaaattgatgatggaggctactgaaaaggaacagctcattaaaaggggagtgtttaaagacaccagcaaagacaaatttgactacattgcctacatggatgatatcgctgcctgcataggcacaaagcccagcatcccacttctgttcctcaaggatcccagactagcttgggaagttttctttggaccatgtactccttatcagtaccgcctcatgggccctggaaaatgggatggagccagaaatgccatcctgacccagtgggacagaacattgaaacctttaaaaactcgaattgtccctgattcctccaagcctgcctccatgtcacattatttaaaagcctggggggcacctgtcctacttgcctctcttctacttatctgtaaatcttcacttttcttgaaattggtgagagataaactacaggacagaatgtccccttacctagtaagtctttggcgaggatgaacctgattgttacaagggttacacmaagtcatgctaattctatctccaagtatcttgtgcatccctcctctgctctccatcataactgctattagccaaattcaggcccagtcatctcctatctgaattattgtattatcttcttctttgttttcagtaccctctttcttgccaccctttccaatgcatcttctaccctgctacctcagtgattattctaaaataaatatatatgatatggtttagctgtgtccccacccaaatctcatcttgaattgtagctcccataattcccacatgccgtgggaggtaggtaattgaatcatgggggcaggtcttctcccatactgttctcatggtagtgaataagtctcackatatctgatggttttataaatgacagttcccctgcacaagctctctcgtgtctaccaccatgtaagacgtgtctttgctccttcttcaccttccaccatgattgtgaggcctccccagccatgtggaactgtgagtctgttaaacctcccttcctttataaattacccagtcttgggtatgtctttattagcagcaatagaacagactaatacaatatggtttattactctaaagtaaatatatggtttataaatatataggaacctctgattccc

SEQ ID NO: 6453 - DNA, 1857 bp, Homo sapiens
atgatcggccagaagacgctctactcctttttctcccccagccccgccaggaagcgacacgcccccagccccgagccggccgtccaggggaccggcgtggctggggtgcctgaggaaagcggagatgcggcgggcgcctcccagcccgtctccccgctccagtttagaacctaattcccaattcccggaccgggcccagccctgggctcttactgtccgcttttgctgggacctgttccacaaatgggcgtcttctgccttgggccgtgggggttgggccggaagctgcggacgcctgggaaggggccgctgcagctcttgagccgcctctgcggggaccacttgcaggccatcccagccaagaaggccccggctgggcaggaggagcctgggacgccgccctcctcgccgctgagtgccgagcagttggaccggatccagaggaacaaggccgcggccctgctcagactcgcggcccgcaacgtgcccgtgggctttggagagagctggaagaagcacctcagcggggagttcgggaaaccgtattttatcaagctaatgggatttgttgcagaagaaagaaagcattacactgtttatccacccccacaccaagtcttcacctggacccagatgtgtgacataaaagatgtgaaggttgtcatcctgggacaggatccatatcatggacctaatcaagctcacgggctctgctttagtgttcaaaggcctgttccgcctccgcccagtttggagaacatttataaagagttgtctacagacatagaggattttgttcatcctggccatggagatttatctgggtgggccaagcaaggtgttctccttctcaacgctgtcctcacggttcgtgcccatcaagccaactctcataaggagcgaggctgggagcagttcactgatgcagttgtgtcctggctaaatcagaactcgaatggccttgttttcttgctctggggctcttatgctcagaagaagggcagtgccattgataggaagcggcaccatgtrctacagacggctcatccctcccctttgtcagtgtatagagggttctttggatgtagacacttttcaaagaccaatgagctgctgcagaagtctggcaagaagcccattgactggaaggagctgtgatcatcagctgaggggtggcctttgagaagctgctgttaacgtatttgccagttacgaagttccactgaaaattttcctattaattcttaagtactctgcataagggggraaagcttccagaaagcagccatgaaccaggctgtccaggaatggcagctgtatccaaccacaaacaacaaaggctaccctttgaccaaatgtctttctctgcaacatggcttcggcctaaaatatgcagaagacagatgaggtcaaatactcagttggctctctttatctcccttgcctttatggtgaaacaggggagatgtgcacctttcaggcacagccctagtttggcgcctgctgctccttggttttgcctggttagactttcagtgacagatggtggggtgattttctcctagggttatgtccagttggggtttttaaggcagcacagactgccaagtactgttttttttaaccgactgaaatcactttgggatattttttcctgcaacactggaaagttttagttttttaagaagtactcatgcagatatatatatatatatttttcccagtcctttttttaagagacggtctttattgggtctgcacctccatccttgatcttgttagcaatgctgtttttgctgttagtcgggttagagttggctctacgcgaggtttgttaataaaagtttgttaaaagtt

SEQ ID NO: 6454 - DNA, 2036 bp, Homo sapiens
cacagccacagccagggctagcctcgccggttcccgggtggcgcgcgttcgctgcctcctcagctccaggatgatcggccagaagacgctctactcctttttctcccccagccccgccaggaagcgacacgcccccagccccgagccggccgtccaggggaccggcgtggctggggtgcctgaggaaagcggagatgcggcggccatcccagccaagaaggccccggctgggcaggaggagcctgggacgccgccctcctcgccgctgagtgccgagcagttggaccggatccagaggaacaaggccgcggccctgctcagactcgcggcccgcaacgtgcccgtgggctttggagagagctggaagaagcacctcagcggggagttcgggaaaccgtattttatcaagctaatgggatttgttgcagaagaaagaaagcattacactgtttatccacccccacaccaagtcttcacctggacccagatgtgtgacataaaagatgtgaaggttgtcatcctgggacaggatccatatcatggacctaatcaagctcacgggctctgctttagtgttcaaaggcctgttccgcctccgcccagtttggagaacatttataaagagttgtctacagacatagaggattttgttcatcctggccatggagatttatctgggtgggccaagcaaggtgttctccttctcaacgctgtcctcacggttcgtgcccatcaagccaactctcataaggagcgaggctgggagcagttcactgatgcagttgtgtcctggctaaatcagaactcgaatggccttgttttcttgctctggggctcttatgctcagaagaagggcagtgccattgataggaagcggcaccatgtrctacagacggctcatccctcccctttgtcagtgtatagagggttctttggatgtagacacttttcaaagaccaatgagctgctgcagaagtctggcaagaagcccattgactggaaggagctgtgatcatcagctgaggggtggcctttgagaagctgctgttaacgtatttgccagttacgaagttccactgaaaattttcctattaattcttaagtactctgcataagggggraaagcttccagaaagcagccatgaaccaggctgtccaggaatggcagctgtatccaaccacaaacaacaaaggctaccctttgaccaaatgtctttctctgcaacatggcttcggcctaaaatatgcagaagacagatgaggtcaaatactcagttggctctctttatctcccttgcctttatggtgaaacaggggagatgtgcacctttcaggcacagccctagtttggcgcctgctgctccttggttttgcctggttagactttcagtgacagatgttggggtgtttttgcttagaaaggtccccttgtctcagccttgcagggcaggcatgccagtctctgccagttccactgcccccttgatctttgaaggagtcctcaggcccctcgcagcataaggatgttttgcaactttccagaatctggcccagaaattagggctcaatttcctgattgtagtagaggttaagattgctgtgagctttatcagataagagaccgagagaagtaagctgggtcttgttattccttgggtgttggtggaataagcagtggaatttgaacaaggaagaggagaaaagggaattttgtctttatggggtggggtgattttctcctagggttatgtccagttggggtttttaaggcagcacagactgccaagtactgttttttttaaccgactgaaatcactttgggatattttttcctgcaacactggaaagttttagttttttaagaagtactcatgcagatatatatatatatatttttcccagtcctttttttaagagacggtctttattgggtctgcacctccatccttgatcttgttagcaatgctgtttttgctgttagtcgggttagagttggctctacgcgaggtttgttaataaaagtttgttaaaagttt

SEQ ID NO: 6455 - DNA, 2140 bp, Homo sapiens
acgtggggacgcggtggggcgggtctggcgggggcggggcacctctgtgcagggttcccagtcaccgcgacgctcctcgggaagcyatagggcgcctcccagcccgtctccccgctccagtttagaacctaattcccaattcccggaccgggcccagccctgggctcttactgtccgcttttgctgggacctgttccacaaatgggcgtcttctgccttgggccgtgggggttgggccggaagctgcggacgcctgggaaggggccgctgcagctcttgagccgcctctgcggggaccacttgcaggccatcccagccaagaaggccccggctgggcaggaggagcctgggacgccgccctcctcgccgctgagtgccgagcagttggaccggatccagaggaacaaggccgcggccctgctcagactcgcggcccgcaacgtgcccgtgggctttggagagagctggaagaagcacctcagcggggagttcgggaaaccgtattttatcaagctaatgggatttgttgcagaagaaagaaagcattacactgtttatccacccccacaccaagtcttcacctggacccagatgtgtgacataaaagatgtgaaggttgtcatcctgggacaggatccatatcatggacctaatcaagctcacgggctctgctttagtgttcaaaggcctgttccgcctccgcccagtttggagaacatttataaagagttgtctacagacatagaggattttgttcatcctggccatggagatttatctgggtgggccaagcaaggtgttctccttctcaacgctgtcctcacggttcgtgcccatcaagccaactctcataaggagcgaggctgggagcagttcactgatgcagttgtgtcctggctaaatcagaactcgaatggccttgttttcttgctctggggctcttatgctcagaagaagggcagtgccattgataggaagcggcaccatgtrctacagacggctcatccctcccctttgtcagtgtatagagggttctttggatgtagacacttttcaaagaccaatgagctgctgcagaagtctggcaagaagcccattgactggaaggagctgtgatcatcagctgaggggtggcctttgagaagctgctgttaacgtatttgccagttacgaagttccactgaaaattttcctattaattcttaagtactctgcataagggggraaagcttccagaaagcagccatgaaccaggctgtccaggaatggcagctgtatccaaccacaaacaacaaaggctaccctttgaccaaatgtctttctctgcaacatggcttcggcctaaaatatgcagaagacagatgaggtcaaatactcagttggctctctttatctcccttgcctttatggtgaaacaggggagatgtgcacctttcaggcacagccctagtttggcgcctgctgctccttggttttgcctggttagactttcagtgacagatgttggggtgtttttgcttagaaaggtccccttgtctcagccttgcagggcaggcatgccagtctctgccagttccactgcccccttgatctttgaaggagtcctcaggcccctcgcagcataaggatgttttgcaactttccagaatctggcccagaaattagggctcaatttcctgattgtagtagaggttaagattgctgtgagctttatcagataagagaccgagagaagtaagctgggtcttgttattccttgggtgttggtggaataagcagtggaatttgaacaaggaagaggagaaaagggaattttgtctttatggggtggggtgattttctcctagggttatgtccagttggggtttttaaggcagcacagactgccaagtactgttttttttaaccgactgaaatcactttgggatattttttcctgcaacactggaaagttttagttttttaagaagtactcatgcagatatatatatatatatttttcccagtcctttttttaagagacggtctttattgggtctgcacctccatccttgatcttgttagcaatgctgtttttgctgttagtcgggttagagttggctctacgcgaggtttgttaataaaagtttgttaaaagttt

SEQ ID NO: 6456 - DNA, 1711 bp, Homo sapiens
cacagccacagccagggctagcctcgccggttcccgggtggcgcgcgttcgctgcctcctcagctccaggatgatcggccagaagacgctctactcctttttctcccccagccccgccaggaagcgacacgcccccagccccgagccggccgtccaggggaccggcgtggctggggtgcctgaggaaagcggagatgcggcggccatcccagccaagaaggccccggctgggcaggaggagcctgggacgccgccctcctcgccgctgagtgccgagcagttggaccggatccagaggaacaaggccgcggccctgctcagactcgcggcccgcaacgtgcccgtgggctttggagagagctggaagaagcacctcagcggggagttcgggaaaccgtattttatcaagctaatgggatttgttgcagaagaaagaaagcattacactgtttatccacccccacaccaagtcttcacctggacccagatgtgtgacataaaagatgtgaaggttgtcatcctgggacaggatccatatcatggacctaatcaagctcacgggctctgctttagtgttcaaaggcctgttccgcctccgcccagtttggagaacatttataaagagttgtctacagacatagaggattttgttcatcctggccatggagatttatctgggtgggccaagcaaggtgttctccttctcaacgctgtcctcacggttcgtgcccatcaagccaactctcataaggagcgaggctgggagcagttcactgatgcagttgtgtcctggctaaatcagaactcgaatggccttgttttcttgctctggggctcttatgctcagaagaagggcagtgccattgataggaagcggcaccatgtrctacagacggctcatccctcccctttgtcagtgtatagagggttctttggatgtagacacttttcaaagaccaatgagctgctgcagaagtctggcaagaagcccattgactggaaggagctgtgatcatcagctgaggggtggcctttgagaagctgctgttaacgtatttgccagttacgaagttccactgaaaattttcctattaattcttaagtactctgcataagggggraaagcttccagaaagcagccatgaaccaggctgtccaggaatggcagctgtatccaaccacaaacaacaaaggctaccctttgaccaaatgtctttctctgcaacatggcttcggcctaaaatatgcagaagacagatgaggtcaaatactcagttggctctctttatctcccttgcctttatggtgaaacaggggagatgtgcacctttcaggcacagccctagtttggcgcctgctgctccttggttttgcctggttagactttcagtgacagatggtggggtgattttctcctagggttatgtccagttggggtttttaaggcagcacagactgccaagtactgttttttttaaccgactgaaatcactttgggatattttttcctgcaacactggaaagttttagttttttaagaagtactcatgcagatatatatatatatatttttcccagtcctttttttaagagacggtctttattgggtctgcacctccatccttgatcttgttagcaatgctgtttttgctgttagtcgggttagagttggctctacgcgaggtttgttaataaaagtttgttaaaagtt

SEQ ID NO: 6457 - DNA, 2182 bp, Homo sapiens
atgatcggccagaagacgctctactcctttttctcccccagccccgccaggaagcgacacgcccccagccccgagccggccgtccaggggaccggcgtggctggggtgcctgaggaaagcggagatgcggcgggcgcctcccagcccgtctccccgctccagtttagaacctaattcccaattcccggaccgggcccagccctgggctcttactgtccgcttttgctgggacctgttccacaaatgggcgtcttctgccttgggccgtgggggttgggccggaagctgcggacgcctgggaaggggccgctgcagctcttgagccgcctctgcggggaccacttgcaggccatcccagccaagaaggccccggctgggcaggaggagcctgggacgccgccctcctcgccgctgagtgccgagcagttggaccggatccagaggaacaaggccgcggccctgctcagactcgcggcccgcaacgtgcccgtgggctttggagagagctggaagaagcacctcagcggggagttcgggaaaccgtattttatcaagctaatgggatttgttgcagaagaaagaaagcattacactgtttatccacccccacaccaagtcttcacctggacccagatgtgtgacataaaagatgtgaaggttgtcatcctgggacaggatccatatcatggacctaatcaagctcacgggctctgctttagtgttcaaaggcctgttccgcctccgcccagtttggagaacatttataaagagttgtctacagacatagaggattttgttcatcctggccatggagatttatctgggtgggccaagcaaggtgttctccttctcaacgctgtcctcacggttcgtgcccatcaagccaactctcataaggagcgaggctgggagcagttcactgatgcagttgtgtcctggctaaatcagaactcgaatggccttgttttcttgctctggggctcttatgctcagaagaagggcagtgccattgataggaagcggcaccatgtrctacagacggctcatccctcccctttgtcagtgtatagagggttctttggatgtagacacttttcaaagaccaatgagctgctgcagaagtctggcaagaagcccattgactggaaggagctgtgatcatcagctgaggggtggcctttgagaagctgctgttaacgtatttgccagttacgaagttccactgaaaattttcctattaattcttaagtactctgcataagggggraaagcttccagaaagcagccatgaaccaggctgtccaggaatggcagctgtatccaaccacaaacaacaaaggctaccctttgaccaaatgtctttctctgcaacatggcttcggcctaaaatatgcagaagacagatgaggtcaaatactcagttggctctctttatctcccttgcctttatggtgaaacaggggagatgtgcacctttcaggcacagccctagtttggcgcctgctgctccttggttttgcctggttagactttcagtgacagatgttggggtgtttttgcttagaaaggtccccttgtctcagccttgcagggcaggcatgccagtctctgccagttccactgcccccttgatctttgaaggagtcctcaggcccctcgcagcataaggatgttttgcaactttccagaatctggcccagaaattagggctcaatttcctgattgtagtagaggttaagattgctgtgagctttatcagataagagaccgagagaagtaagctgggtcttgttattccttgggtgttggtggaataagcagtggaatttgaacaaggaagaggagaaaagggaattttgtctttatggggtggggtgattttctcctagggttatgtccagttggggtttttaaggcagcacagactgccaagtactgttttttttaaccgactgaaatcactttgggatattttttcctgcaacactggaaagttttagttttttaagaagtactcatgcagatatatatatatatatttttcccagtcctttttttaagagacggtctttattgggtctgcacctccatccttgatcttgttagcaatgctgtttttgctgttagtcgggttagagttggctctacgcgaggtttgttaataaaagtttgttaaaagttt

SEQ ID NO: 6458 - DNA, 1919 bp, Homo sapiens
aagcgcactgggtcgcatcgaggccccgccccctgagcctgggtagcggcgcgagggccgggagaaccgttcgcggaggaaaggcgaactagtgttgggatggccaccaactgggggagcctcttgcaggataaacagcagctagaggagctggcacggcaggccgtggaccgggmcctggctgagggagtattgctgaggacctcacaggagcccacttcctcggaggtggtgagctatgccccattcacgctcttcccctcactggtccccagtgccctgctggagcaagcctatgctgtgcagatggacttcaacctgctagtggatgctgtcagccagaacgctgccttcctggagcaaactctttccagcaccatcaaacaggatgactttaccgctcgtctctttgacatccacaagcaagtcctaaaagagggcattgcccagactgtgttcctgggcctgaatcgctcagactacatgttccagcgcagcgcagatggctccccagccctgaaacagatcgaaatcaacaccatctctgccagctttgggggcctggcctcccggaccccagctgtgcaccgacatgttctcagtgtcctgagtaagaccaaagaagctggcaagatcctctctaataatcccagcaagggacyggccctgggaattgccaaagcctgggagctctacggctcacccaatgctctggtgctactgattgctcaagagaaggaaagaaacatatttgaccagcgtgccatagagaatgagctactggccaggaacatccatgtgatccgacgaacatttgaagatatctctgaaaaggggtctctggaccaagaccgaaggckgtttgtggatggccaggaaattgctgtggtttacttccgggatggctacatgcctcgtcagtacagtctacagaattgggaagcaygtctactgctggagaggtcacatgctgccaagtgcccagacattgccacccagctggctgggactaagaaggtgcagcaggagctaagcaggcygggcatgctggagatgttgctccctggccagyctgaggctgtggccygcctccgcgccacctttgctggcctctactcactggatgtgggtgaagaaggggaccaggccatcgccgaggcccttgctgcccctagccggtttgtgctaaagccccagagagagggtggaggtaacaacctatatggggaggaaatggtacaggccctgaaacagctgaaggacagtgaggagagggcctcctacatcctcatggagaagatcgaacctgagccttttgagaattgcctgctacggcctggcagccctgcccgagtggtccagtgcatttcagagctgggcatctttggggtctatgtcaggcaggaaaagacactcgtgatgaacaagcacgtggggcatctacttcgaaccaaagccatcgagcatgcagatggtggtgtggcagcggkagtggcagtcctggamaacccataccctgtgtgagggcacaaccaggccacgggaccttctatcctctgtatttgtcattcctctcctagccctcctgaggggtatcctcctaaagacctccaaagtttttatggaagggtaaatactggtaccttcccccagctttccatytgaggaccagaaaagttgtgtctcccttagatgagatctagacgcccccaaatccttgagatgtgggtatagctcagggtaagctgctytgaggtaaaggtccatgaaccctgccccactcctgtcagcccctyatcagccttttcagcaggttccagtgcctgacttgggataggactgagtggtaggaggagggggagtggaggggcatagcctttccctaattctgccttaaataaaactgcattgctgattca

SEQ ID NO: 6459 - DNA, 1859 bp, Homo sapiens
ccgccgaccccgatggtcccctcccctccttcccaaggtccatccgccagggtgcagccgacgcactcctaatgctaaggccgccctctcatcgaccgccccttcctggcctcgactcagcgccaaaggtgttgggatggccaccaactgggggagcctcttgcaggataaacagcagctagaggagctggcacggcaggccgtggaccgggmcctggctgagggagtattgctgaggacctcacaggagcccacttcctcggaggtggtgagctatgccccattcacgctcttcccctcactggtccccagtgccctgctggagcaagcctatgctgtgcagatggacttcaacctgctagtggatgctgtcagccagaacgctgccttcctggagcaaactctttccagcaccatcaaacaggatgactttaccgctcgtctctttgacatccacaagcaagtcctaaaagagggcattgcccagactgtgttcctgggcctgaatcgctcagactacatgttccagcgcagcgcagatggctccccagccctgaaacagatcgaaatcaacaccatctctgccagctttgggggcctggcctcccggaccccagctgtgcaccgacatgttctcagtgtcctgagtaagaccaaagaagctggcaagatcctctctaataatcccagcaagggacyggccctgggaattgccaaagcctgggagctctacggctcacccaatgctctggtgctactgattgctcaagagaaggaaagaaacatatttgaccagcgtgccatagagaatgagctactggccaggaacatccatgtgatccgacgaacatttgaagatatctctgaaaaggggtctctggaccaagaccgaaggckgtttgtggatggccaggaaattgctgtggtttacttccgggatggctacatgcctcgtcagtacagtctacagaattgggaagcaygtctactgctggagaggtcacatgctgccaagtgcccagacattgccacccagctggctgggactaagaaggtgcagcaggagctaagcaggcygggcatgctggagatgttgctccctggccagyctgaggctgtggccygcctccgcgccacctttgctggcctctactcactggatgtgggtgaagaaggggaccaggccatcgccgaggcccttgctgcccctagccggtttgtgctaaagccccagagagagggtggaggtaacaacctatatggggaggaaatggtacaggccctgaaacagctgaaggacagtgaggagagggcctcctacatcctcatggagaagatcgaacctgagccttttgagaattgcctgctacggcctggcagccctgcccgagtggtccagtgcatttcagagctgggcatctttggggtctatgtcaggcaggaaaagacactcgtgatgaacaagcacgtggggcatctacttcgaaccaaagccatcgagcatgcagatggtggtgtggcagcggkagtggcagtcctggamaacccataccctgtgtgagggcacaaccaggccacgggaccttctatcctctgtatttgtcattcctctcctagccctcctgaggggtatcctcctaaagacctccaaagtttttatggaagggtaaatactggtaccttcccccagtgctytgaggtaaaggtccatgaaccctgccccactcctgtcagcccctyatcagccttttcagcaggttccagtgcctgacttgggataggactgagtggtaggaggagggggagtggaggggcatagcctttccctaattctgccttaaataaaactgcattgctga

SEQ ID NO: 6460 - DNA, 2020 bp, Homo sapiens
gggtatgyggaacagaacacagtggtctagctaaccgatttccgctagacgtccagctatctttcaaaatattttgtttctgcayggcaacttcagccgctaaaaaagcatccagcttacaacggaacctggagggttggtaaaggccccctgcgctggccccgccccatgggaccgggcggcgtgggmgtgagaggcggggcggggccgcgctctgcttgccaatgtctttataggtcacccggaaggcacgcggaacctcggcgcggtgcttccagcagggtctctccgccactccagccccgcgcccctcgccgcggccctcgggcgtctgcgccgcagctgccgcccccgcctctttggagtctctcgcggcctcaaagcgcggcctgcgtcgcttccggcagttccmgaccgcgggcgatggctgccgctgggggcgcccggctgctgcgcgccgcttctgctgtcctcggcggcccggccggccggtggctgcaccacgctgggtcccgcgctggatccagcggcctgctgaggaaccgggggccgggcggkagcgcggaggcgagccggtcgctgagcgtgtcggcgcgggcccggagcagctcagaagataaaataacagtccactttataaaccgwgatggtgaaacattaacaaccaaaggaaaagttggtgattctctgctagatgttgtggttgaaaataatctagatattgatggctttggtgcatgtgagggaaccctggcttgttcaacctgtcacctcatctttgaagatcacatatatgagaagttagatgcaatcactgatgaggagaatgacatgctcgatctggcatatggactaacagacagatcacggttgggctgccaaatctgtttgacaaaatctatggacaatatgactgttcgagtgcctgaaacagtggctgatgccagacaatccattgatgtgggcaagacctcctgaactagaacaaataggaatattttcatggaattttacctatttttataattattatttcttaaagtgattaaatgagaacatggatgagtggacttcatattatgactagctttactattttaattcaccttgcataactactgaattttgtcattcttgaaagtatgcaatttttattttggttatattacaaaaatgtcaatcaaatattaaaaaatagttartgtgatagaaaaaccttacatatttttttcttatgtttgtttagcgactttagcaaaatgttttcatataatctcatctgtttacctagaagataggttaaggaaatatattattattcctgtttgatgtgggtgaaggcagagatctaacctggcttgtttagggccataccactaattagaaaatctgtrctagaacctgtgtcttattcctataagctatgtgttcagactgaaactggagaaattatgactattttatttatagtagtagttaaatctgaatgtgtatggayaaaaatatttaattgctsagtaaactgcttaacttcaaagatagttattrmccttataaataaatatttcaaaattttgattcggaagactaagtctggacgtagacattataatgctatcaaagaagtttgatctctgttttgactaaactagaggaaaaatgattggatgtgtttattcttttctaagcagaatggtttaactttgtactctttgaaaaataatgctgatttataaatctctgcctataacagaatggaaaccttatgaatgaattgtgtttctctgtcctgagctggagaagggaatgagcaggctgacacgttgcacagccccaggtggcgccattctctcacgcaaggatggggctgcagggtgagcagcgtgggctgcagtgtgtcagtcccaggagtgagggagtggcaagcaccacagattaccacgtatgtgtggaagacattcgtacycttatctttactataaataaattcataaaagttaacaaaggggtacacagtatg

SEQ ID NO: 6461 - DNA, 2170 bp, Homo sapiens
tccgccctcccactcccccgccgcagccacttccggcaggcgctgcgctgctggggggcgcgggcraggatggcggcggagaacgaggccagccaggagagcgccctgggcgcctactcgccagtggactacatgagcatcaccagcttcccgcggctgcccgaggacgagccggcgcccgcggccccgctgaggggccgcaaggacgaggacgcctttctgggagaccccgacaccgacccggactccttcctgaagtctgcacggctgcagcggctgccatcgtcgtcgtcggagatgggcagccaagacgggtcgccgctacgcgagacgcgcaaagacccgttctccgccgcagcggccgagtgctcctgccgccaggatgggctcacggtcatcgtcacggcctgtctcaccttcgctaccggtgtcaccgtggcgctggtcatgcagatctacttcggggacccccagatcttccagcagggtgccgtggtgaccgatgctgcccgctgcacttcactgggcatcgaggtgctcagtaaacagggatcttctgtggacgcagcggtggcagcagccttgtgtttgggtatcgtggctccacacagttctggcctgggcggtgggggcgtgatgctggtacatgacatccgacgaaatgagagccacctaattgatttccgggagtccgcaccaggggccctcagggaagagaccctgcaaagatcctgggagaccaagcctgggctcttggtgggggttcccggaatggtgaaggggctacatgaagctcaccagctctatggcaggctgccatggtcccaagtcctggcctttgcagcagctgtggcccaagatggcttcaacgtgactcatgatctagcccgtgccctggctgaacagctgccacccaacatgtccgagcgcttccgggagacgttcctgccatcgggccgcccgccactacctggctcgttgctgcatcggcccgacctggctgaggtgctggatgtacttggcacctccggcccggctgccttctacgcaggtggcaacctcacactggagatggtggccgaggctcagcacgcagggggtgtcataaccgaagaggacttcagcaattacagygcccttgtggagaagcctgtgtgtggcgtgtacagaggccacctggttcttagtcccccacctccgcacacgggccctgccctcatcagtgctctcaacatcctggagggcttcaatctcaccagcctggtatcccgagaacaggctcttcactgggtggcagagaccctgaagattgcattagccctggccagcagactgggagatcccgtctatgattctaccatcactgagagcatggatgacatgctcagcaaggtggaggccgcctacctccggggccatatcaatgactcccaggcagcccctgccccactcctgcctgtctatgaactagacggagctcccacggctgcccaggtgctgatcatgggacctgatgacttcattgtggccatggttagctccctgaaccagccctttggcagcggccttatcaccccctcggggatcctgctcaacagccagatgctggacttctcctggcccaaccggacagctaaccactctgcacccagcctggagaattcagtgcagccagggaagcggccactctctttcctgctgcccacagtggtccgacccgcggaggggctctgtggaacctacctcgctctgggggccaatggagctgcgcrgggcctcagcggcctgacacaggttctgctgaatgtcctgaccttgaaccggaacctgagtgacagcctggcccgcggccgcctacacccggacctgcagtccaacctcctgcaggtggacagtgagtgcagagcagagacctcgtggggcgggcacagggacaggtagagaaaggactcctcccaagggtgcccatgcctcaaccagcaccaactgccagtgaagtttggttttatttggcaaatttctattggagcagtgaaygatctggggattggaaccagtcttgccatttcctggttgtgtggccttgggaaatccatgtctcaactctgagcctcagttttctcatttgtaaaataagacacagttgttcattcttcaaactttcatttac

SEQ ID NO: 6462 - DNA, 2273 bp, Homo sapiens
tccgccctcccactcccccgccgcagccacttccggcaggcgctgcgctgctggggggcgcgggcraggatggcggcggagaacgaggccagccaggagagcgccctgggcgcctactcgccagtggactacatgagcatcaccagcttcccgcggctgcccgaggacgagccggcgcccgcggccccgctgaggggccgcaaggacgaggacgcctttctgggagaccccgacaccgacccggactccttcctgaagtctgcacggctgcagcggctgccatcgtcgtcgtcggagatgggcagccaagacgggtcgccgctacgcgagacgcgcaaagacccgttctccgccgcagcggccgagtgctcctgccgccaggatgggctcacggtcatcgtcacggcctgtctcaccttcgctaccggtgtcaccgtggcgctggtcatgcagatctacttcggggacccccagatcttccagcagggtgccgtggtgaccgatgctgcccgctgcacttcactgggcatcgaggtgctcagtaaacagggatcttctgtggacgcagcggtggcagcagccttgtgtttgggtatcgtggctccacacagttctggcctgggcggtgggggcgtgatgctggtacatgacatccgacgaaatgagagccacctaattgatttccgggagtccgcaccaggggccctcagggaagagaccctgcaaagatcctgggagaccaaggtggggaccctgcctgggctcttggtgggggttcccggaatggtgaaggggctacatgaagctcaccagctctatggcaggctgccatggtcccaagtcctggcctttgcagcagctgtggcccaagatggcttcaacgtgactcatgatctagcccgtgccctggctgaacagctgccacccaacatgtccgagcgcttccgggagacgttcctgccatcgggccgcccgccactacctggctcgttgctgcatcggcccgacctggctgaggtgctggatgtacttggcacctccggcccggctgccttctacgcaggtggcaacctcacactggagatggtggccgaggctcagcacgcagggggtgtcataaccgaagaggacttcagcaattacagygcccttgtggagaagcctgtgtgtggcgtgtacagaggccacctggttcttagtcccccacctccgcacacgggccctgccctcatcagtgctctcaacatcctggagggcttcaatctcaccagcctggtatcccgagaacaggctcttcactgggtggcagagaccctgaagattgcattagccctggccagcagactgggagatcccgtctatgattctaccatcactgagagcatggatgacatgctcagcaaggtggaggccgcctacctccggggccatatcaatgactcccaggcagcccctgccccactcctgcctgtctatgaactagacggagctcccacggctgcccaggtgctgatcatgggacctgatgacttcattgtggccatggttagctccctgaaccagccctttggcagcggccttatcaccccctcggggatcctgctcaacagccagatgctggacttctcctggcccaaccggacagctaaccactctgcacccagcctggagaattcagtgcagccagggaagcggccactctctttcctgctgcccacagtggtccgacccgcggaggggctctgtggaacctacctcgctctgggggccaatggagctgcgcrgggcctcagcggcctgacacaggttctgctgaatgtcctgaccttgaaccggaacctgagtgacagcctggcccgcggccgcctacacccggacctgcagtccaacctcctgcaggtggacagtgagttcacagaggaagagattgagttcctggaagccaggggtcaccacgtggagaaagtagatgtcttatcctgggtccatggcagccgaaggaccaacaacttcatcatcgctgttaaggaccctcggagcccagatgcagctggagccaccatcctgtagagcagcggggtggggcggggtctctgctcccccactttgcatgttcccagagtccctccttctcccaggtttggtctcagggggaccccagggatgccccagatcaggggccagaggggatgcttagcaaacccaatcccagagtaactggaaaattctccatcaggaggcctgtggtggtggtggtggtggtggtggtggtg

SEQ ID NO: 6463 - DNA, 2389 bp, Homo sapiens
tccgccctcccactcccccgccgcagccacttccggcaggcgctgcgctgctggggggcgcgggcraggatggcggcggagaacgaggccagccaggagagcgccctgggcgcctactcgccagtggactacatgagcatcaccagcttcccgcggctgcccgaggacgagccggcgcccgcggccccgctgaggggccgcaaggacgaggacgcctttctgggagaccccgacaccgacccggactccttcctgaagtctgcacggctgcagcggctgccatcgtcgtcgtcggagatgggcagccaagacgggtcgccgctacgcgagacgcgcaaagacccgttctccgccgcagcggccgagtgctcctgccgccaggatgggctcacggtcatcgtcacggcctgtctcaccttcgctaccggtgtcaccgtggcgctggtcatgcagatctacttcggggacccccagatcttccagcagggtgccgtggtgaccgatgctgcccgctgcacttcactgggcatcgaggtgctcagtaaacagggatcttctgtggacgcagcggtggcagcagccttgtgtttgggtatcgtggctccacacagttctggcctgggcggtgggggcgtgatgctggtacatgacatccgacgaaatgagagccacctaattgatttccgggagtccgcaccaggggccctcagggaagagaccctgcaaagatcctgggagaccaaggtggggaccctgcctgggctcttggtgggggttcccggaatggtgaaggggctacatgaagctcaccagctctatggcaggctgccatggtcccaagtcctggcctttgcagcagctgtggcccaagatggcttcaacgtgactcatgatctagcccgtgccctggctgaacagctgccacccaacatgtccgagcgcttccgggagacgttcctgccatcgggccgcccgccactacctggctcgttgctgcatcggcccgacctggctgaggtgctggatgtacttggcacctccggcccggctgccttctacgcaggtggcaacctcacactggagatggtggccgaggctcagcacgcagggggtgtcataaccgaagaggacttcagcaattacagygcccttgtggagaagcctgtgtgtggcgtgtacagaggccacctggttcttagtcccccacctccgcacacgggccctgccctcatcagtgctctcaacatcctggagggcttcaatctcaccagcctggtatcccgagaacaggctcttcactgggtggcagagaccctgaagattgcattagccctggccagcagactgggagatcccgtctatgattctaccatcactgagagcatggatgacatgctcagcaaggtggaggccgcctacctccggggccatatcaatgactcccaggcagcccctgccccactcctgcctgtctatgaactagacggagctcccacggctgcccaggtgctgatcatgggacctgatgacttcattgtggccatggttagctccctgaaccagccctttggcagcggccttatcaccccctcggggatcctgctcaacagccagatgctggacttctcctggcccaaccggacagctaaccactctgcacccagcctggagaattcagtgcagccagggaagcggccactctctttcctgctgcccacagtggtccgacccgcggaggggctctgtggaacctacctcgctctgggggccaatggagctgcgcrgggcctcagcggcctgacacaggttctgctgaatgtcctgaccttgaaccggaacctgagtgacagcctggcccgcggccgcctacacccggacctgcagtccaacctcctgcaggtggacagtgagttcacagaggaagagattgagttcctggaagccaggggtcaccacgtggagaaagtagatgtcttatcctgggtccatggcagccgaaggaccaacaacttcatcatcgctgttaaggaccctcggagcccagatgcagctggagccaccatcctgtagagcagcggggtggggcggggtctctgctcccccactttgcatgttcccagagtccctccttctcccaggtttggtctcagggggaccccagggatgccccagatcaggggccagaggggatgcttagcaaacccaatcccagagtaactggaaaattctccatcaggaggcctgtggtggtggtggtggtggtggtggtggtgtgtcagcatctacagtacagccaggcaggcaggaccttgaggaatcagactatctgtctgtgtgtcacctctcctccttcagccatgctggccccgagcttagggatgtgcttgca

SEQ ID NO: 6464 - DNA, 2377 bp, Homo sapiens
tccgccctcccactcccccgccgcagccacttccggcaggcgctgcgctgctggggggcgcgggcraggatggcggcggagaacgaggccagccaggagagcgccctgggcgcctactcgccagtggactacatgagcatcaccagcttcccgcggctgcccgaggacgagccggcgcccgcggccccgctgaggggccgcaaggacgaggacgcctttctgggagaccccgacaccgacccggactccttcctgaagtctgcacggctgcagcggctgccatcgtcgtcgtcggagatgggcagccaagacgggtcgccgctacgcgagacgcgcaaagacccgttctccgccgcagcggccgagtgctcctgccgccaggatgggctcacggtcatcgtcacggcctgtctcaccttcgctaccggtgtcaccgtggcgctggtcatgcagatctacttcggggacccccagatcttccagcagggtgccgtggtgaccgatgctgcccgctgcacttcactgggcatcgaggtgctcagtaaacagggatcttctgtggacgcagcggtggcagcagccttgtgtttgggtatcgtggctccacacagttctggcctgggcggtgggggcgtgatgctggtacatgacatccgacgaaatgagagccacctaattgatttccgggagtccgcaccaggggccctcagggaagagaccctgcaaagatcctgggagaccaagcctgggctcttggtgggggttcccggaatggtgaaggggctacatgaagctcaccagctctatggcaggctgccatggtcccaagtcctggcctttgcagcagctgtggcccaagatggcttcaacgtgactcatgatctagcccgtgccctggctgaacagctgccacccaacatgtccgagcgcttccgggagacgttcctgccatcgggccgcccgccactacctggctcgttgctgcatcggcccgacctggctgaggtgctggatgtacttggcacctccggcccggctgccttctacgcaggtggcaacctcacactggagatggtggccgaggctcagcacgcagggggtgtcataaccgaagaggacttcagcaattacagygcccttgtggagaagcctgtgtgtggcgtgtacagaggccacctggttcttagtcccccacctccgcacacgggccctgccctcatcagtgctctcaacatcctggagggcttcaatctcaccagcctggtatcccgagaacaggctcttcactgggtggcagagaccctgaagattgcattagccctggccagcagactgggagatcccgtctatgattctaccatcactgagagcatggatgacatgctcagcaaggtggaggccgcctacctccggggccatatcaatgactcccaggcagcccctgccccactcctgcctgtctatgaactagacggagctcccacggctgcccaggtgctgatcatgggacctgatgacttcattgtggccatggttagctccctgaaccagccctttggcagcggccttatcaccccctcggggatcctgctcaacagccagatgctggacttctcctggcccaaccggacagctaaccactctgcacccagcctggagaattcagtgcagccagggaagcggccactctctttcctgctgcccacagtggtccgacccgcggaggggctctgtggaacctacctcgctctgggggccaatggagctgcgcrgggcctcagcggcctgacacaggttctgctgaatgtcctgaccttgaaccggaacctgagtgacagcctggcccgcggccgcctacacccggacctgcagtccaacctcctgcaggtggacagtgagttcacagaggaagagattgagttcctggaagccaggggtcaccacgtggagaaagtagatgtcttatcctgggtccatggcagccgaaggaccaacaacttcatcatcgctgttaaggaccctcggagcccagatgcagctggagccaccatcctgtagagcagcggggtggggcggggtctctgctcccccactttgcatgttcccagagtccctccttctcccaggtttggtctcagggggaccccagggatgccccagatcaggggccagaggggatgcttagcaaacccaatcccagagtaactggaaaattctccatcaggaggcctgtggtggtggtggtggtggtggtggtggtgtgtcagcatctacagtacagccaggcaggcaggaccttgaggaatcagactatctgtctgtgtgtcacctctcctccttcagccatgctggccccgagcttagggatgtgcttgca

SEQ ID NO: 6465 - DNA, 1927 bp, Homo sapiens
cacttccggcaggcgctgcgctgctggggggcgcgggcraggatggcggcggagaacgaggccagccaggagagcgccctgggcgcctactcgccagtggactacatgagcatcaccagcttcccgcggctgcccgaggacgagccggcgcccgcggccccgctgaggggccgcaaggacgaggacgcctttctgggagaccccgacaccgccgggcaccgttgccccgcctgtcctggggtgcacgcgaaaatgaggaaagacccggactccttcctgaagtctgcacggctgcagcggctgccatcgtcgtcgtcggagatgggcagccaagacgggtcgccgctacgcgagacgcgcaaagacccgttctccgccgcagcggccgagtgctcctgccgccaggatgggctcacggtcatcgtcacggcctgtctcaccttcgctaccggtgtcaccgtggcgctggtcatgcagatctacttcggggacccccagatcttccagcagggtgccgtggtgaccgatgctgcccgctgcacttcactgggcatcgaggtgctcagtaaacagggatcttctgtggacgcagcggtggcagcagccttgtgtttgggtatcgtggctccacacagttctggcctgggcggtgggggcgtgatgctggtacatgacatccgacgaaatgagagccacctaattgatttccgggagtccgcaccaggggccctcagggaagagaccctgcaaagatcctgggagaccaagtgacctggtctcctctctccctcgcctacccgccttgcccagcctgggctcttggtgggggttcccggaatggtgaaggggctacatgaagctcaccagctctatggcaggctgccatggtcccaagtcctggcctttgcagcagctgtggcccaagatggcttcaacgtgactcatgatctagcccgtgccctggctgaacagctgccacccaacatgtccgagcgcttccgggagacgttcctgccatcgggccgcccgccactacctggctcgttgctgcatcggcccgacctggctgaggtgctggatgtacttggcacctccggcccggctgccttctacgcaggtggcaacctcacactggagatggtggccgaggctcagcacgcagggggtgtcataaccgaagaggacttcagcaattacagygcccttgtggagaagcctgtgtgtggcgtgtacagaggccacctggttcttagtcccccacctccgcacacgggccctgccctcatcagtgctctcaacatcctggagggcttcaatctcaccagcctggtatcccgagaacaggctcttcactgggtggcagagaccctgaagattgcattagccctggccagcagactgggagatcccgtctatgattctaccatcactgagagcatggatgacatgctcagcaaggtggaggccgcctacctccggggccatatcaatgactcccaggcagcccctgccccactcctgcctgtctatgaactagacggagctcccacggctgcccaggtgctgatcatgggacctgatgacttcattgtggccatggttagctccctgaaccagccctttggcagcggccttatcaccccctcggggatcctgctcaacagccagatgctggacttctcctggcccaaccggacagctaaccactctgcacccagcctggagaattcagtgcagccagggaagcggccactctctttcctgctgcccacagtggtccgacccgcggaggggctctgtggaacctacctcgctctgggggccaatggagctgcgcrgggcctcagcggcctgacacagcatctgaatagacaaccagccctctttagggtgggatttgaaaggaagggcctgcttttctccagaa

SEQ ID NO: 6466 - DNA, 2751 bp, Homo sapiens
agttcggcctgttttctcagtcccggcacccgccgcgaccgcaaaggcggccgcggttctaggaacttgacgtgatggggcttcctgaggagcgggtccggagcggcagcgggagccggggccaggaggaagctggagccggaggccgggcgcggagttggtctccgccgcccgaggtcagccgctccgcgcacgtcccctcgctgcagcgctaccgcgagctgcaccggcgctccgtggaggagccgcgggaattctggggagacattgccaaggaattttactggaagactccatgccctggcccattccttcggtacaactttgatgtgactaaagggaaaatcttyattgagtggatgaaaggagcaactaccaacatctgctacaatgtactggatcgaaatgtccatgagaaaaagcttggagataaagttgctttttactgggagggcaatgagccaggggagaccactcagatcacataccatcagcttctggtccaagtgtgtcagttcagcaatgttctccgaaaacagggcattcagaagggggaccgagtggccatctacatgcctatgatcccagagcttgtggtggccatgctggcatgtgcccgcattggggctttgcactccattgtgtttgcaggcttctcttcagagtctctatgtgaacggatcttggattccagctgcagtcttctcatcactacagatgccttctacaggggggaaaagcttgtgaacctgaaggagctggctgacgaggccctgcagaagtgtcaggagaagggtttcccagtaagatgctgcattgtggtcaagcacctggggcgggcagagctcggcatgggtgactccaccagccagtcccccccaattaaraggtcatgcccagatgtgcagggtgtggttcacacagttgggggctacatgctctatgtagccacaaccttcaagtatgtgtttgacttccatgcagaggatgtgttctggtgcacggcagacattggttggatcactggtcattcctacgtcacctatgggccactggccaatggtgccaccagtgttttgtttgaggggattcccacrtatccggacgtgaaccgcctgtggagcattgtggacaaatacaaggtgaccaagttctacacagcacccacagccatccgtctgctcatgaagtttggagatgagcctgtcaccaagcatagccgggcatccttgcaggtgttaggcacagtgggtgaacccatcaaccctgaggcctggctatggtaccaccgggtggtaggtgcccagcgctgccccatcgtggacaccttctggcaaacagagacaggtggccacatgttgactccccttcctggtgccacacccatgaaacccggttctgctactttcccattctttggtgtagctcctgcaatcctgaatgagtccggggaagagttggaaggtgaagctgaaggttatctggtgttcaagcagccctggccagggatcatgcgcacagtctatgggaaccacgaacgctttgagacaacctactttaagaagtttcctggatactatgttacaggagatggctgccagcgggaccaggatggctattactggatcactggcaggattgatgacatgctcaatgtatctggacacctgctgagtacagcagaggtggagtcagcacttgtggaacatgaggctgttgcagaggcagctgtggtggsccaccctcatcctgtgaagggtgaatgcctctactgctttgtcaccttgtgtgatggccacaccttcagccccaagctcacygaggagctcaagaagcagattagagaaaagattggccccattgccacaccagactacatccagaatgcacctggcttgcctaaaacccgctcagggaaaatcatgaggcgagtgcttcggaagattgctcagaatgaccatgacctcggggacatgtctactgtggctgacccatctgtcatcagtcacctcttcagccaccgctgcctgaccatccagtgaacatgatcctgacctttacctaggattcctcctgctccaaactttgcccatcctctttgccccctcaggagtgctgagggccagtgttgacccacactaccctcccttgaccagctgtctgggaccggaaaccagctttgtctccaggtagagacaacatcctgtgactgccaggcagaaaggacagggcccaggtcagcctcagtctgctgtgcctccagactgcagagctctcagaacccagaacagagacgaaaaggctacctctcctacccaagttaagtgttcaaaggggatgtgagggcctccactgaagcagggaggcagctgtgtaatcctatgtcagctctcttaggaagccccagtacttatattgggcatgcacttgcccttaaaaacaatgatttgtgagtccaggaayaatttactatttttaaaatattttgctgcttctgttctgggtctgaattcccttttgtgccagatgccaattcagtctccagagggtattcagatcatctgcttctttgaaggagtaaatgtgttttgttcctagggccagaggagcttgtcttccttgtcctctgttcccaccctcccctgaacagaacccagcccataagagacattytcagatgaaactctgttttcttgccccagtcaggctcaagccctgtggttgtaggaataaagcctgtgatctcaagaa

SEQ ID NO: 6467 - DNA, 2928 bp, Homo sapiens
agttcggcctgttttctcagtcccggcacccgccgcgaccgcaaaggcggccgcggttctaggaacttgacgtgatggggcttcctgaggagcgggtccggagcggcagcgggagccggggccaggaggaagctggagccggaggccgggcgcggagttggtctccgccgcccgaggtcagccgctccgcgcacgtcccctcgctgcagcgctaccgcgagctgcaccggcgctccgtggaggagccgcgggaattctggggagacattgccaaggaattttactggaagactccatgccctggcccattccttcggtacaactttgatgtgactaaagggaaaatcttyattgagtggatgaaaggagcaactaccaacatctgctacaatgtactggatcgaaatgtccatgagaaaaagcttggagataaagttgctttttactgggagggcaatgagccaggggagaccactcagatcacataccatcagcttctggtccaagtgtgtcagttcagcaatgttctccgaaaacagggcattcagaagggggaccgagtggccatctacatgcctatgatcccagagcttgtggtggccatgctggcatgtgcccgcattggggctttgcactccattgtgtttgcaggcttctcttcagagtctctatgtgaacggatcttggattccagctgcagtcttctcatcactacagatgccttctacaggggggaaaagcttgtgaacctgaaggagctggctgacgaggccctgcagaagtgtcaggagaagggtttcccagtaagatgctgcattgtggtcaagcacctggggcgggcagagctcggcatgggtgactccaccagccagtcccccccaattaaraggtcatgcccagatgtgcagatctcatggaaccaagggattgacttgtggtggcatgagctcatgcaagaggcaggggatgagtgtgagcccgagtggtgtgatgccgaggacccactcttcatcctgtacaccagtggctccacaggcaaacccaagggtgtggttcacacagttgggggctacatgctctatgtagccacaaccttcaagtatgtgtttgacttccatgcagaggatgtgttctggtgcacggcagacattggttggatcactggtcattcctacgtcacctatgggccactggccaatggtgccaccagtgttttgtttgaggggattcccacrtatccggacgtgaaccgcctgtggagcattgtggacaaatacaaggtgaccaagttctacacagcacccacagccatccgtctgctcatgaagtttggagatgagcctgtcaccaagcatagccgggcatccttgcaggtgttaggcacagtgggtgaacccatcaaccctgaggcctggctatggtaccaccgggtggtaggtgcccagcgctgccccatcgtggacaccttctggcaaacagagacaggtggccacatgttgactccccttcctggtgccacacccatgaaacccggttctgctactttcccattctttggtgtagctcctgcaatcctgaatgagtccggggaagagttggaaggtgaagctgaaggttatctggtgttcaagcagccctggccagggatcatgcgcacagtctatgggaaccacgaacgctttgagacaacctactttaagaagtttcctggatactatgttacaggagatggctgccagcgggaccaggatggctattactggatcactggcaggattgatgacatgctcaatgtatctggacacctgctgagtacagcagaggtggagtcagcacttgtggaacatgaggctgttgcagaggcagctgtggtggsccaccctcatcctgtgaagggtgaatgcctctactgctttgtcaccttgtgtgatggccacaccttcagccccaagctcacygaggagctcaagaagcagattagagaaaagattggccccattgccacaccagactacatccagaatgcacctggcttgcctaaaacccgctcagggaaaatcatgaggcgagtgcttcggaagattgctcagaatgaccatgacctcggggacatgtctactgtggctgacccatctgtcatcagtcacctcttcagccaccgctgcctgaccatccagtgaacatgatcctgacctttacctaggattcctcctgctccaaactttgcccatcctctttgccccctcaggagtgctgagggccagtgttgacccacactaccctcccttgaccagctgtctgggaccggaaaccagctttgtctccaggtagagacaacatcctgtgactgccaggcagaaaggacagggcccaggtcagcctcagtctgctgtgcctccagactgcagagctctcagaacccagaacagagacgaaaaggctacctctcctacccaagttaagtgttcaaaggggatgtgagggcctccactgaagcagggaggcagctgtgtaatcctatgtcagctctcttaggaagccccagtacttatattgggcatgcacttgcccttaaaaacaatgatttgtgagtccaggaayaatttactatttttaaaatattttgctgcttctgttctgggtctgaattcccttttgtgccagatgccagtactgtctgcccattggctccaggggctgtatgggcagattcagtctccagagggtattcagatcatctgcttctttgaaggagtaaatgtgttttgttcctagggccagaggagcttgtcttccttgtcctctgttcccaccctcccctgaacagaacccagcccataagagacattytcagatgaaactctgttttcttgccccagtcaggctcaagccctgtggttgtaggaataaagcctgtgatctcaagaa

SEQ ID NO: 6468 - DNA, 2790 bp, Homo sapiens
agttcggcctgttttctcagtcccggcacccgccgcgaccgcaaaggcggccgcggttctaggaacttgacgtgatggggcttcctgaggagcgggtccggagcggcagcgggagccggggccaggaggaagctggagccggaggccgggcgcggagttggtctccgccgcccgaggtcagccgctccgcgcacgtcccctcgctgcagcgctaccgcgagctgcaccggcgctccgtggaggagccgcgggaattctggggagacattgccaaggaattttactggaagactccatgccctggcccattccttcggtacaactttgatgtgactaaagggaaaatcttyattgagtggatgaaaggagcaactaccaacatctgctacaatgtactggatcgaaatgtccatgagaaaaagcttggagataaagttgctttttactgggagggcaatgagccaggggagaccactcagatcacataccatcagcttctggtccaagtgtgtcagttcagcaatgttctccgaaaacagggcattcagaagggggaccgagtggccatctacatgcctatgatcccagagcttgtggtggccatgctggcatgtgcccgcattggggctttgcactccattgtgtttgcaggcttctcttcagagtctctatgtgaacggatcttggattccagctgcagtcttctcatcactacagatgccttctacaggggggaaaagcttgtgaacctgaaggagctggctgacgaggccctgcagaagtgtcaggagaagggtttcccagtaagatgctgcattgtggtcaagcacctggggcgggcagagctcggcatgggtgactccaccagccagtcccccccaattaaraggtcatgcccagatgtgcagggtgtggttcacacagttgggggctacatgctctatgtagccacaaccttcaagtatgtgtttgacttccatgcagaggatgtgttctggtgcacggcagacattggttggatcactggtcattcctacgtcacctatgggccactggccaatggtgccaccagtgttttgtttgaggggattcccacrtatccggacgtgaaccgcctgtggagcattgtggacaaatacaaggtgaccaagttctacacagcacccacagccatccgtctgctcatgaagtttggagatgagcctgtcaccaagcatagccgggcatccttgcaggtgttaggcacagtgggtgaacccatcaaccctgaggcctggctatggtaccaccgggtggtaggtgcccagcgctgccccatcgtggacaccttctggcaaacagagacaggtggccacatgttgactccccttcctggtgccacacccatgaaacccggttctgctactttcccattctttggtgtagctcctgcaatcctgaatgagtccggggaagagttggaaggtgaagctgaaggttatctggtgttcaagcagccctggccagggatcatgcgcacagtctatgggaaccacgaacgctttgagacaacctactttaagaagtttcctggatactatgttacaggagatggctgccagcgggaccaggatggctattactggatcactggcaggattgatgacatgctcaatgtatctggacacctgctgagtacagcagaggtggagtcagcacttgtggaacatgaggctgttgcagaggcagctgtggtggsccaccctcatcctgtgaagggtgaatgcctctactgctttgtcaccttgtgtgatggccacaccttcagccccaagctcacygaggagctcaagaagcagattagagaaaagattggccccattgccacaccagactacatccagaatgcacctggcttgcctaaaacccgctcagggaaaatcatgaggcgagtgcttcggaagattgctcagaatgaccatgacctcggggacatgtctactgtggctgacccatctgtcatcagtcacctcttcagccaccgctgcctgaccatccagtgaacatgatcctgacctttacctaggattcctcctgctccaaactttgcccatcctctttgccccctcaggagtgctgagggccagtgttgacccacactaccctcccttgaccagctgtctgggaccggaaaccagctttgtctccaggtagagacaacatcctgtgactgccaggcagaaaggacagggcccaggtcagcctcagtctgctgtgcctccagactgcagagctctcagaacccagaacagagacgaaaaggctacctctcctacccaagttaagtgttcaaaggggatgtgagggcctccactgaagcagggaggcagctgtgtaatcctatgtcagctctcttaggaagccccagtacttatattgggcatgcacttgcccttaaaaacaatgatttgtgagtccaggaayaatttactatttttaaaatattttgctgcttctgttctgggtctgaattcccttttgtgccagatgccagtactgtctgcccattggctccaggggctgtatgggcagattcagtctccagagggtattcagatcatctgcttctttgaaggagtaaatgtgttttgttcctagggccagaggagcttgtcttccttgtcctctgttcccaccctcccctgaacagaacccagcccataagagacattytcagatgaaactctgttttcttgccccagtcaggctcaagccctgtggttgtaggaataaagcctgtgatctcaagaa

SEQ ID NO: 6469 - DNA, 2895 bp, Homo sapiens
agttcggcctgttttctcagtcccggcacccgccgcgaccgcaaaggcggccgcggttctaggaacttgacgtgatggggcttcctgaggagcgggtccggagcggcagcgggagccggggccaggaggaagctggagccggaggccgggcgcggagttggtctccgccgcccgaggtcagccgctccgcgcacgtcccctcgctgcagcgctaccgcgagctgcaccggcgctccgtggaggagccgcgggaattctggggagacattgccaaggaattttactggaagactccatgccctggcccattccttcggtacaactttgatgtgactaaagggaaaatcttyattgagtggatgaaaggagcaactaccaacatctgctacaatgtactggatcgaaatgtccatgagaaaaagcttggagataaagttgctttttactgggagggcaatgagccaggggagaccactcagatcacataccatcagcttctggtccaagtgtgtcagttcagcaatgttctccgaaaacagggcattcagaagggggaccgagtggccatctacatgcctatgatcccagagcttgtggtggccatgctggcatgtgcccgcattggggctttgcactccattgtgtttgcaggcttctcttcagagtctctatgtgaacggatcttggattccagctgcagtcttctcatcactacagatgccttctacaggggggaaaagcttgtgaacctgaaggagctggctgacgaggccctgcagaagtgtcaggagaagggtttcccagtaagatgctgcattgtggtcaagcacctggggcgggcagagctcggcatgggtgactccaccagccagtcccccccaattaaraggtcatgcccagatgtgcagatctcatggaaccaagggattgacttgtggtggcatgagctcatgcaagaggcaggggatgagtgtgagcccgagtggtgtgatgccgaggacccactcttcatcctgtacaccagtggctccacaggcaaacccaaggcaagtggtgtggttcacacagttgggggctacatgctctatgtagccacaaccttcaagtatgtgtttgacttccatgcagaggatgtgttctggtgcacggcagacattggttggatcactggtcattcctacgtcacctatgggccactggccaatggtgccaccagtgttttgtttgaggggattcccacrtatccggacgtgaaccgcctgtggagcattgtggacaaatacaaggtgaccaagttctacacagcacccacagccatccgtctgctcatgaagtttggagatgagcctgtcaccaagcatagccgggcatccttgcaggtgttaggcacagtgggtgaacccatcaaccctgaggcctggctatggtaccaccgggtggtaggtgcccagcgctgccccatcgtggacaccttctggcaaacagagacaggtggccacatgttgactccccttcctggtgccacacccatgaaacccggttctgctactttcccattctttggtgtagctcctgcaatcctgaatgagtccggggaagagttggaaggtgaagctgaaggttatctggtgttcaagcagccctggccagggatcatgcgcacagtctatgggaaccacgaacgctttgagacaacctactttaagaagtttcctggatactatgttacaggagatggctgccagcgggaccaggatggctattactggatcactggcaggattgatgacatgctcaatgtatctggacacctgctgagtacagcagaggtggagtcagcacttgtggaacatgaggctgttgcagaggcagctgtggtggsccaccctcatcctgtgaagggtgaatgcctctactgctttgtcaccttgtgtgatggccacaccttcagccccaagctcacygaggagctcaagaagcagattagagaaaagattggccccattgccacaccagactacatccagaatgcacctggcttgcctaaaacccgctcagggaaaatcatgaggcgagtgcttcggaagattgctcagaatgaccatgacctcggggacatgtctactgtggctgacccatctgtcatcagtcacctcttcagccaccgctgcctgaccatccagtgaacatgatcctgacctttacctaggattcctcctgctccaaactttgcccatcctctttgccccctcaggagtgctgagggccagtgttgacccacactaccctcccttgaccagctgtctgggaccggaaaccagctttgtctccaggtagagacaacatcctgtgactgccaggcagaaaggacagggcccaggtcagcctcagtctgctgtgcctccagactgcagagctctcagaacccagaacagagacgaaaaggctacctctcctacccaagttaagtgttcaaaggggatgtgagggcctccactgaagcagggaggcagctgtgtaatcctatgtcagctctcttaggaagccccagtacttatattgggcatgcacttgcccttaaaaacaatgatttgtgagtccaggaayaatttactatttttaaaatattttgctgcttctgttctgggtctgaattcccttttgtgccagatgccaattcagtctccagagggtattcagatcatctgcttctttgaaggagtaaatgtgttttgttcctagggccagaggagcttgtcttccttgtcctctgttcccaccctcccctgaacagaacccagcccataagagacattytcagatgaaactctgttttcttgccccagtcaggctcaagccctgtggttgtaggaataaagcctgtgatctcaagaa

SEQ ID NO: 6470 - DNA, 2928 bp, Homo sapiens
agttcggcctgttttctcagtcccggcacccgccgcgaccgcaaaggcggccgcggttctaggaacttgacgtgatggggcttcctgaggagcgggtccggagcggcagcgggagccggggccaggaggaagctggagccggaggccgggcgcggagttggtctccgccgcccgaggtcagccgctccgcgcacgtcccctcgctgcagcgctaccgcgagctgcaccggcgctccgtggaggagccgcgggaattctggggagacattgccaaggaattttactggaagactccatgccctggcccattccttcggtacaactttgatgtgactaaagggaaaatcttyattgagtggatgaaaggagcaactaccaacatctgctacaatgtactggatcgaaatgtccatgagaaaaagcttggagataaagttgctttttactggtccacttctggtaattcatcctacagatatacttgcagggagggcaatgagccaggggagaccactcagatcacataccatcagcttctggtccaagtgtgtcagttcagcaatgttctccgaaaacagggcattcagaagggggaccgagtggccatctacatgcctatgatcccagagcttgtggtggccatgctggcatgtgcccgcattggggctttgcactccattgtgtttgcaggcttctcttcagagtctctatgtgaacggatcttggattccagctgcagtcttctcatcactacagatgccttctacaggggggaaaagcttgtgaacctgaaggagctggctgacgaggccctgcagaagtgtcaggagaagggtttcccagtaagatgctgcattgtggtcaagcacctggggcgggcagagctcggcatgggtgactccaccagccagtcccccccaattaaraggtcatgcccagatgtgcagatctcatggaaccaagggattgacttgtggtggcatgagctcatgcaagaggcaggggatgagtgtgagcccgagtggtgtgatgccgaggacccactcttcatcctgtacaccagtggctccacaggcaaacccaagggtgtggttcacacagttgggggctacatgctctatgtagccacaaccttcaagtatgtgtttgacttccatgcagaggatgtgttctggtgcacggcagacattggttggatcactggtcattcctacgtcacctatgggccactggccaatggtgccaccagtgttttgtttgaggggattcccacrtatccggacgtgaaccgcctgtggagcattgtggacaaatacaaggtgaccaagttctacacagcacccacagccatccgtctgctcatgaagtttggagatgagcctgtcaccaagcatagccgggcatccttgcaggtgttaggcacagtgggtgaacccatcaaccctgaggcctggctatggtaccaccgggtggtaggtgcccagcgctgccccatcgtggacaccttctggcaaacagagacaggtggccacatgttgactccccttcctggtgccacacccatgaaacccggttctgctactttcccattctttggtgtagctcctgcaatcctgaatgagtccggggaagagttggaaggtgaagctgaaggttatctggtgttcaagcagccctggccagggatcatgcgcacagtctatgggaaccacgaacgctttgagacaacctactttaagaagtttcctggatactatgttacaggagatggctgccagcgggaccaggatggctattactggatcactggcaggattgatgacatgctcaatgtatctggacacctgctgagtacagcagaggtggagtcagcacttgtggaacatgaggctgttgcagaggcagctgtggtggsccaccctcatcctgtgaagggtgaatgcctctactgctttgtcaccttgtgtgatggccacaccttcagccccaagctcacygaggagctcaagaagcagattagagaaaagattggccccattgccacaccagactacatccagaatgcacctggcttgcctaaaacccgctcagggaaaatcatgaggcgagtgcttcggaagattgctcagaatgaccatgacctcggggacatgtctactgtggctgacccatctgtcatcagtcacctcttcagccaccgctgcctgaccatccagtgaacatgatcctgacctttacctaggattcctcctgctccaaactttgcccatcctctttgccccctcaggagtgctgagggccagtgttgacccacactaccctcccttgaccagctgtctgggaccggaaaccagctttgtctccaggtagagacaacatcctgtgactgccaggcagaaaggacagggcccaggtcagcctcagtctgctgtgcctccagactgcagagctctcagaacccagaacagagacgaaaaggctacctctcctacccaagttaagtgttcaaaggggatgtgagggcctccactgaagcagggaggcagctgtgtaatcctatgtcagctctcttaggaagccccagtacttatattgggcatgcacttgcccttaaaaacaatgatttgtgagtccaggaayaatttactatttttaaaatattttgctgcttctgttctgggtctgaattcccttttgtgccagatgccaattcagtctccagagggtattcagatcatctgcttctttgaaggagtaaatgtgttttgttcctagggccagaggagcttgtcttccttgtcctctgttcccaccctcccctgaacagaacccagcccataagagacattytcagatgaaactctgttttcttgccccagtcaggctcaagccctgtggttgtaggaataaagcctgtgatctcaagaa

SEQ ID NO: 6471 - DNA, 2932 bp, Homo sapiens
agttcggcctgttttctcagtcccggcacccgccgcgaccgcaaaggcggccgcggttctaggaacttgacgtgatggggcttcctgaggagcgggtccggagcggcagcgggagccggggccaggaggaagctggagccggaggccgggcgcggagttggtctccgccgcccgaggtcagccgctccgcgcacgtcccctcgctgcagcgctaccgcgagctgcaccggcgctccgtggaggagccgcgggaattctggggagacattgccaaggaattttactggaagactccatgccctggcccattccttcggtacaactttgatgtgactaaagggaaaatcttyattgagtggatgaaaggagcaactaccaacatctgctacaatgtactggatcgaaatgtccatgagaaaaagcttggagataaagttgctttttactgggagggcaatgagccaggggagaccactcagatcacataccatcagcttctggtccaagtgtgtcagttcagcaatgttctccgaaaacagggcattcagaagggggaccgagtggccatctacatgcctatgatcccagagcttgtggtggccatgctggcatgtgcccgcattggggctttgcactccattgtgtttgcaggcttctcttcagagtctctatgtgaacggatcttggattccagctgcagtcttctcatcactacagatgccttctacaggggggaaaagcttgtgaacctgaaggagctggctgacgaggccctgcagaagtgtcaggagaagggtttcccagtaagatgctgcattgtggtcaagcacctggggcgggcagagctcggcatgggtgactccaccagccagtcccccccaattaaraggtcatgcccagatgtgcagatctcatggaaccaagggattgacttgtggtggcatgagctcatgcaagaggcaggggatgagtgtgagcccgagtggtgtgatgccgaggacccactcttcatcctgtacaccagtggctccacaggcaaacccaaggcaaggtgtggttcacacagttgggggctacatgctctatgtagccacaaccttcaagtatgtgtttgacttccatgcagaggatgtgttctggtgcacggcagacattggttggatcactggtcattcctacgtcacctatgggccactggccaatggtgccaccagtgttttgtttgaggggattcccacrtatccggacgtgaaccgcctgtggagcattgtggacaaatacaaggtgaccaagttctacacagcacccacagccatccgtctgctcatgaagtttggagatgagcctgtcaccaagcatagccgggcatccttgcaggtgttaggcacagtgggtgaacccatcaaccctgaggcctggctatggtaccaccgggtggtaggtgcccagcgctgccccatcgtggacaccttctggcaaacagagacaggtggccacatgttgactccccttcctggtgccacacccatgaaacccggttctgctactttcccattctttggtgtagctcctgcaatcctgaatgagtccggggaagagttggaaggtgaagctgaaggttatctggtgttcaagcagccctggccagggatcatgcgcacagtctatgggaaccacgaacgctttgagacaacctactttaagaagtttcctggatactatgttacaggagatggctgccagcgggaccaggatggctattactggatcactggcaggattgatgacatgctcaatgtatctggacacctgctgagtacagcagaggtggagtcagcacttgtggaacatgaggctgttgcagaggcagctgtggtggsccaccctcatcctgtgaagggtgaatgcctctactgctttgtcaccttgtgtgatggccacaccttcagccccaagctcacygaggagctcaagaagcagattagagaaaagattggccccattgccacaccagactacatccagaatgcacctggcttgcctaaaacccgctcagggaaaatcatgaggcgagtgcttcggaagattgctcagaatgaccatgacctcggggacatgtctactgtggctgacccatctgtcatcagtcacctcttcagccaccgctgcctgaccatccagtgaacatgatcctgacctttacctaggattcctcctgctccaaactttgcccatcctctttgccccctcaggagtgctgagggccagtgttgacccacactaccctcccttgaccagctgtctgggaccggaaaccagctttgtctccaggtagagacaacatcctgtgactgccaggcagaaaggacagggcccaggtcagcctcagtctgctgtgcctccagactgcagagctctcagaacccagaacagagacgaaaaggctacctctcctacccaagttaagtgttcaaaggggatgtgagggcctccactgaagcagggaggcagctgtgtaatcctatgtcagctctcttaggaagccccagtacttatattgggcatgcacttgcccttaaaaacaatgatttgtgagtccaggaayaatttactatttttaaaatattttgctgcttctgttctgggtctgaattcccttttgtgccagatgccagtactgtctgcccattggctccaggggctgtatgggcagattcagtctccagagggtattcagatcatctgcttctttgaaggagtaaatgtgttttgttcctagggccagaggagcttgtcttccttgtcctctgttcccaccctcccctgaacagaacccagcccataagagacattytcagatgaaactctgttttcttgccccagtcaggctcaagccctgtggttgtaggaataaagcctgtgatctcaagaa

SEQ ID NO: 6472 - DNA, 2313 bp, Homo sapiens
tgagactcctggggccacgccttgtgaaattctgaggcttcttttcagggatcgaaatcccctccggctccgccctgcgcgttgggccccgccccagcgggtcatgaatatgcaagtgmgaggaagatatttaaaggcgtcggcgccacgcgcatatccctgctcggcgctgcccgcccagttcctgttcccagactgaggcccagcccccttcgcccgtttccatcacgagtgccgccagcatgtctgacaaactgccctacaaagtcgccgacatcggcctggctgcctggggacgcaaggccctggacattgctgagaacgagatgccgggcctgatgcgtatgcgggagyggtactcggcctccaagccactgaagggcgcccgcatcgctggctgcctgcacatgaccgtggagacggccgtcctcattgagaccctcgtcaccctgggtgctgaggtgcagtggtccagctgcaacatcttctccacccaggaccatgcggcggctgccattgccaaggctggcattccggtgtatgcctggaagggcgaaacggacgaggagtacctgtggtgcattgagcagaccctgtacttcaaggacrggcccctcaacatgattctggacgacgggggcgacctcaccaacctcatccacaccaagtacccgcagcttctgccaggcatccgaggcatctctgaggagaccacgactggggtccacaacctctacaagatgatggccaatgggatcctcaaggtgcctgccatcaatgtcaatgactccgtcaccaagagcaagtttgacaacctctatggctgccgggagtccctcatagatggcatcaagcgggccacagatgtgatgattgccggcaaggtagcggtggtagcaggctatggtgatgtgggcaagggctgtgcccaggccctgcggggtttcggagcccgcgtcatcatcaccgagattgaccccatcaacgcactgcaggctgccatggagggctatgaggtgaccaccatggatgaggcctgtcaggagggcaacatctttgtcaccaccacaggctgtattgacatcatccttggccggcactttgagcagatgaaggatgatgccattgtgtgtaacattggacactttgacgtggagatcgatgtcaagtggctcaacgagaacgccgtggagaaggtgaacatcaagccgcaggtggaccggtatcggttgaagaatgggcgccgcatcatcctgctggccgagggtcggctggtcaacctgggttgtgccatgggccaccccagcttcgtgatgagtaactccttcaccaaccaggtgatggcgcagatcgagctgtggacccatccagacaagtaccccgttggggttcatttcctgcccaagaagctggatgaggcagtggctgaagcccacctgggcaagctgaatgtgaagttgaccaagctaactgagaagcaagcccagtacctgggcatgtcctgtgatggccccttcaagccggatcactaccgctactgagagccaggtctgcgtttcaccctccagctgctgtccttgcccaggccccacctctcctccctaagagctaatggcaccaactttgtgattggtttgtcagtgtcccccatcgactctctggggctgatcacttagtttttggcctctgctgcagccgtcatactgttccaaatgtggcagcgggaacagagtaccctcttcaagccccggtcatgatggaggtcccagccacagggaaccatgagctcagtggtcttggaacagctcactaagtcagtccttccttagcctggaagtcagkagtggagtcacaaagcccatgtgttttgccatctaggccttcacctggtctgtggacttatacctgtgtgcttggtttacaggtccagtggttcttcagcccatgacagatgagaaggggctatattgaagggcaaagaggaactgttgtttgaattttcctgagagcctggcttagtgctgggccttctcttaaacctcattacaatgaggttagtacttttagtccctgttttacaggggttagaatagactgttaaggggcaactgmgaaagamsasagaaktgacagctaggggttgagaggggccagaaamacatgaatgcaggcagatttcgtgaaatctgccaccmctttataaccagatggttcctttcwcaaccctgggtcaaaaagagaataatttggcctataatgttaaaagaaagcaggaaggtgggtaaataaaaatcttggtgcctggaagaattt

SEQ ID NO: 6473 - DNA, 1881 bp, Homo sapiens
tgagactcctggggccacgccttgtgaaattctgaggcttcttttcagggatcgaaatcccctccggctccgccctgcgcgttgggccccgccccagcgggtcatgaatatgcaagtgmgaggaagatatttaaaggcgtcggcgccacgcgcatatccctgctcggcgctgcccgcccagttcctgttcccagactgaggcccagcccccttcgcccgtttccatcacgagtgccgccagcatgtctgacaaactgccctacaaagtcgccgacatcggcctggctgcctggggacgcaaggccctggacattgctgagaacgagatgccgggcctgatgcgtatgcgggagyggtactcggcctccaagccactgaagggcgcccgcatcgctggctgcctgcacatgaccgtggagacggccgtcctcattgagaccctcgtcaccctgggtgctgaggtgcagtggtccagctgcaacatcttctccacccaggaccatgcggcggctgccattgccaaggctggcattccggtgtatgcctggaagggcgaaacggacgaggagtacctgtggtgcattgagcagaccctgtacttcaaggacrggcccctcaacatgattctggacgacgggggcgacctcaccaacctcatccacaccaagtacccgcagcttctgccaggcatccgaggcatctctgaggagaccacgactggggtccacaacctctacaagatgatggccaatgggatcctcaaggtgcctgccatcaatgtcaatgactccgtcaccaagagcaagtttgacaacctctatggctgccgggagtccctcatagatggcatcaagcgggccacagatgtgatgattgccggcaaggtagcggtggtagcaggctatggtgatgtgggcaagggctgtgcccaggccctgcggggtttcggagcccgcgtcatcatcaccgagattgaccccatcaacgcactgcaggctgccatggagggctatgaggtgaccaccatggatgaggcctgtcaggagggcaacatctttgtcaccaccacaggctgtattgacatcatccttggccggcactttgagcagatgaaggatgatgccattgtgtgtaacattggacactttgacgtggagatcgatgtcaagtggctcaacgagaacgccgtggagaaggtgaacatcaagccgcaggtggaccggtatcggttgaagaatgggcgccgcatcatcctgctggccgagggtcggctggtcaacctgggttgtgccatgggccaccccagcttcgtgatgagtaactccttcaccaaccaggtgatggcgcagatcgagctgtggacccatccagacaagtaccccgttggggttcatttcctgcccaagaagctggatgaggcagtggctgaagcccacctgggcaagctgaatgtgaagttgaccaagctaactgagaagcaagcccagtacctgggcatgtcctgtgatggccccttcaagccggatcactaccgctactgagagccaggtccagtggttcttcagcccatgacagatgagaaggggctatattgaagggcaaagaggaactgttgtttgaattttcctgagagcctggcttagtgctgggccttctcttaaacctcattacaatgaggttagtacttttagtccctgttttacaggggttagaatagactgttaaggggcaactgmgaaagamsasagaaktgacagctaggggttgagaggggccagaaamacatgaatgcaggcagatttcgtgaaatctgccaccmctttataaccagatggttcctttcwcaaccctgggtcaaaaagagaataatttggcctataa

SEQ ID NO: 6474 - DNA, 6105 bp, Homo sapiens
gacacgcgtggcgcgggccgccgtttccgcaaacagaatcgcgtttggctgtgctgtgttggttcatgaagttttaccatcaattcaagtaatcataaatggcaaattctgcaaaagcagaagaayatgaaaagatgtctcttgaacaggcaaaascgtcagtgaattctgaaacagagtcttcattcaatattaatgaaaacacaacagcttctgggactgggctttctgaaaagacttctgtctgtaggcaagtagacatagcaagaaagagaaaagagtttgaagatgatcttgtaaaggaaagttctagttgtgggaaagacactccatccaagaagagaaaacttgatcctgaaattgtcccagaggaaraagattgtggtgatgctgaaggcaattcaaagaaaagaaaaagagaaactgaggatgttccaaaagataaatcttctactggagatggcactcaaaataagagaaaaatagcacttgaggatgttcctgaaaagcagaaaaatctggaagaaggacacagctcaacagtggctgcccattacaatgaacttcaggaagttggtttggagaagcgtagtcaaagtcgtattttttacctaagaaactttaataattggatgaaaagtgttctcattggagaatttttggaaaaggtacgacagaagaaaaaacgtgatatcactgttttggacctgggatgtggtaaaggtggagatttgctgaaatggaaaaaaggaagaattaacaagctagtttgtactgatattgccgatgtttctgtcaaacagtgtcagcagcggtatgaggacatgaaaaatcgtcgtgatagtgaatatattttcagtgcagaatttataactgctgacagctcaaaggaacttctgattgacaaatttcgtgacccacaaatgtgttttgacatctgcagttgtcagtttgtctgtcattactcatttgagtcttatgagcaggctgacatgatgctgagaaatgcgtgtgagagacttagccctgggggctattttattggtactactcccaatagctttgaattgataagacgccttgaagcttcagaaacagaatcatttggaaatgaaatatatactgtgaaatttcagaagaaaggagattatcctttatttggctgcaaatatgacttcaacttggaaggtgttgtggatgttcctgaattcttggtctattttccattgctaaatgaaatggcaaagaagtacaatatgaaactagtctacaaaaaaacatttctggaattctacgaagaaaagattaagaacaatgaaaataaaatgctcttaaaacgaatgcaggccttggagccatatcctgcaaatgagagttctaaacttgtctctgagaaggtggatgactatgaacatgcagcaaagtacatgaagaacagtcaagtaaggttacctttgggaaccttaagtaaatcagaatgggaagctacaagtatttacttggtgtttgcctttgagaaacagcagtgagcacataggcagtagtcccagaggggccgtgttctgtcctgcacaaatttgaacaactcatctcgatatatttgatatttctctgtctgttgattttaattctaaatgtgcaggatgctgccagaaactccaatgtagaaattcaacatttgctgtctgtgacagatgaacttttgcatgtgtatataagaatgagttgggacctctgtctttaaaaatctatttttaggtaatgttctaagaattccatttgcctctatgatcttagctcataaaaatataatatgacttgataaagcaactaaactcttyccacagtgttcagatttgtcctgtgtgtgtttacagtattcaatttattgcagttatagaattggtcagagagcattttcatagtgtgctcatttctatggttttgttatatagcatttttcaacatttaatggtctgtacagttgaatgtaagtgttcaatatgtattgctgaagttataagtttaaaactcaatttcagatgctcataaaagttacttagctaaaattttagcaatttattgcattttgaaataatcattaacatgctgcaattcaggagctggttagaacattttaagtggcagcatagaattttggaattttggggctttcttttcagaaattgctaccatagtaattaatgtttccagttatcaagattgtgattagacacatttacctttcttcattgaacaaatggtgccatagttatttttctcaaaatttagtgaaaatccctcccatgtagacatgttgcacattttttccaaatttatacatggaactgcagtaggaatattctcaccatctgatgccatgtacccacttcagaaataagcaatacttgttcctctgttacaacctcagcactttgcaccgtaggagccattgttaaagttgtcacttgtgtaactgactgcttttccaaaactggtacttaygtgaactgttgtccttgctttacaccaccatttggaaaacttaccagtttttagatgtagatgtagtgaaaaacttcaagaatgaagcagagcaattgagtattcttttttaaattattaagccatgatttacaaaaacattactttctgtaattcacaatacttgttttaaaaacatagtgtcttcattagtgtgcatctattaactgttcatggtgttagagttgcaaactttttagcaagaaaatatggatttcctcatttcagttccttctgcagcctgtgaatctccacaaagtgttaccagtttacaaaaataagtctttttgccttaagtcattttggaaataagtaatactgcatctgactctggtggctgtattagctaggaaaggtttgtaaatggtgtcagtgaggtggggaaaggaagtcttcctgtcacatatgcaggttcgttttcattctagggcagtgccaggaagtatattgatagctttgtaggtacaggaaaaacatcatcattatttcctctgttcacatttactggtcttaattaacaggtaataataatacatgtacttttagcctgaaacctcttccacgccatgggtaacttgggggagagaagaatcctccaaacgatggagtagccagtggtaatacaaagcagggagaacagaaaggtagagttastaaggccttcagtgaacagaaaggagcagagagcaagattagatctgagaagatgctctggggactgagcccactgttgttggtgtcagggaggcttactggagccacacctgcaggcgctgtgttcaggcaccaccttcctccttgagctttgcctgtctcttgccttatcagttcttcctccaccaccctacacccccctccccccggccccaagcccctgtgtctccttgttacaattaagtttctggatattgacttaagaactgttaggaagaggactagaaaaggcttcccctgcctatcctctccgatcaccaaggtggaagggagctagtaggactcttccttgacacaccttgtmgtctaaatgttcggtattctattcaggacttacggtaactattatgagggaggcatggctttccaccgtcgggccaggaagagcacctgttgctgcaagctcagtgaagtggggcactcccagacctgccatgcagtttatcctctgagaatggaattggaaatgaagacctaaccagctattggtgggaatgacggaactggggattgcgatgattgatctgggaacatggctggattgtgatttaaccaagaatgctgatgttgaattctttgggcctagaatatacttgagaaagcacyagtggcttgtgttcagggagaggagctggcagtttttaaccacttctgtgggagcygtgttctaacctgtggaaagtattgcaattctgtgagagtgactctgcagagtcactgcaccatcaggcttggccctgctgtgccttcagtacccagccaggttctctgggtccagggtgactctccaaagaaattggccttcagctggagaaaacattgggtggagactctcacttatgttaatgcaatcttgaaatgactgaaaggtagattgccagcacagtgagtttcccagcctgctcccccatccacacttggaaattgagggagcatgaccgctctctgacttcacatgttaatagaggatcagagcagagttgggagtatattggtcaggatcatagaaaagaagacaaagcttgctcagccatgagatggccaggtatccagttttgttaactctctttgggaatttctttttcagcctgttttttagcttagtgccattatgtcattttgatttgtattcaagtactcttcaagtatctttgtaatgaaggtttggctacttgtataggtctgcctgcagggtgaaaatgccagtgtgaatattctagctaccaaacattgttttttgttgaaaaactgactttctgttgtctacctcaggccttgtgcatttgggttatctcaagccagtcaccacagagggtctctagggtctgcaaaatagaggccaaatccagggaccaggccctaataatagaagttgtaccaaaatgcctgtggtacttgatggcctgttggtcaaataggaagtacaagtgtgtgatgttagaacctccctagttgctgctatatcaaacactgcacacttgacaagtgttttcattccccgccctctgacagaacaacattcctaattctttgaaggcaaccagtgcaaaggctactacacttgtgtaatgatatttagcagatgcatacaggactggatcccagggcactgtcagttcttccctccctctcgtgctgctcagtttgtcctctgctcccatgtaggcctaaagtcaccccactccttagtgcctgcacctcaccacgatattgaggaagcacaggacatccaagggtactctccagtttggctgtggagacttgagcaagccctaaagtcccctgctccctggacttctcctgggttgtgcttttttgggggcaacataccttggacaaagctgagctgacagctaatgtttattagcctcctacctaagtcagtcactttgctaaattcttcacctgtggtaactcattttgattgttataacatctcagcaccrttattcccattttaatgatgaggaaactgagtcatagaggatacagacttgcccaaaggagagccaggattttcacaccccctcctcaagctgggcctgccctccaagtgcttgttatatacctccacgggtgtcagcccagatgactcctcacccatccaccacctgcagcttgagatgttaactattagagctccattcttktggttcaaaacgttgatacttacttagatgttccctgagaggagtgtttatttctgagtaaggggctttgttgaaagagggggttagagagagcaagacagcacttgagtgcactggcaggaagcagagataagacttgaatttcagtttggtagaccwccttctttagcagcccaacctgtagcaaatctagtttagcctgcatggcagggagagggattctcttcccaccctcaccatttgcaagtggcaggagctgagaatgccagtacgagagtgtagccaaagtgagaggctgagagcaaaggagacatttttttcagttttgagtcgagtatccagacagaggcaaatcattttgtttaactttttattaaagtgtaactatagaaacacatcaatgatttttcacaagtggagcacgtgcatacaatcggcaccccagaagccccccgtcagattcccttccagttaactacctctccaagggaaaccactatcctgagttctaagcgcatagattagttctgtctggtttggggagatatataaatggaattatgcattcttcgtatctggtttcttttcaccaatattatgtttgtgagatttttgttgcatgtatttgtacatggattttcattctcatggttgtataatatttcattgtgtgaataaaccacatactgtttatctg

SEQ ID NO: 6475 - DNA, 4008 bp, Homo sapiens
gacacgcgtggcgcgggccgccgtttccgcaaacagaatcgcgtttggctgtgctgtgttggttcatgaagttttaccatcaattcaagtaatcataaatggcaaattctgcaaaagcagaagaayatgaaaagatgtctcttgaacaggcaaaascgtcagtgaattctgaaacagagtcttcattcaatattaatgaaaacacaacagcttctgggactgggctttctgaaaagacttctgtctgtaggcaagtagacatagcaagaaagagaaaagagtttgaagatgatcttgtaaaggaaagttctagttgtgggaaagacactccatccaagaagagaaaacttgatcctgaaattgtcccagaggaaraagattgtggtgatgctgaaggcaattcaaagaaaagaaaaagagaaactgaggatgttccaaaagataaatcttctactggagatggcactcaaaataagagaaaaatagcacttgaggatgttcctgaaaagcagaaaaatctggaagaaggacacagctcaacagtggctgcccattacaatgaacttcaggaagttggtttggagaagcgtagtcaaagtcgtattttttacctaagaaactttaataattggatgaaaagtgttctcattggagaatttttggaaaaggtacgacagaagaaaaaacgtgatatcactgttttggacctgggatgtggtaaaggtggagatttgctgaaatggaaaaaaggaagaattaacaagctagtttgtactgatattgccgatgtttctgtcaaacagtgtcagcagcggtatgaggacatgaaaaatcgtcgtgatagtgaatatattttcagtgcagaatttataactgctgacagctcaaaggaacttctgattgacaaatttcgtgacccacaaatgtgttttgacatctgcagttgtcagtttgtctgtcattactcatttgagtcttatgagcaggctgacatgatgctgagaaatgcgtgtgagagacttagccctgggggctattttattggtactactcccaatagctttgaattgataagacgccttgaagcttcagaaacagaatcatttggaaatgaaatatatactgtgaaatttcagaagaaaggagattatcctttatttggctgcaaatatgacttcaacttggaaggtgttgtggatgttcctgaattcttggtctattttccattgctaaatgaaatggcaaagaagtacaatatgaaactagtctacaaaaaaacatttctggaattctacgaagaaaagattaagaacaatgaaaataaaatgctcttaaaacgaatgcaggccttggagccatatcctgcaaatgagagttctaaacttgtctctgagaaggtggatgactatgaacatgcagcaaagtacatgaagaacagtcaagtaaggttacctttgggaaccttaagtaaatcagaatgggaagctacaagacttacggtaactattatgagggaggcatggctttccaccgtcgggccaggaagagcacctgttgctgcaagctcagtgaagtggggcactcccagacctgccatgcagtttatcctctgagaatggaattggaaatgaagacctaaccagctattggtgggaatgacggaactggggattgcgatgattgatctgggaacatggctggattgtgatttaaccaagaatgctgatgttgaattctttgggcctagaatatacttgagaaagcacyagtggcttgtgttcagggagaggagctggcagtttttaaccacttctgtgggagcygtgttctaacctgtggaaagtattgcaattctgtgagagtgactctgcagagtcactgcaccatcaggcttggccctgctgtgccttcagtacccagccaggttctctgggtccagggtgactctccaaagaaattggccttcagctggagaaaacattgggtggagactctcacttatgttaatgcaatcttgaaatgactgaaaggtagattgccagcacagtgagtttcccagcctgctcccccatccacacttggaaattgagggagcatgaccgctctctgacttcacatgttaatagaggatcagagcagagttgggagtatattggtcaggatcatagaaaagaagacaaagcttgctcagccatgagatggccaggtatccagttttgttaactctctttgggaatttctttttcagcctgttttttagcttagtgccattatgtcattttgatttgtattcaagtactcttcaagtatctttgtaatgaaggtttggctacttgtataggtctgcctgcagggtgaaaatgccagtgtgaatattctagctaccaaacattgttttttgttgaaaaactgactttctgttgtctacctcaggccttgtgcatttgggttatctcaagccagtcaccacagagggtctctagggtctgcaaaatagaggccaaatccagggaccaggccctaataatagaagttgtaccaaaatgcctgtggtacttgatggcctgttggtcaaataggaagtacaagtgtgtgatgttagaacctccctagttgctgctatatcaaacactgcacacttgacaagtgttttcattccccgccctctgacagaacaacattcctaattctttgaaggcaaccagtgcaaaggctactacacttgtgtaatgatatttagcagatgcatacaggactggatcccagggcactgtcagttcttccctccctctcgtgctgctcagtttgtcctctgctcccatgtaggcctaaagtcaccccactccttagtgcctgcacctcaccacgatattgaggaagcacaggacatccaagggtactctccagtttggctgtggagacttgagcaagccctaaagtcccctgctccctggacttctcctgggttgtgcttttttgggggcaacataccttggacaaagctgagctgacagctaatgtttattagcctcctacctaagtcagtcactttgctaaattcttcacctgtggtaactcattttgattgttataacatctcagcaccrttattcccattttaatgatgaggaaactgagtcatagaggatacagacttgcccaaaggagagccaggattttcacaccccctcctcaagctgggcctgccctccaagtgcttgttatatacctccacgggtgtcagcccagatgactcctcacccatccaccacctgcagcttgagatgttaactattagagctccattcttktggttcaaaacgttgatacttacttagatgttccctgagaggagtgtttatttctgagtaaggggctttgttgaaagagggggttagagagagcaagacagcacttgagtgcactggcaggaagcagagataagacttgaatttcagtttggtagaccwccttctttagcagcccaacctgtagcaaatctagtttagcctgcatggcagggagagggattctcttcccaccctcaccatttgcaagtggcaggagctgagaatgccagtacgagagtgtagccaaagtgagaggctgagagcaaaggagacatttttttcagttttgagtcgagtatccagacagaggcaaatcattttgtttaactttttattaaagtgtaactatagaaacacatcaatgatttttcacaagtggagcacgtgcatacaatcggcaccccagaagccccccgtcagattcccttccagttaactacctctccaagggaaaccactatcctgagttctaagcgcatagattagttctgtctggtttggggagatatataaatggaattatgcattcttcgtatctggtttcttttcaccaatattatgtttgtgagatttttgttgcatgtatttgtacatggattttcattctcatggttgtataatatttcattgtgtgaataaaccacatactgtttatctg

SEQ ID NO: 6476 - DNA, 6235 bp, Homo sapiens
agacacgcgtggcgcgggccgccgtttccgcaaacagaatcgcgtttggctgtgctggatgtgtgaacctattgggtactgtacaacttcaagcctcgaaatcagataggcaccaccaacctcatttcctgtttcaccttgattttctgtgataccaaaatctcagcttcacaaagtcattgaaagtgttggttcatgaagttttaccatcaattcaagtaatcataaatggcaaattctgcaaaagcagaagaayatgaaaagatgtctcttgaacaggcaaaascgtcagtgaattctgaaacagagtcttcattcaatattaatgaaaacacaacagcttctgggactgggctttctgaaaagacttctgtctgtaggcaagtagacatagcaagaaagagaaaagagtttgaagatgatcttgtaaaggaaagttctagttgtgggaaagacactccatccaagaagagaaaacttgatcctgaaattgtcccagaggaaraagattgtggtgatgctgaaggcaattcaaagaaaagaaaaagagaaactgaggatgttccaaaagataaatcttctactggagatggcactcaaaataagagaaaaatagcacttgaggatgttcctgaaaagcagaaaaatctggaagaaggacacagctcaacagtggctgcccattacaatgaacttcaggaagttggtttggagaagcgtagtcaaagtcgtattttttacctaagaaactttaataattggatgaaaagtgttctcattggagaatttttggaaaaggtacgacagaagaaaaaacgtgatatcactgttttggacctgggatgtggtaaaggtggagatttgctgaaatggaaaaaaggaagaattaacaagctagtttgtactgatattgccgatgtttctgtcaaacagtgtcagcagcggtatgaggacatgaaaaatcgtcgtgatagtgaatatattttcagtgcagaatttataactgctgacagctcaaaggaacttctgattgacaaatttcgtgacccacaaatgtgttttgacatctgcagttgtcagtttgtctgtcattactcatttgagtcttatgagcaggctgacatgatgctgagaaatgcgtgtgagagacttagccctgggggctattttattggtactactcccaatagctttgaattgataagacgccttgaagcttcagaaacagaatcatttggaaatgaaatatatactgtgaaatttcagaagaaaggagattatcctttatttggctgcaaatatgacttcaacttggaaggtgttgtggatgttcctgaattcttggtctattttccattgctaaatgaaatggcaaagaagtacaatatgaaactagtctacaaaaaaacatttctggaattctacgaagaaaagattaagaacaatgaaaataaaatgctcttaaaacgaatgcaggccttggagccatatcctgcaaatgagagttctaaacttgtctctgagaaggtggatgactatgaacatgcagcaaagtacatgaagaacagtcaagtaaggttacctttgggaaccttaagtaaatcagaatgggaagctacaagtatttacttggtgtttgcctttgagaaacagcagtgagcacataggcagtagtcccagaggggccgtgttctgtcctgcacaaatttgaacaactcatctcgatatatttgatatttctctgtctgttgattttaattctaaatgtgcaggatgctgccagaaactccaatgtagaaattcaacatttgctgtctgtgacagatgaacttttgcatgtgtatataagaatgagttgggacctctgtctttaaaaatctatttttaggtaatgttctaagaattccatttgcctctatgatcttagctcataaaaatataatatgacttgataaagcaactaaactcttyccacagtgttcagatttgtcctgtgtgtgtttacagtattcaatttattgcagttatagaattggtcagagagcattttcatagtgtgctcatttctatggttttgttatatagcatttttcaacatttaatggtctgtacagttgaatgtaagtgttcaatatgtattgctgaagttataagtttaaaactcaatttcagatgctcataaaagttacttagctaaaattttagcaatttattgcattttgaaataatcattaacatgctgcaattcaggagctggttagaacattttaagtggcagcatagaattttggaattttggggctttcttttcagaaattgctaccatagtaattaatgtttccagttatcaagattgtgattagacacatttacctttcttcattgaacaaatggtgccatagttatttttctcaaaatttagtgaaaatccctcccatgtagacatgttgcacattttttccaaatttatacatggaactgcagtaggaatattctcaccatctgatgccatgtacccacttcagaaataagcaatacttgttcctctgttacaacctcagcactttgcaccgtaggagccattgttaaagttgtcacttgtgtaactgactgcttttccaaaactggtacttaygtgaactgttgtccttgctttacaccaccatttggaaaacttaccagtttttagatgtagatgtagtgaaaaacttcaagaatgaagcagagcaattgagtattcttttttaaattattaagccatgatttacaaaaacattactttctgtaattcacaatacttgttttaaaaacatagtgtcttcattagtgtgcatctattaactgttcatggtgttagagttgcaaactttttagcaagaaaatatggatttcctcatttcagttccttctgcagcctgtgaatctccacaaagtgttaccagtttacaaaaataagtctttttgccttaagtcattttggaaataagtaatactgcatctgactctggtggctgtattagctaggaaaggtttgtaaatggtgtcagtgaggtggggaaaggaagtcttcctgtcacatatgcaggttcgttttcattctagggcagtgccaggaagtatattgatagctttgtaggtacaggaaaaacatcatcattatttcctctgttcacatttactggtcttaattaacaggtaataataatacatgtacttttagcctgaaacctcttccacgccatgggtaacttgggggagagaagaatcctccaaacgatggagtagccagtggtaatacaaagcagggagaacagaaaggtagagttastaaggccttcagtgaacagaaaggagcagagagcaagattagatctgagaagatgctctggggactgagcccactgttgttggtgtcagggaggcttactggagccacacctgcaggcgctgtgttcaggcaccaccttcctccttgagctttgcctgtctcttgccttatcagttcttcctccaccaccctacacccccctccccccggccccaagcccctgtgtctccttgttacaattaagtttctggatattgacttaagaactgttaggaagaggactagaaaaggcttcccctgcctatcctctccgatcaccaaggtggaagggagctagtaggactcttccttgacacaccttgtmgtctaaatgttcggtattctattcaggacttacggtaactattatgagggaggcatggctttccaccgtcgggccaggaagagcacctgttgctgcaagctcagtgaagtggggcactcccagacctgccatgcagtttatcctctgagaatggaattggaaatgaagacctaaccagctattggtgggaatgacggaactggggattgcgatgattgatctgggaacatggctggattgtgatttaaccaagaatgctgatgttgaattctttgggcctagaatatacttgagaaagcacyagtggcttgtgttcagggagaggagctggcagtttttaaccacttctgtgggagcygtgttctaacctgtggaaagtattgcaattctgtgagagtgactctgcagagtcactgcaccatcaggcttggccctgctgtgccttcagtacccagccaggttctctgggtccagggtgactctccaaagaaattggccttcagctggagaaaacattgggtggagactctcacttatgttaatgcaatcttgaaatgactgaaaggtagattgccagcacagtgagtttcccagcctgctcccccatccacacttggaaattgagggagcatgaccgctctctgacttcacatgttaatagaggatcagagcagagttgggagtatattggtcaggatcatagaaaagaagacaaagcttgctcagccatgagatggccaggtatccagttttgttaactctctttgggaatttctttttcagcctgttttttagcttagtgccattatgtcattttgatttgtattcaagtactcttcaagtatctttgtaatgaaggtttggctacttgtataggtctgcctgcagggtgaaaatgccagtgtgaatattctagctaccaaacattgttttttgttgaaaaactgactttctgttgtctacctcaggccttgtgcatttgggttatctcaagccagtcaccacagagggtctctagggtctgcaaaatagaggccaaatccagggaccaggccctaataatagaagttgtaccaaaatgcctgtggtacttgatggcctgttggtcaaataggaagtacaagtgtgtgatgttagaacctccctagttgctgctatatcaaacactgcacacttgacaagtgttttcattccccgccctctgacagaacaacattcctaattctttgaaggcaaccagtgcaaaggctactacacttgtgtaatgatatttagcagatgcatacaggactggatcccagggcactgtcagttcttccctccctctcgtgctgctcagtttgtcctctgctcccatgtaggcctaaagtcaccccactccttagtgcctgcacctcaccacgatattgaggaagcacaggacatccaagggtactctccagtttggctgtggagacttgagcaagccctaaagtcccctgctccctggacttctcctgggttgtgcttttttgggggcaacataccttggacaaagctgagctgacagctaatgtttattagcctcctacctaagtcagtcactttgctaaattcttcacctgtggtaactcattttgattgttataacatctcagcaccrttattcccattttaatgatgaggaaactgagtcatagaggatacagacttgcccaaaggagagccaggattttcacaccccctcctcaagctgggcctgccctccaagtgcttgttatatacctccacgggtgtcagcccagatgactcctcacccatccaccacctgcagcttgagatgttaactattagagctccattcttktggttcaaaacgttgatacttacttagatgttccctgagaggagtgtttatttctgagtaaggggctttgttgaaagagggggttagagagagcaagacagcacttgagtgcactggcaggaagcagagataagacttgaatttcagtttggtagaccwccttctttagcagcccaacctgtagcaaatctagtttagcctgcatggcagggagagggattctcttcccaccctcaccatttgcaagtggcaggagctgagaatgccagtacgagagtgtagccaaagtgagaggctgagagcaaaggagacatttttttcagttttgagtcgagtatccagacagaggcaaatcattttgtttaactttttattaaagtgtaactatagaaacacatcaatgatttttcacaagtggagcacgtgcatacaatcggcaccccagaagccccccgtcagattcccttccagttaactacctctccaagggaaaccactatcctgagttctaagcgcatagattagttctgtctggtttggggagatatataaatggaattatgcattcttcgtatctggtttcttttcaccaatattatgtttgtgagatttttgttgcatgtatttgtacatggattttcattctcatggttgtataatatttcattgtgtgaataaaccacatactgtttatctg

SEQ ID NO: 6477 - DNA, 6178 bp, Homo sapiens
gatgtgtgaacctattgggtactgtacaacttcaagcctcgaaatcagataggcaccaccaacctcatttcctgtttcaccttgattttctgtgataccaaaatctcagcttcacaaagtcattgaaagtgttggttcatgaagttttaccatcaattcaagtaatcataaatggcaaattctgcaaaagcagaagaayatgaaaagatgtctcttgaacaggcaaaascgtcagtgaattctgaaacagagtcttcattcaatattaatgaaaacacaacagcttctgggactgggctttctgaaaagacttctgtctgtaggcaagtagacatagcaagaaagagaaaagagtttgaagatgatcttgtaaaggaaagttctagttgtgggaaagacactccatccaagaagagaaaacttgatcctgaaattgtcccagaggaaraagattgtggtgatgctgaaggcaattcaaagaaaagaaaaagagaaactgaggatgttccaaaagataaatcttctactggagatggcactcaaaataagagaaaaatagcacttgaggatgttcctgaaaagcagaaaaatctggaagaaggacacagctcaacagtggctgcccattacaatgaacttcaggaagttggtttggagaagcgtagtcaaagtcgtattttttacctaagaaactttaataattggatgaaaagtgttctcattggagaatttttggaaaaggtacgacagaagaaaaaacgtgatatcactgttttggacctgggatgtggtaaaggtggagatttgctgaaatggaaaaaaggaagaattaacaagctagtttgtactgatattgccgatgtttctgtcaaacagtgtcagcagcggtatgaggacatgaaaaatcgtcgtgatagtgaatatattttcagtgcagaatttataactgctgacagctcaaaggaacttctgattgacaaatttcgtgacccacaaatgtgttttgacatctgcagttgtcagtttgtctgtcattactcatttgagtcttatgagcaggctgacatgatgctgagaaatgcgtgtgagagacttagccctgggggctattttattggtactactcccaatagctttgaattgataagacgccttgaagcttcagaaacagaatcatttggaaatgaaatatatactgtgaaatttcagaagaaaggagattatcctttatttggctgcaaatatgacttcaacttggaaggtgttgtggatgttcctgaattcttggtctattttccattgctaaatgaaatggcaaagaagtacaatatgaaactagtctacaaaaaaacatttctggaattctacgaagaaaagattaagaacaatgaaaataaaatgctcttaaaacgaatgcaggccttggagccatatcctgcaaatgagagttctaaacttgtctctgagaaggtggatgactatgaacatgcagcaaagtacatgaagaacagtcaagtaaggttacctttgggaaccttaagtaaatcagaatgggaagctacaagtatttacttggtgtttgcctttgagaaacagcagtgagcacataggcagtagtcccagaggggccgtgttctgtcctgcacaaatttgaacaactcatctcgatatatttgatatttctctgtctgttgattttaattctaaatgtgcaggatgctgccagaaactccaatgtagaaattcaacatttgctgtctgtgacagatgaacttttgcatgtgtatataagaatgagttgggacctctgtctttaaaaatctatttttaggtaatgttctaagaattccatttgcctctatgatcttagctcataaaaatataatatgacttgataaagcaactaaactcttyccacagtgttcagatttgtcctgtgtgtgtttacagtattcaatttattgcagttatagaattggtcagagagcattttcatagtgtgctcatttctatggttttgttatatagcatttttcaacatttaatggtctgtacagttgaatgtaagtgttcaatatgtattgctgaagttataagtttaaaactcaatttcagatgctcataaaagttacttagctaaaattttagcaatttattgcattttgaaataatcattaacatgctgcaattcaggagctggttagaacattttaagtggcagcatagaattttggaattttggggctttcttttcagaaattgctaccatagtaattaatgtttccagttatcaagattgtgattagacacatttacctttcttcattgaacaaatggtgccatagttatttttctcaaaatttagtgaaaatccctcccatgtagacatgttgcacattttttccaaatttatacatggaactgcagtaggaatattctcaccatctgatgccatgtacccacttcagaaataagcaatacttgttcctctgttacaacctcagcactttgcaccgtaggagccattgttaaagttgtcacttgtgtaactgactgcttttccaaaactggtacttaygtgaactgttgtccttgctttacaccaccatttggaaaacttaccagtttttagatgtagatgtagtgaaaaacttcaagaatgaagcagagcaattgagtattcttttttaaattattaagccatgatttacaaaaacattactttctgtaattcacaatacttgttttaaaaacatagtgtcttcattagtgtgcatctattaactgttcatggtgttagagttgcaaactttttagcaagaaaatatggatttcctcatttcagttccttctgcagcctgtgaatctccacaaagtgttaccagtttacaaaaataagtctttttgccttaagtcattttggaaataagtaatactgcatctgactctggtggctgtattagctaggaaaggtttgtaaatggtgtcagtgaggtggggaaaggaagtcttcctgtcacatatgcaggttcgttttcattctagggcagtgccaggaagtatattgatagctttgtaggtacaggaaaaacatcatcattatttcctctgttcacatttactggtcttaattaacaggtaataataatacatgtacttttagcctgaaacctcttccacgccatgggtaacttgggggagagaagaatcctccaaacgatggagtagccagtggtaatacaaagcagggagaacagaaaggtagagttastaaggccttcagtgaacagaaaggagcagagagcaagattagatctgagaagatgctctggggactgagcccactgttgttggtgtcagggaggcttactggagccacacctgcaggcgctgtgttcaggcaccaccttcctccttgagctttgcctgtctcttgccttatcagttcttcctccaccaccctacacccccctccccccggccccaagcccctgtgtctccttgttacaattaagtttctggatattgacttaagaactgttaggaagaggactagaaaaggcttcccctgcctatcctctccgatcaccaaggtggaagggagctagtaggactcttccttgacacaccttgtmgtctaaatgttcggtattctattcaggacttacggtaactattatgagggaggcatggctttccaccgtcgggccaggaagagcacctgttgctgcaagctcagtgaagtggggcactcccagacctgccatgcagtttatcctctgagaatggaattggaaatgaagacctaaccagctattggtgggaatgacggaactggggattgcgatgattgatctgggaacatggctggattgtgatttaaccaagaatgctgatgttgaattctttgggcctagaatatacttgagaaagcacyagtggcttgtgttcagggagaggagctggcagtttttaaccacttctgtgggagcygtgttctaacctgtggaaagtattgcaattctgtgagagtgactctgcagagtcactgcaccatcaggcttggccctgctgtgccttcagtacccagccaggttctctgggtccagggtgactctccaaagaaattggccttcagctggagaaaacattgggtggagactctcacttatgttaatgcaatcttgaaatgactgaaaggtagattgccagcacagtgagtttcccagcctgctcccccatccacacttggaaattgagggagcatgaccgctctctgacttcacatgttaatagaggatcagagcagagttgggagtatattggtcaggatcatagaaaagaagacaaagcttgctcagccatgagatggccaggtatccagttttgttaactctctttgggaatttctttttcagcctgttttttagcttagtgccattatgtcattttgatttgtattcaagtactcttcaagtatctttgtaatgaaggtttggctacttgtataggtctgcctgcagggtgaaaatgccagtgtgaatattctagctaccaaacattgttttttgttgaaaaactgactttctgttgtctacctcaggccttgtgcatttgggttatctcaagccagtcaccacagagggtctctagggtctgcaaaatagaggccaaatccagggaccaggccctaataatagaagttgtaccaaaatgcctgtggtacttgatggcctgttggtcaaataggaagtacaagtgtgtgatgttagaacctccctagttgctgctatatcaaacactgcacacttgacaagtgttttcattccccgccctctgacagaacaacattcctaattctttgaaggcaaccagtgcaaaggctactacacttgtgtaatgatatttagcagatgcatacaggactggatcccagggcactgtcagttcttccctccctctcgtgctgctcagtttgtcctctgctcccatgtaggcctaaagtcaccccactccttagtgcctgcacctcaccacgatattgaggaagcacaggacatccaagggtactctccagtttggctgtggagacttgagcaagccctaaagtcccctgctccctggacttctcctgggttgtgcttttttgggggcaacataccttggacaaagctgagctgacagctaatgtttattagcctcctacctaagtcagtcactttgctaaattcttcacctgtggtaactcattttgattgttataacatctcagcaccrttattcccattttaatgatgaggaaactgagtcatagaggatacagacttgcccaaaggagagccaggattttcacaccccctcctcaagctgggcctgccctccaagtgcttgttatatacctccacgggtgtcagcccagatgactcctcacccatccaccacctgcagcttgagatgttaactattagagctccattcttktggttcaaaacgttgatacttacttagatgttccctgagaggagtgtttatttctgagtaaggggctttgttgaaagagggggttagagagagcaagacagcacttgagtgcactggcaggaagcagagataagacttgaatttcagtttggtagaccwccttctttagcagcccaacctgtagcaaatctagtttagcctgcatggcagggagagggattctcttcccaccctcaccatttgcaagtggcaggagctgagaatgccagtacgagagtgtagccaaagtgagaggctgagagcaaaggagacatttttttcagttttgagtcgagtatccagacagaggcaaatcattttgtttaactttttattaaagtgtaactatagaaacacatcaatgatttttcacaagtggagcacgtgcatacaatcggcaccccagaagccccccgtcagattcccttccagttaactacctctccaagggaaaccactatcctgagttctaagcgcatagattagttctgtctggtttggggagatatataaatggaattatgcattcttcgtatctggtttcttttcaccaatattatgtttgtgagatttttgttgcatgtatttgtacatggattttcattctcatggttgtataatatttcattgtgtgaataaaccacatactgtttatctg

SEQ ID NO: 6478 - DNA, 3478 bp, Homo sapiens
ttcctggctctgggcagcagcaagaattcctctgcctcccatcctaccattcactgtcttgccggcagccagctgagagcaatgggaaatggggagtcycagctgtcctcggtgcctrctcagaagctgggttggtttatccaggaatacctgaagccctacgaagaatgtcagacactgatcgacgagatggtgaacaccatctgtgacgtcctgcaggaacccgaacagttccccctggtgcagggagtggccataggtggctcctatggacggaaaacagtcttaagaggcaactccgatggtacscttgtcctcttcttcagtgacttaaaacaattccaggatcagaagagaagccaacgtgacatcctcgataaaactggggataagctgaagttctgtctgttcacgaagtggttgaaaaacaatttcgagatccagaagtcccttgatgggttcaccatccaggtgttcacaaaaaatcagagaatctctttcgaggtgctggccgccttcaacgctctgagcttaaatgataatcccagcccctggatctatcgagagctcaaaagatcyttggataagacaaatgccagtcctggtgagtttgcagtctgcttcactgaactccagcagaagttttttgacaaccgtcctggaaaactaaaggatttgatcctcttgataaagcactggcatcaacagtgccagaaaaaaatcaaggatttaccctcgctgtctccgtatgccctggagctgcttacggtgtatgcctgggaacaggggtgcagaaaagacaactttgacattgctgaaggcgtcagaaccgtwctggagctgatcaaatgccaggagaagctgtgtatctattggatggtcaactacaactttgaagatgagaccatcaggaacatcctgctgcaccagctccaatcagcgaggccagtaatcttggatccagttgacccaaccaataatgtgagtggagataaaatatgctggcaatggctgaaaaaagaagctcaaacctggttgacttctcccaacctggataatgagttacctgcaccatcttggaatgttctgcctgcaccactcttcacgaccccaggccaccttctggataagttcatcaaggagtttctccagcccaacaaatgcttcctagagcagattgacagtgctgttaacatcatccgtacattccttaaagaaaactgcttccgacaatcaacagccaagatccagattgtccggggaggatcaaccgccaaaggcacagctctgaagactggctctgatgccgatctcgtcgtgttccataactcacttaaaagctacacctcccaaaaaaacgagcggcacaaaatcgtcaaggaaatccatgaacagctgaaagccttttggagggagaaggaggaggagcttgaagtcagctttgagcctcccaagtggaaggctcccagggtgctgagcttctctctgaaatccaaagtcctcaacgaaagtgtcagctttgatgtgcttcctgcctttaatgcactgggtcagctgagttctggctccacacccagccccgaggtttatgcagggctcattgatctgtataaatcctcggacctcccgggaggagagttttctacctgtttcacagtcctgcagcgaaacttcattcgctcccggcccaccaaactaaaggatttaattcgcctggtgaagcactggtacaaagagtgtgaaaggaaactgaagccaaaggggtctttgcccccaaagtatgccttggagctgctcaccatctatgcctgggagcaggggagtggagtgccrgattttgacactgcagaaggtttccggacagtcctggagctggtcacacaatatcagcagctctgcatcttctggaaggtcaattacaactttgaagatgagaccgtgaggaagtttctactgagccagttgcagaaaaccaggcctgtgatcttggacccagccgaacccacaggtgacgtgggtggaggggaccgttggtgttggcatcttctggcaaaagaagcaaaggaatggttatcctctccctgcttcaaggatggkactgsaaacccaataccaccttggaaagtgccgacaatgcagacaccaggaagttgtggagctaggatccatcctattgtcaatgagatgttctcatccagaagccatagaatcctgaataataattctaaaagaaacttctrgagatcatctggcaatcgcttttaaagactcggctcaccgtgagaaagagtcactcacatccattcttcccttgatggtccctattcctccttcccttgcttcttggacttcttgaaatcaatcaagactgcaaaccctttcataaagtcttgccttgctgaactccctctctgcaggcagcctgcctttaaaaatagttgctgtcatccactttatgtgcatcttatttctgtcaacttgtattttttttcttgtatttttccaattagctcctcctttttccttccagtctaaaaaaggaatcctctgtgtcttcaaagcaaagctctttactttccccttggttctcataactctgtgatmttgctctcggtgcttccaactcatccacgtcctgtctgtttcctctgtatacaaaaccctttctgcccctgctgacacagacatcctctatgccagcagccagccaaccctttcattagaacttcaagctctccaaaggctcagattataactgttgtcatatttatatgaggctgttgtcttttccttctgagcctgcctttctccccccacccaggagtatcctcttgccaaatcaaaagacttttccttgggctttagccttaaagatacttgaaggtctaggtgctttaaccycacataccctcacttaaacttttatcactgttgcatataccagttgtgatacaataaagaatgtatctggattttgtgcctagttcctagcacacagcttcaaaaattctagagtttcctgataggagtgtcttttgtattcataacaagcccttttcacccatscctgggtttatgctaacaaggttacccatggtgggcccttagtttcaaggaaggagttggccaagccagaaagaccaagcatgtggttaaagcattggaattttcagccccatcccacccccaatctccaaggaggtgatggggctggaaattgagttcaattttaacatggccagtgatttaagcaatgctgcctatgtaaagaaaccccaataaaaactctggacagtgaggcttggggagcttcctgattggcagacattccaatgtactaggaaggtagcgcatcttgattccacagggacaaaggctcctgagctctgggcccttccagtgcttgccaccctacatactctttgtctggctcttcatttgtattctttataataaaatggtgattgtaagtagagca

SEQ ID NO: 6479 - DNA, 4104 bp, Homo sapiens
ttcctggctctgggcagcagcaagaattcctctgcctcccatcctaccattcactgtcttgccggcagccagctgagagcaatgggaaatggggagtcycagctgtcctcggtgcctrctcagaagctgggttggtttatccaggaatacctgaagccctacgaagaatgtcagacactgatcgacgagatggtgaacaccatctgtgacgtcctgcaggaacccgaacagttccccctggtgcagggagtggccataggtggctcctatggacggaaaacagtcttaagaggcaactccgatggtacscttgtcctcttcttcagtgacttaaaacaattccaggatcagaagagaagccaacgtgacatcctcgataaaactggggataagctgaagttctgtctgttcacgaagtggttgaaaaacaatttcgagatccagaagtcccttgatgggttcaccatccaggtgttcacaaaaaatcagagaatctctttcgaggtgctggccgccttcaacgctctgagcttaaatgataatcccagcccctggatctatcgagagctcaaaagatcyttggataagacaaatgccagtcctggtgagtttgcagtctgcttcactgaactccagcagaagttttttgacaaccgtcctggaaaactaaaggatttgatcctcttgataaagcactggcatcaacagtgccagaaaaaaatcaaggatttaccctcgctgtctccgtatgccctggagctgcttacggtgtatgcctgggaacaggggtgcagaaaagacaactttgacattgctgaaggcgtcagaaccgtwctggagctgatcaaatgccaggagaagctgtgtatctattggatggtcaactacaactttgaagatgagaccatcaggaacatcctgctgcaccagctccaatcagcgaggccagtaatcttggatccagttgacccaaccaataatgtgagtggagataaaatatgctggcaatggctgaaaaaagaagctcaaacctggttgacttctcccaacctggataatgagttacctgcaccatcttggaatgttctgcctgcaccactcttcacgaccccaggccaccttctggataagttcatcaaggagtttctccagcccaacaaatgcttcctagagcagattgacagtgctgttaacatcatccgtacattccttaaagaaaactgcttccgacaatcaacagccaagatccagattgtccggggaggatcaaccgccaaaggcacagctctgaagactggctctgatgccgatctcgtcgtgttccataactcacttaaaagctacacctcccaaaaaaacgagcggcacaaaatcgtcaaggaaatccatgaacagctgaaagccttttggagggagaaggaggaggagcttgaagtcagctttgagcctcccaagtggaaggctcccagggtgctgagcttctctctgaaatccaaagtcctcaacgaaagtgtcagctttgatgtgcttcctgcctttaatgcactgggtcagctgagttctggctccacacccagccccgaggtttatgcagggctcattgatctgtataaatcctcggacctcccgggaggagagttttctacctgtttcacagtcctgcagcgaaacttcattcgctcccggcccaccaaactaaaggatttaattcgcctggtgaagcactggtacaaagagtgtgaaaggaaactgaagccaaaggggtctttgcccccaaagtatgccttggagctgctcaccatctatgcctgggagcaggggagtggagtgccrgattttgacactgcagaaggtttccggacagtcctggagctggtcacacaatatcagcagctctgcatcttctggaaggtcaattacaactttgaagatgagaccgtgaggaagtttctactgagccagttgcagaaaaccaggcctgtgatcttggacccagccgaacccacaggtgacgtgggtggaggggaccgttggtgttggcatcttctggcaaaagaagcaaaggaatggttatcctctccctgcttcaaggatggkactgsaaacccaataccaccttggaaagtgccggtaaaagtcatctaaaggaggcgttgtctggaaatagccctgtaacaggcttgaatcraagaacttctcctactgtakcaacctgaaattaactcagacacaaataaaggaaacccagctcacaggagcttaaacagctggtcagccccctaagccccactacaagtgatcctcaggcaggtaaccccagattcatgcactgtagggtgctgcgcagcatccctagtctctacccagtagatgccactagccctcctctcccagtgacaaccaaaagtcttcagacattgtcaaacgttcccctgggttcacagatctttctgcctttggcttttggctccaccctctttagctgttaatttgagtacttatggccctgaaagcggccacggtgcctccagatggcaggtttgcaatccaagcaggaagaaggaaaagatacccaaaggtcaagaacacagtgattttattagaagtttcatccgcaaattttcttccatttcattgctcagaaatgtcatgtggytacctgtaacttgaaggtggctacaaagatgactgtggacgtgggttgcactggccacccaaggatgtctgccacacctctccaaagccctccctacctaccaagatatacctgatatattccaccaggatatcctccctccagatatacttggttctctccaccaggttctttctttaaagcaggatttctcaactttgatacttactcacatttggggctagacagttctttgtttggaggctctcttgtgcattgtaggatgttgagcagcatctctggcctgtacccagtagatgccacccagttgtgacaattaaaagtgtcttgagactttatcatgtgtcttctgccctaggtgagaacccttgcactagaggaaccctacaccccaaccctggggggaatgtagggaagaggtggccaagccaaccgtggggttagctctaattattaagatatgcattataaataaataccaaaaaattgtctctggcaatagttaccttcccagatacaggtccccccttttttcccctaactcttttaagcaatgattgtaactattaggagacattgctctcccacgtatgtttttctttttagacaatgcagacaccaggaagttgtggagctaggatccatcctattgtcaatgagatgttctcatccagaagccatagaatcctgaataataattctaaaagaaacttctrgagatcatctggcaatcgcttttaaagactcggctcaccgtgagaaagagtcactcacatccattcttcccttgatggtccctattcctccttcccttgcttcttggacttcttgaaatcaatcaagactgcaaaccctttcataaagtcttgccttgctgaactccctctctgcaggcagcctgcctttaaaaatagttgctgtcatccactttatgtgcatcttatttctgtcaacttgtattttttttcttgtatttttccaattagctcctcctttttccttccagtctaaaaaaggaatcctctgtgtcttcaaagcaaagctctttactttccccttggttctcataactctgtgatmttgctctcggtgcttccaactcatccacgtcctgtctgtttcctctgtatacaaaaccctttctgcccctgctgacacagacatcctctatgccagcagccagccaaccctttcattagaacttcaagctctccaaaggctcagattataactgttgtcatatttatatgaggctgttgtcttttccttctgagcctgcctttctccccccacccaggagtatcctcttgccaaatcaaaagacttttccttgggctttagccttaaagatacttgaaggtctaggtgctttaaccycacataccctcacttaaacttttatcactgttgcatataccagttgtgatacaataaagaatgtatctgga

SEQ ID NO: 6480 - DNA, 3126 bp, Homo sapiens
atgcgccgacccggcgccattttggtggccgggcgcggaggtgattccacactgaggcgagcgcggcggccggggtggkagyggcagtgttcgtgtgctcaggtctgaatcgccgagggaggaggcggtggaggaagaggtggcggcggtggcggtggtcgtagcggtggcggaggaggcgggtacgaatcagctgcgggcggagacatggccaacatcgcggtgcagcgaatcaagcgggagttcaaggaggtgctgaagagcgaggagacgagcaaaaatcaaattaaagtagatcttgtagatgagaattttacagaattaagaggagaaatagcaggacctccagacacaccatatgaaggcaagaagataccaactagagataaaaataccagaaacatacccatttaatccccctaaggtccggtttatcactaaaatatggcatcctaatattagttccgtcacaggggctatttgtttggatatcctgaaagatcaatgggcagctgcaatgactctccgcacggtattattgtcattgcaagcactattggcagctgcagagccagatgatccacaggatgctgtagtagcaaatcagtacaaacaaaatcccgaaatgttcaaacagacagctcgactttgggcacatgtgtatgctggagcaccagtttctagtccagaatacaccaaaaaaatagaaaacctatgtgctatgggctttgataggaatgcagtaatagtggccttgtcttcaaaatcatgggatgtagagactgcaacagaattgcttctgagtaactgaggcatagagagctgctgatatagtcaagcttgcctcttcttgaggagcaccaacatctgttatttttaggattctgcatagatttcttttaaactggcattcttgcctaatgatgttatctaggcaccattggagactgaaaaaaaaaaatccctgctctgtaaataaagctaattaaacgtctgtgtaaatttaaaaaggggaaatactttaattttttttcttaatagtgtaaaaattccctgagctaagctaaaaccatggaagaaacatgctactttagtgtttagcagtgtaccaagactagcaagagtttgcttcaggattttgttgaataattaagataatattttgagtgtgtcagggccattcaaattgttggtgttgcatcacagctaccttaactgtttttaacatggatcctctgtgcctgtgaatttacttgcatgcttgtacttgacttcttaggatgggtagctgaaaagaccaccattttaagcatttgagaattcttaaatatgaaatttattcagaattgaagatggtgacctattcagagcctttttgtccttgtcaacagactgggacagtgtctgattcccccttcaccccccccacccccgccttgscacacacagctaatattctaatggtaaatttctctgtatcaggtggggaaatgtgctgaaggacagtatgtatcccttgcttcatttttaggtcgtaggtttggaatgtcttgtcccagttcttcaaacactcttaaatttttcttaagtaatgtaaaaatggaactgccaattttatttctcttgcaaaaatagtaaatacttgatgttacattattcccaggtttaatgaaagaacccaacttagtttttcagtgaatttgacacctattttttagtgatgaaatttttctttgagaactggcaaggatgcagtcagctgtttgcagtttttagcctgattttggggtctatagagattgctttattggatacttcaagtcattcttgcttgcacttcccctattgacacatgaaagctgtgttggtgttttattgtacatacttcagatgcacataggaatagaagtgtgttataaatctagctttctttatgatgtttctgataatacgagaattgaaaactttaccttctcttgtacatagtcagactatttgtattaaatttacatttcattctaagttcaaaagtttgaaaattattagttttgcaagatcacacactaatgtaaccattttatgaaggttgaagtggatttatgcaggcagttctatatatagaaatacaattctttttaaatttttaggaccaatacaaaataacaaaaatgtaatggaatcagactgaattaaagtaaggctgtatattgaaagtcatattataaaaggtttgctttctttaagtgttatttatcttaaattataatcgttaaatgtttggaagataatttttgaatcataacgtcagcataacttcatttgacttctcaataatcttgatactagaagcaataaaagaaccattattaaatatattgtaatgttaaagatgtgaaggttcttccaaaaatttgtaaggctttcctaattaacagtaaactcttatagctgatattattacatactaaacacaagttgctgttttttccccatatgtttgcttacgcatgtctttatacaatcacctctttttattgctgtagtttattttctaaagatgccaaaggaaacaagatttttctttatttattttaaatacctgaaacctcgtactttatattttgaagtaaggtgggattgtgtgaaaatgtggatggtttttctccagtgttggttagaactactttttttaagtggagggcaacttggtagtattagtagaatttgggtttaaaaatatcagacacatctacccagtttattttttgcctgtattatcagggtatatttaattgtcctgtggttaaacaaaggtgagagagctcagaggtttctaaaggtcaagcattttacatatatacatacatacatgctcttggaggcagctatatcctgctttgatttttatgcacatgagccctatagggttatatactcatctaactacacttcagcatccccagtgcccaagaaattggaaagtacaatatttggtttgagacattcttcataaaagattctttattataaaaatttacctcatttacatttaatgtgatgatcttttttttcctttctggtatatttcccactgtactgtttggtttttgttattctcttgtctgt

SEQ ID NO: 6481 - DNA, 3161 bp, Homo sapiens
atgcgccgacccggcgccattttggtggccgggcgcggaggtgattccacactgaggcgagcgcggcggccggggtggkagyggcagtgttcgtgtgctcaggtctgaatcgccgagggaggaggcggtggaggaagaggtggcggcggtggcggtggtcgtagcggtggcggaggaggcgggtacgaatcagctgcgggcggagacatggccaacatcgcggtgcagcgaatcaagcgggagttcaaggaggtgctgaagagcgaggagacgagcaaaaatcaaattaaagtagatcttgtagatgagaattttacagaattaagaggagaaatagcaggacctccagacacaccatatgaaggcaacattcttaactttgttttccccatttttttaggaggaagataccaactagagataaaaataccagaaacatacccatttaatccccctaaggtccggtttatcactaaaatatggcatcctaatattagttccgtcacaggggctatttgtttggatatcctgaaagatcaatgggcagctgcaatgactctccgcacggtattattgtcattgcaagcactattggcagctgcagagccagatgatccacaggatgctgtagtagcaaatcagtacaaacaaaatcccgaaatgttcaaacagacagctcgactttgggcacatgtgtatgctggagcaccagtttctagtccagaatacaccaaaaaaatagaaaacctatgtgctatgggctttgataggaatgcagtaatagtggccttgtcttcaaaatcatgggatgtagagactgcaacagaattgcttctgagtaactgaggcatagagagctgctgatatagtcaagcttgcctcttcttgaggagcaccaacatctgttatttttaggattctgcatagatttcttttaaactggcattcttgcctaatgatgttatctaggcaccattggagactgaaaaaaaaaaatccctgctctgtaaataaagctaattaaacgtctgtgtaaatttaaaaaggggaaatactttaattttttttcttaatagtgtaaaaattccctgagctaagctaaaaccatggaagaaacatgctactttagtgtttagcagtgtaccaagactagcaagagtttgcttcaggattttgttgaataattaagataatattttgagtgtgtcagggccattcaaattgttggtgttgcatcacagctaccttaactgtttttaacatggatcctctgtgcctgtgaatttacttgcatgcttgtacttgacttcttaggatgggtagctgaaaagaccaccattttaagcatttgagaattcttaaatatgaaatttattcagaattgaagatggtgacctattcagagcctttttgtccttgtcaacagactgggacagtgtctgattcccccttcaccccccccacccccgccttgscacacacagctaatattctaatggtaaatttctctgtatcaggtggggaaatgtgctgaaggacagtatgtatcccttgcttcatttttaggtcgtaggtttggaatgtcttgtcccagttcttcaaacactcttaaatttttcttaagtaatgtaaaaatggaactgccaattttatttctcttgcaaaaatagtaaatacttgatgttacattattcccaggtttaatgaaagaacccaacttagtttttcagtgaatttgacacctattttttagtgatgaaatttttctttgagaactggcaaggatgcagtcagctgtttgcagtttttagcctgattttggggtctatagagattgctttattggatacttcaagtcattcttgcttgcacttcccctattgacacatgaaagctgtgttggtgttttattgtacatacttcagatgcacataggaatagaagtgtgttataaatctagctttctttatgatgtttctgataatacgagaattgaaaactttaccttctcttgtacatagtcagactatttgtattaaatttacatttcattctaagttcaaaagtttgaaaattattagttttgcaagatcacacactaatgtaaccattttatgaaggttgaagtggatttatgcaggcagttctatatatagaaatacaattctttttaaatttttaggaccaatacaaaataacaaaaatgtaatggaatcagactgaattaaagtaaggctgtatattgaaagtcatattataaaaggtttgctttctttaagtgttatttatcttaaattataatcgttaaatgtttggaagataatttttgaatcataacgtcagcataacttcatttgacttctcaataatcttgatactagaagcaataaaagaaccattattaaatatattgtaatgttaaagatgtgaaggttcttccaaaaatttgtaaggctttcctaattaacagtaaactcttatagctgatattattacatactaaacacaagttgctgttttttccccatatgtttgcttacgcatgtctttatacaatcacctctttttattgctgtagtttattttctaaagatgccaaaggaaacaagatttttctttatttattttaaatacctgaaacctcgtactttatattttgaagtaaggtgggattgtgtgaaaatgtggatggtttttctccagtgttggttagaactactttttttaagtggagggcaacttggtagtattagtagaatttgggtttaaaaatatcagacacatctacccagtttattttttgcctgtattatcagggtatatttaattgtcctgtggttaaacaaaggtgagagagctcagaggtttctaaaggtcaagcattttacatatatacatacatacatgctcttggaggcagctatatcctgctttgatttttatgcacatgagccctatagggttatatactcatctaactacacttcagcatccccagtgcccaagaaattggaaagtacaatatttggtttgagacattcttcataaaagattctttattataaaaatttacctcatttacatttaatgtgatgatcttttttttcctttctggtatatttcccactgtactgtttggtttttgttattctcttgtctgt

SEQ ID NO: 6482 - DNA, 2765 bp, Homo sapiens
atggccaacatcgcggtgcagcgaatcaagcgggagttcaaggaggtgctgaagagcgaggaggtccggtttatcactaaaatatggcatcctaatattagttccgtcacaggggctatttgtttggatatcctgaaagatcaatgggcagctgcaatgactctccgcacggtattattgtcattgcaagcactattggcagctgcagagccagatgatccacaggatgctgtagtagcaaatcagtacaaacaaaatcccgaaatgttcaaacagacagctcgactttgggcacatgtgtatgctggagcaccagtttctagtccagaatacaccaaaaaaatagaaaacctatgtgctatgggctttgataggaatgcagtaatagtggccttgtcttcaaaatcatgggatgtagagactgcaacagaattgcttctgagtaactgaggcatagagagctgctgatatagtcaagcttgcctcttcttgaggagcaccaacatctgttatttttaggattctgcatagatttcttttaaactggcattcttgcctaatgatgttatctaggcaccattggagactgaaaaaaaaaaatccctgctctgtaaataaagctaattaaacgtctgtgtaaatttaaaaaggggaaatactttaattttttttcttaatagtgtaaaaattccctgagctaagctaaaaccatggaagaaacatgctactttagtgtttagcagtgtaccaagactagcaagagtttgcttcaggattttgttgaataattaagataatattttgagtgtgtcagggccattcaaattgttggtgttgcatcacagctaccttaactgtttttaacatggatcctctgtgcctgtgaatttacttgcatgcttgtacttgacttcttaggatgggtagctgaaaagaccaccattttaagcatttgagaattcttaaatatgaaatttattcagaattgaagatggtgacctattcagagcctttttgtccttgtcaacagactgggacagtgtctgattcccccttcaccccccccacccccgccttgscacacacagctaatattctaatggtaaatttctctgtatcaggtggggaaatgtgctgaaggacagtatgtatcccttgcttcatttttaggtcgtaggtttggaatgtcttgtcccagttcttcaaacactcttaaatttttcttaagtaatgtaaaaatggaactgccaattttatttctcttgcaaaaatagtaaatacttgatgttacattattcccaggtttaatgaaagaacccaacttagtttttcagtgaatttgacacctattttttagtgatgaaatttttctttgagaactggcaaggatgcagtcagctgtttgcagtttttagcctgattttggggtctatagagattgctttattggatacttcaagtcattcttgcttgcacttcccctattgacacatgaaagctgtgttggtgttttattgtacatacttcagatgcacataggaatagaagtgtgttataaatctagctttctttatgatgtttctgataatacgagaattgaaaactttaccttctcttgtacatagtcagactatttgtattaaatttacatttcattctaagttcaaaagtttgaaaattattagttttgcaagatcacacactaatgtaaccattttatgaaggttgaagtggatttatgcaggcagttctatatatagaaatacaattctttttaaatttttaggaccaatacaaaataacaaaaatgtaatggaatcagactgaattaaagtaaggctgtatattgaaagtcatattataaaaggtttgctttctttaagtgttatttatcttaaattataatcgttaaatgtttggaagataatttttgaatcataacgtcagcataacttcatttgacttctcaataatcttgatactagaagcaataaaagaaccattattaaatatattgtaatgttaaagatgtgaaggttcttccaaaaatttgtaaggctttcctaattaacagtaaactcttatagctgatattattacatactaaacacaagttgctgttttttccccatatgtttgcttacgcatgtctttatacaatcacctctttttattgctgtagtttattttctaaagatgccaaaggaaacaagatttttctttatttattttaaatacctgaaacctcgtactttatattttgaagtaaggtgggattgtgtgaaaatgtggatggtttttctccagtgttggttagaactactttttttaagtggagggcaacttggtagtattagtagaatttgggtttaaaaatatcagacacatctacccagtttattttttgcctgtattatcagggtatatttaattgtcctgtggttaaacaaaggtgagagagctcagaggtttctaaaggtcaagcattttacatatatacatacatacatgctcttggaggcagctatatcctgctttgatttttatgcacatgagccctatagggttatatactcatctaactacacttcagcatccccagtgcccaagaaattggaaagtacaatatttggtttgagacattcttcataaaagattctttattataaaaatttacctcatttacatttaatgtgatgatcttttttttcctttctggtatatttcccactgtactgtttggtttttgttattctcttgtctgt

SEQ ID NO: 6483 - DNA, 2849 bp, Homo sapiens
gtgattccacactgaggcgagcgcggcggccggggtggkagyggcagtgttcgtgtgctcaggtctgaatcgccgagggaggaggcggtggaggaagaggtggcggcggtggcggtggtcgtagcggtggcggaggaggcgggtacgaatcagctgcgggcggagacatggccaacatcgcggtgcagcgaatcaagcgggagttcaaggaggtgctgaagagcgaggagggcagctgcaatgactctccgcacggtattattgtcattgcaagcactattggcagctgcagagccagatgatccacaggatgctgtagtagcaaatcagtacaaacaaaatcccgaaatgttcaaacagacagctcgactttgggcacatgtgtatgctggagcaccagtttctagtccagaatacaccaaaaaaatagaaaacctatgtgctatgggctttgataggaatgcagtaatagtggccttgtcttcaaaatcatgggatgtagagactgcaacagaattgcttctgagtaactgaggcatagagagctgctgatatagtcaagcttgcctcttcttgaggagcaccaacatctgttatttttaggattctgcatagatttcttttaaactggcattcttgcctaatgatgttatctaggcaccattggagactgaaaaaaaaaaatccctgctctgtaaataaagctaattaaacgtctgtgtaaatttaaaaaggggaaatactttaattttttttcttaatagtgtaaaaattccctgagctaagctaaaaccatggaagaaacatgctactttagtgtttagcagtgtaccaagactagcaagagtttgcttcaggattttgttgaataattaagataatattttgagtgtgtcagggccattcaaattgttggtgttgcatcacagctaccttaactgtttttaacatggatcctctgtgcctgtgaatttacttgcatgcttgtacttgacttcttaggatgggtagctgaaaagaccaccattttaagcatttgagaattcttaaatatgaaatttattcagaattgaagatggtgacctattcagagcctttttgtccttgtcaacagactgggacagtgtctgattcccccttcaccccccccacccccgccttgscacacacagctaatattctaatggtaaatttctctgtatcaggtggggaaatgtgctgaaggacagtatgtatcccttgcttcatttttaggtcgtaggtttggaatgtcttgtcccagttcttcaaacactcttaaatttttcttaagtaatgtaaaaatggaactgccaattttatttctcttgcaaaaatagtaaatacttgatgttacattattcccaggtttaatgaaagaacccaacttagtttttcagtgaatttgacacctattttttagtgatgaaatttttctttgagaactggcaaggatgcagtcagctgtttgcagtttttagcctgattttggggtctatagagattgctttattggatacttcaagtcattcttgcttgcacttcccctattgacacatgaaagctgtgttggtgttttattgtacatacttcagatgcacataggaatagaagtgtgttataaatctagctttctttatgatgtttctgataatacgagaattgaaaactttaccttctcttgtacatagtcagactatttgtattaaatttacatttcattctaagttcaaaagtttgaaaattattagttttgcaagatcacacactaatgtaaccattttatgaaggttgaagtggatttatgcaggcagttctatatatagaaatacaattctttttaaatttttaggaccaatacaaaataacaaaaatgtaatggaatcagactgaattaaagtaaggctgtatattgaaagtcatattataaaaggtttgctttctttaagtgttatttatcttaaattataatcgttaaatgtttggaagataatttttgaatcataacgtcagcataacttcatttgacttctcaataatcttgatactagaagcaataaaagaaccattattaaatatattgtaatgttaaagatgtgaaggttcttccaaaaatttgtaaggctttcctaattaacagtaaactcttatagctgatattattacatactaaacacaagttgctgttttttccccatatgtttgcttacgcatgtctttatacaatcacctctttttattgctgtagtttattttctaaagatgccaaaggaaacaagatttttctttatttattttaaatacctgaaacctcgtactttatattttgaagtaaggtgggattgtgtgaaaatgtggatggtttttctccagtgttggttagaactactttttttaagtggagggcaacttggtagtattagtagaatttgggtttaaaaatatcagacacatctacccagtttattttttgcctgtattatcagggtatatttaattgtcctgtggttaaacaaaggtgagagagctcagaggtttctaaaggtcaagcattttacatatatacatacatacatgctcttggaggcagctatatcctgctttgatttttatgcacatgagccctatagggttatatactcatctaactacacttcagcatccccagtgcccaagaaattggaaagtacaatatttggtttgagacattcttcataaaagattctttattataaaaatttacctcatttacatttaatgtgatgatcttttttttcctttctggtatatttcccactgtactgtttggtttttgttattctcttgtctgt

SEQ ID NO: 6484 - DNA, 2226 bp, Homo sapiens
gggaggggcgtgcgccgagagggagctcagatcgagcggggcgcgggtggagaagctgcggcrgcgcggcccgtaggaaggtgctgtccgawcgatcgggataggagcggtccctgcgcttgctgctgggaagtgggtaagcgccgctcccaggctggccccgccgcccgggcgggatgctcccagtacaatcatgtttgaaattaagaagatctgttgcatcggtgcaggctatgttggaggacccacatgtagtgtcattgctcatatgtgtcctgaaatcagggtaacggttgttgatgtcaatgaatcaagaatcaatgcgtggaattctcctacacttcctatttatgagccaggactaaaagaagtggtagaatcctgtcgaggaaaaaatctttttttttctaccaatattgatgaygccatcaaagaagctgatcttgtatttatttctgtgaatactccaacaaaaacctatggaatggggaaaggccgggcagcagatctgaagtatattgaagcttgtgctagacgcattgtgcaaaactcaaatgggtacaaaattgtgactgagaaaagcacagttccrgtgcgggcagcagaaagtatccgtcgcatatttgatgcaaacacaaaacccaacttgaatttacaggtgctgtccaaccctgagtttctggcagagggaacagccatcaaggacctaaagaacccagacagagtactgattggaggggatgaaactccagagggccagagagctgtgcaggccctgtgtgctgtatatgagcactgggttcccagagaaaagatcctcaccactaatacttggtcttcagagctttccaaactggttacaaatgcttttcttgcccagagaataagcagcattaactccataagtgctctgtgtgaagcaacaggagctgatgtagaagaggtagcaacagcgattggaatggaccagagaattggaaacaagtttctaaaagccagtgttgggtttggtgggagctgyttccaaaaggatgttctgaatttggtttatctctgtgaggctctgaatttgccagaagtagctcgttattggcagcaggtcatagacatgaatgactaccagaggaggaggtttgcttcccggatcatagatagtctgtttaatacagtaactgataagaagatagctattttgggatttgcattcaaaaaggacactggtgatacaagagaatcttctagtatatatattagcaaatatttgatggatgaaggtgcacatctacatatatatgatccaaaagtacctagggaacaaatagttgtggatctttctcatccaggtgtttcagaggatgaccaagtgtcccggctcgtgaccatttccaaggatccatatgaagcatgtgatggtgcccatgctgttgttatttgcactgagtgggacatgtttaaggaattggattatgaacgcattcataaaaaaatgctaaagccagcctttatcttcgatggacggcgtgtcctggatgggctccacaatgaactacaaaccattggcttccagattgaaacaattggcaaaaaggtgtcttcaaagagaattccatatgctccttctggtgaaattccgaagtttagtcttcaagatccacctaacaagaaacctaaagtgtagagattgccatttttatttgtgattttttttttttttttttggtacttcaggatagcaaatatctatctgctattaaatggtaaatgaaccaagtgtttttttttgttttttttttgagacagagtctcactgttgcccaggctggagtgcagtggtgcaatctcggctcactgcaagctctgcttcccaggttcacgccattctcctggctcagcctcccaagtagctgggactacaggcacccgccacagtgcctggctaattttttgtatttttagtagagacagggtttcaccatgtgagccaggatggtctcaatctcctgaccttgtgaaccacccgtctcggcctcccaaagtgctgggattacaggtgtgagccaccacgcctggcccatgaaccaagtgtttttaaggaaacaaaactatttttttaatcatcagatttatactagctatatggatattagcatatctggtaattaaacttcaaactctttactttataaattgtccataggccacactttaatatcacattataaaggg

SEQ ID NO: 6485 - DNA, 3170 bp, Homo sapiens
gccttgtgtagcgggagggggagctaggaagcagctgagggcagaatccaggagggcctggctgcgggggaatgaagcctccgccttcgcaggcaaaagcctttaaatacgggctcaggcccgggactcagagtgtaacgcgtggcagcctgagggaggggcgtgcgccgagagggagctcagatcgagcggggcgcgggtggagaagctgcggcrgcgcggcccgtaggaaggtgctgtccgawcgatcgggataggagcggtccctgcgcttgctgctgggaagtggtacaatcatgtttgaaattaagaagatctgttgcatcggtgcaggctatgttggaggacccacatgtagtgtcattgctcatatgtgtcctgaaatcagggtaacggttgttgatgtcaatgaatcaagaatcaatgcgtggaattctcctacacttcctatttatgagccaggactaaaagaagtggtagaatcctgtcgaggaaaaaatctttttttttctaccaatattgatgaygccatcaaagaagctgatcttgtatttatttctgtgaatactccaacaaaaacctatggaatggggaaaggccgggcagcagatctgaagtatattgaagcttgtgctagacgcattgtgcaaaactcaaatgggtacaaaattgtgactgagaaaagcacagttccrgtgcgggcagcagaaagtatccgtcgcatatttgatgcaaacacaaaacccaacttgaatttacaggtgctgtccaaccctgagtttctggcagagggaacagccatcaaggacctaaagaacccagacagagtactgattggaggggatgaaactccagagggccagagagctgtgcaggccctgtgtgctgtatatgagcactgggttcccagagaaaagatcctcaccactaatacttggtcttcagagctttccaaactggcagcaaatgcttttcttgcccagagaataagcagcattaactccataagtgctctgtgtgaagcaacaggagctgatgtagaagaggtagcaacagcgattggaatggaccagagaattggaaacaagtttctaaaagccagtgttgggtttggtgggagctgyttccaaaaggatgttctgaatttggtttatctctgtgaggctctgaatttgccagaagtagctcgttattggcagcaggtcatagacatgaatgactaccagaggaggaggtttgcttcccggatcatagatagtctgtttaatacagtaactgataagaagatagctattttgggatttgcattcaaaaaggacactggtgatacaagagaatcttctagtatatatattagcaaatatttgatggatgaaggtgcacatctacatatatatgatccaaaagtacctagggaacaaatagttgtggatctttctcatccaggtgtttcagaggatgaccaagtgtcccggctcgtgaccatttccaaggatccatatgaagcatgtgatggtgcccatgctgttgttatttgcactgagtgggacatgtttaaggaattggattatgaacgcattcataaaaaaatgctaaagccagcctttatcttcgatggacggcgtgtcctggatgggctccacaatgaactacaaaccattggcttccagattgaaacaattggcaaaaaggtgtcttcaaagagaattccatatgctccttctggtgaaattccgaagtttagtcttcaagatccacctaacaagaaacctaaagtgtagagattgccatttttatttgtgattttttttttttttttttggtacttcaggatagcaaatatctatctgctattaaatggtaaatgaaccaagtgtttttttttgttttttttttgagacagagtctcactgttgcccaggctggagtgcagtggtgcaatctcggctcactgcaagctctgcttcccaggttcacgccattctcctggctcagcctcccaagtagctgggactacaggcacccgccacagtgcctggctaattttttgtatttttagtagagacagggtttcaccatgtgagccaggatggtctcaatctcctgaccttgtgaaccacccgtctcggcctcccaaagtgctgggattacaggtgtgagccaccacgcctggcccatgaaccaagtgtttttaaggaaacaaaactatttttttaatcatcagatttatactagctatatggatattagcatatctggtaattatgaatctagaatttttttacatatttttataatactgttagctcagttattggatgagtgaaagataatcatgttggttttaatagtgtcaatttttgtaaaataaaaattaaacttcaaactctttactttataaattgtccataggccacactttaatatcacattataaagggaaggacagtcttcattyctcctggttattggtttgtttgtcattaaagatatattttgaatccatgaaattgctatgctaaacagcctttacatgtatggtctggttaaagttcctttgttccttttgttttaataaaatgtgtcactgattttttagctcaaaatcatcactgttaatttccagtcaccccaaatatggttaaaagattttttttttaatcatgaagagaaaattagtagcatttctttctctccccattatttattggttttcctcactaatcttttttttttagtccaaaagccaaaaatatttatcttggttttacattttaatttccattcttaattgtaatttttttctttaaataaggaaaccaatataatctcatgtataaaaacttaaatattttacaagttacatatagcatcattctaaaataagaattttttttgttttctgtctgcttttttcttatgtctcttgttgagttttatattttcagtggttatttttgcttgtgttagatcattattaaaatatatccaatgtccctttgatacttgtgctctgctgagaatgtacrgtttgcattaaacatcccaggtctcatccttcaggaattttgcagttcaatgagaagagggagacaaatataaagatgaggacagaagcatctctacagatgaaaattacataaataaaacattctccatcaacaactata

SEQ ID NO: 6486 - DNA, 1424 bp, Homo sapiens
gagcgacgtaatttcgacctgtcctttcccgggagttagcgatccctcaacccctgcactgcgctagtcctaaagaggaaatgtctctacgctgcggggatgcagcccgcaccctggggccccgggtatttgggagatatttttgcagcccagtcagaccgttaagctccttgccagataaaaaaaaggaactcctacagaatggaccagaccttcaagattttgtatctggtgatcttgcagacaggagcacctgggatgaatataaaggaaacctaaaacgccagaaaggagaaaggttaagactacctccatggctaaagacagagattcccatggggaaaaattacaataaactgaaaaatactttgcggaatttaaatctmcatacagtatgtgaggaagctcgatgtcccaatattggagagtgttggggaggtggagaatatgccaccgccacagccacgatcatgttgatgggtgacacatgtacaagaggttgcagattttgttctgttaagactgcaagaaatcctcctccactggatgccagtgagccctacaatactgcaaaggcaattgcagartggggtctggattatgttgtcctgacatctgtggatcgagatgatatgcctgatgggggagctgaacacattgcaaagaccgtatcatatttaaaggaaaggaatccaaaaatccttgtggagtgtcttactcctgattttcgaggtgatctcaaagcaatagaaaaagttgctctgtcaggattagatgtgtatgcacataatgtagaaacagtcccggaattacagagtaaggttcgtgatcctcgggccaattttgatcagtccctacgtgtactgaaacatgccaagaaggttcagcctgatgttatttctaaaacatctataatgttgggtttaggcgagaatgatgagcaagtatatgcaacaatgaaagcacttcgtgaggcagatgtagactgcttgactttaggacaatatatgcagccaacaaggcgtcaccttaaggttgaagaatatattactcctgaaaaattcaaatactgggaaaaagtaggaaatgaacttggatttcattatactgcaagtggccctttggtgcgttcttcatataaagcaggtgaatttttcctgaaaaatctagtggctaaaagaaaaacaaaagacctctaaaacttcaacaagaccttcaagatcacagaaatttttaaaatttgattccagttaataacagaggtggtgccagaatgcctggactgcagtggatgtrccccacctctttgcttaaaaaaaaaaattcaataaactgtacaaatttaattacagtaattcatttggcttttagtgtatcttctttgtcccaattaaacagttgcttgctgtgatgtaatcttaaaa

SEQ ID NO: 6487 - DNA, 1739 bp, Homo sapiens
gagcgacgtaatttcgacctgtcctttcccgggagttagcgatccctcaacccctgcactgcgctagtcctaaagaggaaatgtctctacgctgcggggatgcagcccgcaccctggggccccgggtatttgggagatatttttgcagcccagtcagaccgttaagctccttgccagataaaaaaaaggaactcctacagaatggaccagaccttcaagattttgtatctggtgatcttgcagacaggagcacctgggatgaatataaaggaaacctaaaacgccagaaaggagaaaggttaagactacctccatggctaaagacagagattcccatggggaaaaattacaataaactgaaaaatactttgcggaatttaaatctmcatacagtatgtgaggaagctcgatgtcccaatattggagagtgttggggaggtggagaatatgccaccgccacagccacgatcatgttgatgggtgacacatgtacaagaggttgcagattttgttctgttaagactgcaagaaatcctcctccactggatgccagtgagccctacaatactgcaaaggcaattgcagartggggtctggattatgttgtcctgacatctgtggatcgagatgatatgcctgatgggggagctgaacacattgcaaagaccgtatcatatttaaaggaaaggaatccaaaaatccttgtggagtgtcttactcctgattttcgaggtgatctcaaagcaatagaaaaagttgctctgtcaggattagatgtgtatgcacataatgtagaaacagtcccggaattacagagtaaggttcgtgatcctcgggccaattttgatcagtccctacgtgtactgaaacatgccaagaaggttcagcctgatgttatttctaaaacatctataatgttgggtttaggcgagaatgatgagcaagtatatgcaacaatgaaagcacttcgtgaggcagatgtagactgcttgactttaggacaatatatgcagccaacaaggcgtcaccttaaggttgaagaatatattactcctgaaaaattcaaatactgggaaaaagtaggaaatgaacttggatttcattatactgcaagtggccctttggtgcgttcttcatataaagcaggtgaatttttcctgaaaaatctagtggctaaaagaaaaacaaaagacctctaaaacttcaacaagaccttcaagatcacagaaatttttaaaatttgattccagttaataacagaggtggtgccagaatgcctggactgcagtggatgtrccccacctctttgcttaaaaaaaaaaatgtcaatagccaggcatagtggctcacgcctgtaatcccagcactttaggaggccaaggcgggtggatcacctgaggtcaggagttygagaccagcctggccaacatggtgaaatcctgtctccactaaaaacacaaaaattagtcaggcgtggtagtgggtgcctgtaatcccagctactcgggaggctaaggcaggagaatcacttgaacctgggagggggaggttgcagtgagccaagatcgctccattgccctccagcctgggtgacaagagcaaaactccatctcaaataaataaaaaggaaaaaaaagtcaataaactgtacaaatttaattacagtaattcatttggcttttagtgtatcttctttgtcccaattaaacagttgcttgctgtgatgtaatcttaaaata

SEQ ID NO: 6488 - DNA, 2422 bp, Homo sapiens
cgcgcatccgtgcgccgcccgaggctgtctaaggagtcggcggccattttgttcttctcgtggttccagtggggagagaaggaggaagtagggagcggggtggcaggggggggacccgccgcggctgctgccaccgccgccaccaccgcctctgctcgtggcgtgggaaaggaggtgtgagtcccgggcgcgagccggcggcggcgccgctgcgggagggtcggcggtgggaaggcgatggcggatttagataaactcaacatcgacagcattatccaacggctgctggaagtgagagggtccaagcctggtaagaatgtccagcttcaggagaatgaaatcagaggactgtgcttaaagtctcgtgaaatctttctcagtcagcctatcctactagaacttgaagcaccactcaaaatatgtggtgacatccatggacaatactatgatttgctgcgactttttgagtacggtggtttcccaccagaaagcaactacctgtttcttggggactatgtggacaggggaaagcagtcattggagacgatctgcctcttactggcctacaaaataaaatatcctgagaatttttttcttctcagagggaaccatgaatgtgccagcatcaacagaatttatggattttatgatgaatgtaaaagaagatacaacattaaactatggaaaactttcacagactgttttaactgtttaccgatagcagccatcgtggatgagaagatattctgctgtcatggaggtttatcaccagatcttcaatctatggagcagattcggcgaattatgcgaccaactgatgtaccagatcaaggtcttctttgtgatcttttgtggtctgaccccgataaagatgtcttaggctggggtgaaaatgacagaggagtgtccttcacatttggtgcagaagtggttgcaaaatttctccataagcatgatttggatcttatatgtagagcccatcaggtggttgaagatggatatgaattttttgcaaagaggcagttggtcactctgttttctgcgcccaattattgyggagagtttgacaatgcaggtgccatgatgagtgtggatgaaacactaatgtgttcttttcagattttaaagcctgcagagaaaaagaagccaaatgccacgagacctgtaacgcctccaaggggtatgatcacaaagcaagcaaagaaatagatgtcgttttgacactgcctagtcgggacttgtaacatagagtatataaccttcatttttaagactgtaatgtgtactggtcagcttgctcagatagatctgtgtttgtgggggcccttccttccatttttgatttagtgaatggcatttgctggttataacagcaaatgaaagactcttcactccaaaaagaaaagtgttttgttttttaattctctgttccttttgcaaacaattttaatgatggtgttaaagctgtacaccccaggacagtttatcctgtctgaggagtaagtgtacaattgatcttttttaattcagtacaacccataatcatgtaaatgctcattttctttaggacataaagagagccctagggtgctctgaatctgtacatgttcttaattttgtttcaaagggattgctttttcctctcattgtcttgttatgtacaaactagtttttatagctatcaacattaggagtaactttcaaccttgccagcatcactggtatgatgtatatttaattaaagcacacttttccccgaccgtatacttaaaatgacaaagccattcttttaaatatttgtgactctttcctaaagccaaagtttctgttgaattatgttttgacacacccctaagtacaaggtggtatggttgtrtacacatgctgccttcttggggattcaaaaacaggtttttgattttgaatagcaattagtgatatagtgctgtttaagctactaacgataaaaggtaataacattttatacaatttccatatagtctattcattaagtaatctttttacagttgcatcaggcctgaacccgtccattcagaaagcttcaaattatagaaacaatactgttctatacgagtgaccgattatgctttctttggcctacattctttattctgcggtgaagttgaggcttataagttaaaacaaaggaactaacttactgtccmccagtttatayagaactcacagtacctatgacttttttaaactaagatctgttaaaaaagaaatctgtttcaacagatgaccgtgtacaataccgtgtggtgaaaatgaattcagacttattaaatgatgaacttgttaaatcttctcagtgtctatttatcagcacaatacacacaggagaactgttgatggcatattgaatagattttcctgaataaattgctctggaaaccac

SEQ ID NO: 6489 - DNA, 1480 bp, Homo sapiens
cgcgcatccgtgcgccgcccgaggctgtctaaggagtcggcggccattttgttcttctcgtggttccagtggggagagaaggaggaagtagggagcggggtggcaggggggggacccgccgcggctgctgccaccgccgccaccaccgcctctgctcgtggcgtgggaaaggaggtgtgagtcccgggcgcgagccggcggcggcgccgctgcgggagggtcggcggtgggaaggcgatggcggatttagataaactcaacatcgacagcattatccaacggctgctggaagtgagagggtccaagcctggtaagaatgtccagcttcaggagaatgaaatcagaggactgtgcttaaagtctcgtgaaatctttctcagtcagcctatcctactagaacttgaagcaccactcaaaatatgtggtgacatccatggacaatactatgatttgctgcgactttttgagtacggtggtttcccaccagaaagcaactacctgtttcttggggactatgtggacaggggaaagcagtcattggagacgatctgcctcttactggcctacaaaataaaatatcctgagaatttttttcttctcagagggaaccatgaatgtgccagcatcaacagaatttatggattttatgatgaatgtaaaagaagatacaacattaaactatggaaaactttcacagactgttttaactgtttaccgatagcagccatcgtggatgagaagatattctgctgtcatggaggtttatcaccagatcttcaatctatggagcagattcggcgaattatgcgaccaactgatgtaccagatcaaggtcttctttgtgatcttttgtggtctgaccccgataaagatgtcttaggctggggtgaaaatgacagaggagtgtccttcacatttggtgcagaagtggttgcaaaatttctccataagcatgatttggatcttatatgtagagcccatcaggtggttgaagatggatatgaattttttgcaaagaggcagttggtcactctgttttctgcgcccaattattgyggagagtttgacaatgcaggtgccatgatgagtgtggatgaaacactaatgtgttcttttcagattttaaagcctgcagagaaaaagaagccaaatgccacgagacctgtaacgcctccaagggttgcatcaggcctgaacccgtccattcagaaagcttcaaattatagaaacaatactgttctatacgagtgaccgattatgctttctttggcctacattctttattctgcggtgaagttgaggcttataagttaaaacaaaggaactaacttactgtccmccagtttatayagaactcacagtacctatgacttttttaaactaagatctgttaaaaaagaaatctgtttcaacagatgaccgtgtacaataccgtgtggtgaaaatgaattcagacttattaaatgatgaacttgttaaa

SEQ ID NO: 6490 - DNA, 2475 bp, Homo sapiens
cgcgcatccgtgcgccgcccgaggctgtctaaggagtcggcggccattttgttcttctcgtggttccagtggggagagaaggaggaagtagggagcggggtggcaggggggggacccgccgcggctgctgccaccgccgccaccaccgcctctgctcgtggcgtgggaaaggaggtgtgagtcccgggcgcgagccggcggcggcgccgctgcgggagggtcggcggtgggaaggcgatggcggatttagataaactcaacatcgacagcattatccaacggctgctggaagtgagagggtccaagcctggtaagaatgtccagcttcaggagaatgaaatcagaggactgtgcttaaagtctcgtgaaatctttctcagtcagcctatcctactagaacttgaagcaccactcaaaatatgtggtgacatccatggacaatactatgatttgctgcgactttttgagtacggtggtttcccaccagaaagcaactacctgtttcttggggactatgtggacaggggaaagcagtcattggagacgatctgcctcttactggcctacaaaataaaatatcctgagaatttttttcttctcagagggaaccatgaatgtgccagcatcaacagaatttatggattttatgatgaatgtaaaagaagatacaacattaaactatggaaaactttcacagactgttttaactgtttaccgatagcagccatcgtggatgagaagatattctgctgtcatggaggtttatcaccagatcttcaatctatggagcagattcggcgaattatgcgaccaactgatgtaccagatcaaggtcttctttgtgatcttttgtggtctgaccccgataaagatgtcttaggctggggtgaaaatgacagaggagtgtccttcacatttggtgcagaagtggttgcaaaatttctccataagcatgatttggatcttatatgtagagcccatcaggtggttgaagatggatatgaattttttgcaaagaggcagttggtcactctgttttctgcgcccaattattgyggagagtttgacaatgcaggtgccatgatgagtgtggatgaaacactaatgtgttcttttcagattttaaagcctgcagagaaaaagaagccaaatgccacgagacctgtaacgcctccaaggggtatgatcacaaagcaagcaaagaaatagatgtcgttttgacactgcctagtcgggacttgtaacatagagtatataaccttcatttttaagactgtaatgtgtactggtcagcttgctcagatagatctgtgtttgtgggggcccttccttccatttttgatttagtgaatggcatttgctggttataacagcaaatgaaagactcttcactccaaaaagaaaagtgttttgttttttaattctctgttccttttgcaaacaattttaatgatggtgttaaagctgtacaccccaggacagtttatcctgtctgaggagtaagtgtacaattgatcttttttaattcagtacaacccataatcatgtaaatgctcattttctttaggacataaagagagccctagggtgctctgaatctgtacatgttcttgtcataaaatgcatactgttgatacaaaccactgtgaacattttttatttgagaattttgtttcaaagggattgctttttcctctcattgtcttgttatgtacaaactagtttttatagctatcaacattaggagtaactttcaaccttgccagcatcactggtatgatgtatatttaattaaagcacacttttccccgaccgtatacttaaaatgacaaagccattcttttaaatatttgtgactctttcctaaagccaaagtttctgttgaattatgttttgacacacccctaagtacaaggtggtatggttgtrtacacatgctgccttcttggggattcaaaaacaggtttttgattttgaatagcaattagtgatatagtgctgtttaagctactaacgataaaaggtaataacattttatacaatttccatatagtctattcattaagtaatctttttacagttgcatcaggcctgaacccgtccattcagaaagcttcaaattatagaaacaatactgttctatacgagtgaccgattatgctttctttggcctacattctttattctgcggtgaagttgaggcttataagttaaaacaaaggaactaacttactgtccmccagtttatayagaactcacagtacctatgacttttttaaactaagatctgttaaaaaagaaatctgtttcaacagatgaccgtgtacaataccgtgtggtgaaaatgaattcagacttattaaatgatgaacttgttaaatcttctcagtgtctatttatcagcacaatacacacaggagaactgttgatggcatattgaatagattttcctgaataaattgctctggaaaccac

SEQ ID NO: 6491 - DNA, 1555 bp, Homo sapiens
ctgagcccggtcagccaagcccccagccctaaccctaggtgctgcccgcaggccggcagtgcgagtggcgctccattgayggcagcatcgtgctgcccctggcccggggctccccaaaggcactggccctggagtacgcactgtgcctcacaggcgacggcttggcccacctgcaggccaccgacccccagcagctgctccgcctcatcccccatgtgcaggtgttcgcccgtgtggctcccaagcagaaggagtttgtcatcaccagcctgaaggagctgggctacgtgaccctcatgtgtggggatggcaccaacgacgtgggcgccctgaagcatgctgacgtgggtgtggcgctcttggccaatgcccctgagcgggttgtcgagcggcgacggcggccccgggacagcccaaccctgagcaacagtggcatcagagccacctccaggacagccaagcagcggtcggggctccctccctccgaggagcagccaacctcccagagggaccgcctgagccaggtgctgcgagacctcgaggacgagagtacgmccattgtgaaactgggggatgccagcatcgcagcacccttcacctccaagctctcatccatccagtgcatctgccacgtgatcaagcagggccgctgcacgctggtgaccacgctacagatgttcaagatcctggcgctcaatgccctcatcctggcctacagccagagcgtcctctacctggagggagtcaagttcagtgacttccaggccaccctacaggggctgctgctggccggctgcttcctcttcatctcccgttccaagcccctcaagaccctctcccgagaacggcccctgcccaacatcttcaacctgtacaccatcctcaccgtcatgctccagttctttgtgcacttcctgagccttgtctacctgtaccgtgaggcccaggcccggagccccgagaagcaggagcagttcgtggacttgtacaaggagtttgagccaagcctggtcaacagcaccgtctacatcatggccatggccatgcagatggccaccttcgccatcaattacaaaggcccgcccttcatggagagcctgcccgagaacaagcccctggtgtggagtctggcagtttcactcctggccatcattggcctgctcctcggctcctcgcccgacttcaacagccagtttggcctcgtggacatccctgtggagttcaagctggtcattgcccaggtcctgctcctggacttctgcctggcgctcctggccgaccgcgtcctgcagtwcttcctggggaccccgaagctgaaagtgccttcctgagatggcagtgctggtacccactgcccaccctggctgccgctgggcgggaaccccaacagggccccgggagggaaccctgcccccaaccccccacagcaaggctgtacagtctcgcccttggaagactgagctgggacccccacagccatccgctggcttggccagcagaaccagccccargccagcacctttggtaaataaagcagcatctgagattttaaaaa

SEQ ID NO: 6492 - DNA, 3406 bp, Homo sapiens
atggagaagtgggaggagctgaacagccatcagccaggagaggagtaygaccccagcaaagcgacctttgtgaaggtggtgccaacccccaacaatggctccacggagctcktggccctgcaccgcaatgagggcgaagacgggcttgaggtgctgtccttcgaattccagaagatcaagtattcctacgatgccctggagaagaagcagtttctccccgtggcctttcctgtgggaaacgccttctcatactatcagagcaacagaggcttccaggaagactcagagatccgagcagctgagaagaaatttgggagcaacaaggccgagatggtggtgcctgacttctcggagcttttcaaggagagagccacagcccccttctttgtatttcaggtgttctgtgtggggctctggtgcctggatgagtactggtactacagcgtctttacgctatccatgctggtggcgttcgaggcctcgctggtgcagcagcagatgcggaacatgtcggagatccggaagatgggcaacaagccccacatgatccaggtctaccgaagccgcaagtggaggcccattgccagtgatgagatcgtaccaggggacatcgtctccatcggccgctccccacaggagaacctggtgccatgtgacgtgcttctgctgcgaggccgctgcatcgtagacgaggccatgctcacgggggagtcygtgccacagatgaaggagcccatcgaagacctcagcccagaccgggtgctggacctccaggctgattcccggctgcacgtcatcttcgggggcaccaaggtggtgcagcacatccccccacagaaagccaccacgggcctgaagccggttgacagcgggtgygtggcctacgtcctgcggaccggattcaacacatcccagggcaagctgctgcgcaccatcctcttcggggtcaagagggtgactgcgaacaacctggagaccttcatcttcatcctcttcctcctggtgtttgccatcgctgcagctgcctatgtatggattgaaggtaccaaggaccccagccggaaccgctacaagctgtttctggagtgcaccctgatcctcacctcggtcgtgcctcctgagctgcccatcgagctgtccctggccgtcaacacctccctcatcgccctggccaagctctacatgtactgcacagagcccttccggatcccctttgctggcaaggtcgaggtgtgctgctttgacaagacggggacgttgaccagtgacagcctggtggtgcgyggtgtggccgggctgagagacgggaaggaggtgaccccagtgtccagcatccctgtagaaacacaccgggccctggcctcgtgccactcrctcatgcagctggacgacggcaccctcgtgggtgaccctctagagaaggccatgctgacggccgtggactggacgctgaccaaagatgagaaagtattcccccgaagtattaaaactcaggggctgaaaattcaccagcgctttcattttgccagtgccctgaagcgaatgtccgtgcttgcctcgtatgagaagctgggctccaccgacctctgctacatcgcggccgtgaagggggcccccgaaactctgcactccatgttctcccagtgcccgcccgactaccaccacatccacaccgagatctcccgggaaggagcccgcgtcctggcgctggggtacaaggagctgggacacctcactcaccagcaggccmgggaggtcaagcgggaggccctggagtgcagcctcaagttcgtcggcttcattgtggtctcctgcccgctcaaggctgactccaaggccgtgatccgggagatccagaatgcgtcccaccgggtggtcatgatcacgggagacaacccgctcactgcatgccacgtggcccaggagctgcacttcattgaaaaggcccacacgctgatcctgcagcctccctccgagaaaggccggcagtgcgagtggcgctccattgayggcagcatcgtgctgcccctggcccggggctccccaaaggcactggccctggagtacgcactgtgcctcacaggcgacggcttggcccacctgcaggccaccgacccccagcagctgctccgcctcatcccccatgtgcaggtgttcgcccgtgtggctcccaagcagaaggagtttgtcatcaccagcctgaaggagctgggctacgtgaccctcatgtgtggggatggcaccaacgacgtgggcgccctgaagcatgctgacgtgggtgtggcgctcttggccaatgcccctgagcgggttgtcgagcggcgacggcggccccgggacagcccaaccctgagcaacagtggcatcagagccacctccaggacagccaagcagcggtcggggctccctccctccgaggagcagccaacctcccagagggaccgcctgagccaggtgctgcgagacctcgaggacgagagtacgmccattgtgaaactgggggatgccagcatcgcagcacccttcacctccaagctctcatccatccagtgcatctgccacgtgatcaagcagggccgctgcacgctggtgaccacgctacagatgttcaagatcctggcgctcaatgccctcatcctggcctacagccagagcgtcctctacctggagggagtcaagttcagtgacttccaggccaccctacaggggctgctgctggccggctgcttcctcttcatctcccgttccaagcccctcaagaccctctcccgagaacggcccctgcccaacatcttcaacctgtacaccatcctcaccgtcatgctccagttctttgtgcacttcctgagccttgtctacctgtaccgtgaggcccaggcccggagccccgagaagcaggagcagttcgtggacttgtacaaggagtttgagccaagcctggtcaacagcaccgtctacatcatggccatggccatgcagatggccaccttcgccatcaattacaaaggcccgcccttcatggagagcctgcccgagaacaagcccctggtgtggagtctggcagtttcactcctggccatcattggcctgctcctcggctcctcgcccgacttcaacagccagtttggcctcgtggacatccctgtggagttcaagctggtcattgcccaggtcctgctcctggacttctgcctggcgctcctggccgaccgcgtcctgcagtwcttcctggggaccccgaagctgaaagtgccttcctgagatggcagtgctggtacccaagcaaggctgtacagtctcgcccttggaagactgagctgggacccccacagccatccgctggcttggccagcagaaccagccccargccagcacctttggtaaataaagcagcatctgagatttt

SEQ ID NO: 6493 - DNA, 3789 bp, Homo sapiens
gcccggaagtgagcgcggcgctaggaaagatggcggcagcggcggcggtgggcaacgcggtgccctgcggggcccggccttgcggggtccggcctgacgggcagcccaagcccgggccgcagccgcgcgcgctccttgccgccgggccggcgctcatagcgaacggtgacgagctggtggctgccgtgtggccgtaccggcggttggcgctgttgcggcgcctcacggtgctgccattcgccgggctgctttacccggcctggttgggtgccgcagccgctggctgctggggctggggcagcagttgggtgcagatccccgaagctgcgctgctcgtgcttgccaccatctgcctcgcgcacgcgctcactgtcctctcggggcattggtctgtgcacgcgcattgcgcgctcacctgcaccccggagtaygaccccagcaaagcgacctttgtgaaggtggtgccaacccccaacaatggctccacggagctcktggccctgcaccgcaatgagggcgaagacgggcttgaggtgctgtccttcgaattccagaagatcaagtattcctacgatgccctggagaagaagcagtttctccccgtggcctttcctgtgggaaacgccttctcatactatcagagcaacagaggcttccaggaagactcagagatccgagcagctgagaagaaatttgggagcaacaaggccgagatggtggtgcctgacttctcggagcttttcaaggagagagccacagcccccttctttgtatttcaggtgttctgtgtggggctctggtgcctggatgagtactggtactacagcgtctttacgctatccatgctggtggcgttcgaggcctcgctggtgcagcagcagatgcggaacatgtcggagatccggaagatgggcaacaagccccacatgatccaggtctaccgaagccgcaagtggaggcccattgccagtgatgagatcgtaccaggggacatcgtctccatcggccgctccccacaggagaacctggtgccatgtgacgtgcttctgctgcgaggccgctgcatcgtagacgaggccatgctcacgggggagtcygtgccacagatgaaggagcccatcgaagacctcagcccagaccgggtgctggacctccaggctgattcccggctgcacgtcatcttcgggggcaccaaggtggtgcagcacatccccccacagaaagccaccacgggcctgaagccggttgacagcgggtgygtggcctacgtcctgcggaccggattcaacacatcccagggcaagctgctgcgcaccatcctcttcggggtcaagagggtgactgcgaacaacctggagaccttcatcttcatcctcttcctcctggtgtttgccatcgctgcagctgcctatgtatggattgaaggtaccaaggaccccagccggaaccgctacaagctgtttctggagtgcaccctgatcctcacctcggtcgtgcctcctgagctgcccatcgagctgtccctggccgtcaacacctccctcatcgccctggccaagctctacatgtactgcacagagcccttccggatcccctttgctggcaaggtcgaggtgtgctgctttgacaagacggggacgttgaccagtgacagcctggtggtgcgyggtgtggccgggctgagagacgggaaggaggtgaccccagtgtccagcatccctgtagaaacacaccgggccctggcctcgtgccactcrctcatgcagctggacgacggcaccctcgtgggtgaccctctagagaaggccatgctgacggccgtggactggacgctgaccaaagatgagaaagtattcccccgaagtattaaaactcaggggctgaaaattcaccagcgctttcattttgccagtgccctgaagcgaatgtccgtgcttgcctcgtatgagaagctgggctccaccgacctctgctacatcgcggccgtgaagggggcccccgaaactctgcactccatgttctcccagtgcccgcccgactaccaccacatccacaccgagatctcccgggaaggagcccgcgtcctggcgctggggtacaaggagctgggacacctcactcaccagcaggccmgggaggtcaagcgggaggccctggagtgcagcctcaagttcgtcggcttcattgtggtctcctgcccgctcaaggctgactccaaggccgtgatccgggagatccagaatgcgtcccaccgggtggtcatgatcacgggagacaacccgctcactgcatgccacgtggcccaggagctgcacttcattgaaaaggcccacacgctgatcctgcagcctccctccgagaaaggccggcagtgcgagtggcgctccattgayggcagcatcgtgctgcccctggcccggggctccccaaaggcactggccctggagtacgcactgtgcctcacaggcgacggcttggcccacctgcaggccaccgacccccagcagctgctccgcctcatcccccatgtgcaggtgttcgcccgtgtggctcccaagcagaaggagtttgtcatcaccagcctgaaggagctgggctacgtgaccctcatgtgtggggatggcaccaacgacgtgggcgccctgaagcatgctgacgtgggtgtggcgctcttggccaatgcccctgagcgggttgtcgagcggcgacggcggccccgggacagcccaaccctgagcaacagtggcatcagagccacctccaggacagccaagcagcggtcggggctccctccctccgaggagcagccaacctcccagagggaccgcctgagccaggtgctgcgagacctcgaggacgagagtacgmccattgtgaaactgggggatgccagcatcgcagcacccttcacctccaagctctcatccatccagtgcatctgccacgtgatcaagcagggccgctgcacgctggtgaccacgctacagatgttcaagatcctggcgctcaatgccctcatcctggcctacagccagagcgtcctctacctggagggagtcaagttcagtgacttccaggccaccctacaggggctgctgctggccggctgcttcctcttcatctcccgttccaagcccctcaagaccctctcccgagaacggcccctgcccaacatcttcaacctgtacaccatcctcaccgtcatgctccagttctttgtgcacttcctgagccttgtctacctgtaccgtgaggcccaggcccggagccccgagaagcaggagcagttcgtggacttgtacaaggagtttgagccaagcctggtcaacagcaccgtctacatcatggccatggccatgcagatggccaccttcgccatcaattacaaaggcccgcccttcatggagagcctgcccgagaacaagcccctggtgtggagtctggcagtttcactcctggccatcattggcctgctcctcggctcctcgcccgacttcaacagccagtttggcctcgtggacatccctgtggagttcaagctggtcattgcccaggtcctgctcctggacttctgcctggcgctcctggccgaccgcgtcctgcagtwcttcctggggaccccgaagctgaaagtgccttcctgagatggcagtgctggtacccaagcaaggctgtacagtctcgcccttggaagactgagctgggacccccacagccatccgctggcttggccagcagaaccagccccargccagcacctttggtaaataaagcagcatctgagatttt

SEQ ID NO: 6494 - DNA, 3959 bp, Homo sapiens
gcccggaagtgagcgcggcgctaggaaagatggcggcagcggcggcggtgggcaacgcggtgccctgcggggcccggccttgcggggtccggcctgacgggcagcccaagcccgggccgcagccgcgcgcgctccttgccgccgggccggcgctcatagcgaacggtgacgagctggtggctgccgtgtggccgtaccggcggttggcgctgttgcggcgcctcacggtgctgccattcgccgggctgctttacccggcctggttgggtgccgcagccgctggctgctggggctggggcagcagttgggtgcagatccccgaagctgcgctgctcgtgcttgccaccatctgcctcgcgcacgcgctcactgtcctctcggggcattggtctgtgcacgcgcattgcgcgctcacctgcaccccggagtaygaccccagcaaagcgacctttgtgaaggtggtgccaacccccaacaatggctccacggagctcktggccctgcaccgcaatgagggcgaagacgggcttgaggtgctgtccttcgaattccagaagatcaagtattcctacgatgccctggagaagaagcagtttctccccgtggcctttcctgtgggaaacgccttctcatactatcagagcaacagaggcttccaggaagactcagagatccgagcagctgagaagaaatttgggagcaacaaggccgagatggtggtgcctgacttctcggagcttttcaaggagagagccacagcccccttctttgtatttcaggtgttctgtgtggggctctggtgcctggatgagtactggtactacagcgtctttacgctatccatgctggtggcgttcgaggcctcgctggtgcagcagcagatgcggaacatgtcggagatccggaagatgggcaacaagccccacatgatccaggtgtggctgccagggagacccaggttgggggtgcagcacaggtgcggcttctgtgctgacacccatgccccgcccaggtctaccgaagccgcaagtggaggcccattgccagtgatgagatcgtaccaggggacatcgtctccatcggtgaggccgggttccgctcagtcccagtgggagccccagcctcagggcctctggccaaccctcctgcctctgccctgcaggccgctccccacaggagaacctggtgccatgtgacgtgcttctgctgcgaggccgctgcatcgtagacgaggccatgctcacgggggagtcygtgccacagatgaaggagcccatcgaagacctcagcccagaccgggtgctggacctccaggctgattcccggctgcacgtcatcttcgggggcaccaaggtggtgcagcacatccccccacagaaagccaccacgggcctgaagcgtagcggttgacagcgggtgygtggcctacgtcctgcggaccggattcaacacatcccagggcaagctgctgcgcaccatcctcttcggggtcaagagggtgactgcgaacaacctggagaccttcatcttcatcctcttcctcctggtgtttgccatcgctgcagctgcctatgtatggattgaaggtaccaaggaccccagccggaaccgctacaagctgtttctggagtgcaccctgatcctcacctcggtcgtgcctcctgagctgcccatcgagctgtccctggccgtcaacacctccctcatcgccctggccaagctctacatgtactgcacagagcccttccggatcccctttgctggcaaggtcgaggtgtgctgctttgacaagacggggacgttgaccagtgacagcctggtggtgcgyggtgtggccgggctgagagacgggaaggaggtgaccccagtgtccagcatccctgtagaaacacaccgggccctggcctcgtgccactcrctcatgcagctggacgacggcaccctcgtgggtgaccctctagagaaggccatgctgacggccgtggactggacgctgaccaaagtgccctgaagcgaatgtccgtgcttgcctcgtatgagaagctgggctccaccgacctctgctacatcgcggccgtgaagggggcccccgaaactctgcactccatgttctcccagtgcccgcccgactaccaccacatccacaccgagatctcccgggaaggagcccgcgtcctggcgctggggtacaaggagctgggacacctcactcaccagcaggccmgggaggtcaagcgggaggccctggagtgcagcctcaagttcgtcggcttcattgtggtctcctgcccgctcaaggctgactccaaggccgtgatccgggagatccagaatgcgtcccaccgggtggtcatgatcacgggagacaacccgctcactgcatgccacgtggcccaggagctgcacttcattgaaaaggcccacacgctgatcctgcagcctccctccgagaaaggccggcagtgcgagtggcgctccattgayggcagcatcgtgctgcccctggcccggggctccccaaaggcactggccctggagtacgcactgtgcctcacaggcgacggcttggcccacctgcaggccaccgacccccagcagctgctccgcctcatcccccatgtgcaggtgttcgcccgtgtggctcccaagcagaaggagtttgtcatcaccagcctgaaggagctgggctacgtgaccctcatgtgtggggatggcaccaacgacgtgggcgccctgaagcatgctgacgtgggtgtggcgctcttggccaatgcccctgagcgggttgtcgagcggcgacggcggccccgggacagcccaaccctgagcaacagtggcatcagagccacctccaggacagccaagcagcggtcggggctccctccctccgaggagcagccaacctcccagagggaccgcctgagccaggtgctgcgagacctcgaggacgagagtacgmccattgtgaaactgggggatgccagcatcgcagcacccttcacctccaagctctcatccatccagtgcatctgccacgtgatcaagcagggccgctgcacgctggtgaccacgctacagatgttcaagatcctggcgctcaatgccctcatcctggcctacagccagagcgtcctctacctggagggagtcaagttcagtgacttccaggccaccctacaggggctgctgctggccggctgcttcctcttcatctcccgttccaagcccctcaagaccctctcccgagaacggcccctgcccaacatcttcaacctgtacaccatcctcaccgtcatgctccagttctttgtgcacttcctgagccttgtctacctgtaccgtgaggcccaggcccggagccccgagaagcaggagcagttcgtggacttgtacaaggagtttgagccaagcctggtcaacagcaccgtctacatcatggccatggccatgcagatggccaccttcgccatcaattacaaaggcccgcccttcatggagagcctgcccgagaacaagcccctggtgtggagtctggcagtttcactcctggccatcattggcctgctcctcggctcctcgcccgacttcaacagccagtttggcctcgtggacatccctgtggagttcaagctggtcattgcccaggtcctgctcctggacttctgcctggcgctcctggccgaccgcgtcctgcagtwcttcctggggaccccgaagctgaaagtgccttcctgagatggcagtgctggtacccactgcccaccctggctgccgctgggcgggaaccccaacagggccccgggagggaaccctgcccccaaccccccacagcaaggctgtacagtctcgcccttggaagactgagctgggacccccacagccatccgctggcttggccagcagaaccagccccargccagcacctttggtaaataaagcagcatctgagattttaaaaa

SEQ ID NO: 6495 - DNA, 3868 bp, Homo sapiens
gcccggaagtgagcgcggcgctaggaaagatggcggcagcggcggcggtgggcaacgcggtgccctgcggggcccggccttgcggggtccggcctgacgggcagcccaagcccgggccgcagccgcgcgcgctccttgccgccgggccggcgctcatagcgaacggtgacgagctggtggctgccgtgtggccgtaccggcggttggcgctgttgcggcgcctcacggtgctgccattcgccgggctgctttacccggcctggttgggtgccgcagccgctggctgctggggctggggcagcagttgggtgcagatccccgaagctgcgctgctcgtgcttgccaccatctgcctcgcgcacgcgctcactgtcctctcggggcattggtctgtgcacgcgcattgcgcgctcacctgcaccccggagtaygaccccagcaaagcgacctttgtgaaggtggtgccaacccccaacaatggctccacggagctcktggccctgcaccgcaatgagggcgaagacgggcttgaggtgctgtccttcgaattccagaagatcaagtattcctacgatgccctggagaagaagcagtttctccccgtggcctttcctgtgggaaacgccttctcatactatcagagcaacagaggcttccaggaagactcagagatccgagcagctgagaagaaatttgggagcaacaaggccgagatggtggtgcctgacttctcggagcttttcaaggagagagccacagcccccttctttgtatttcaggtgttctgtgtggggctctggtgcctggatgagtactggtactacagcgtctttacgctatccatgctggtggcgttcgaggcctcgctggtgcagcagcagatgcggaacatgtcggagatccggaagatgggcaacaagccccacatgatccaggtctaccgaagccgcaagtggaggcccattgccagtgatgagatcgtaccaggggacatcgtctccatcggccgctccccacaggagaacctggtgccatgtgacgtgcttctgctgcgaggccgctgcatcgtagacgaggccatgctcacgggggagtcygtgccacagatgaaggagcccatcgaagacctcagcccagaccgggtgctggacctccaggctgattcccggctgcacgtcatcttcgggggcaccaaggtggtgcagcacatccccccacagaaagccaccacgggcctgaagccggttgacagcgggtgygtggcctacgtcctgcggaccggattcaacacatcccagggcaagctgctgcgcaccatcctcttcggggtcaagagggtgactgcgaacaacctggagaccttcatcttcatcctcttcctcctggtgtttgccatcgctgcagctgcctatgtatggattgaaggtaccaaggaccccagccggaaccgctacaagctgtttctggagtgcaccctgatcctcacctcggtcgtgcctcctgagctgcccatcgagctgtccctggccgtcaacacctccctcatcgccctggccaagctctacatgtactgcacagagcccttccggatcccctttgctggcaaggtcgaggtgtgctgctttgacaagacggggacgttgaccagtgacagcctggtggtgcgyggtgtggccgggctgagagacgggaaggaggtgaccccagtgtccagcatccctgtagaaacacaccgggccctggcctcgtgccactcrctcatgcagctggacgacggcaccctcgtgggtgaccctctagagaaggccatgctgacggccgtggactggacgctgaccaaagtgccctgaagcgaatgtccgtgcttgcctcgtatgagaagctgggctccaccgacctctgctacatcgcggccgtgaagggggcccccgaaactctgcactccatgttctcccagtgcccgcccgactaccaccacatccacaccgagatctcccgggaaggagcccgcgtcctggcgctggggtacaaggagctgggacacctcactcaccagcaggccmgggaggtcaagcgggaggccctggagtgcagcctcaagttcgtcggcttcattgtggtctcctgcccgctcaaggctgactccaaggccgtgatccgggagatccagaatgcgtcccaccgggtggtcatgatcacgggagacaacccgctcactgcatgccacgtggcccaggagctgcacttcattgaaaaggcccacacgctgatcctgcagcctccctccgagaaaggccggcagtgcgagtggcgctccattgayggcagcatcgtgctgcccctggcccggggctccccaaaggcactggccctggagtacgcactgtgcctcacaggcgacggcttggcccacctgcaggccaccgacccccagcagctgctccgcctcatcccccatgtgcaggtgttcgcccgtgtggctcccaagcagaaggagtttgtcatcaccagcctgaaggagctgggctacgtgaccctcatgtgtggggatggcaccaacgacgtgggcgccctgaagcatgctgacgtgggtgtggcgctcttggccaatgcccctgagcgggttgtcgagcggcgacggcggccccgggacagcccaaccctgagcaacagtggcatcagagccacctccaggacagccaagcagcggtcggggctccctccctccgaggagcagccaacctcccagagggtgagtcccaagaggggaggtgctgcaccccatcctggccagggctgacagcctgmtgtctaccctgcaggaccgcctgagccaggtgctgcgagacctcgaggacgagagtacgmccattgtgaaactgggggatgccagcatcgcagcacccttcacctccaagctctcatccatccagtgcatctgccacgtgatcaagcagggccgctgcacgctggtgaccacgctacagatgttcaagatcctggcgctcaatgccctcatcctggcctacagccagagcgtcctctacctggagggagtcaagttcagtgacttccaggccaccctacaggggctgctgctggccggctgcttcctcttcatctcccgttccaagcccctcaagaccctctcccgagaacggcccctgcccaacatcttcaacctgtacaccatcctcaccgtcatgctccagttctttgtgcacttcctgagccttgtctacctgtaccgtgaggcccaggcccggagccccgagaagcaggagcagttcgtggacttgtacaaggagtttgagccaagcctggtcaacagcaccgtctacatcatggccatggccatgcagatggccaccttcgccatcaattacaaaggcccgcccttcatggagagcctgcccgagaacaagcccctggtgtggagtctggcagtttcactcctggccatcattggcctgctcctcggctcctcgcccgacttcaacagccagtttggcctcgtggacatccctgtggagttcaagctggtcattgcccaggtcctgctcctggacttctgcctggcgctcctggccgaccgcgtcctgcagtwcttcctggggaccccgaagctgaaagtgccttcctgagatggcagtgctggtacccactgcccaccctggctgccgctgggcgggaaccccaacagggccccgggagggaaccctgcccccaaccccccacagcaaggctgtacagtctcgcccttggaagactgagctgggacccccacagccatccgctggcttggccagcagaaccagccccargccagcacctttggtaaataaagcagcatctgagattttaaaaa

SEQ ID NO: 6496 - DNA, 3868 bp, Homo sapiens
gcccggaagtgagcgcggcgctaggaaagatggcggcagcggcggcggtgggcaacgcggtgccctgcggggcccggccttgcggggtccggcctgacgggcagcccaagcccgggccgcagccgcgcgcgctccttgccgccgggccggcgctcatagcgaacggtgacgagctggtggctgccgtgtggccgtaccggcggttggcgctgttgcggcgcctcacggtgctgccattcgccgggctgctttacccggcctggttgggtgccgcagccgctggctgctggggctggggcagcagttgggtgcagatccccgaagctgcgctgctcgtgcttgccaccatctgcctcgcgcacgcgctcactgtcctctcggggcattggtctgtgcacgcgcattgcgcgctcacctgcaccccggagtaygaccccagcaaagcgacctttgtgaaggtggtgccaacccccaacaatggctccacggagctcktggccctgcaccgcaatgagggcgaagacgggcttgaggtgctgtccttcgaattccagaagatcaagtattcctacgatgccctggagaagaagcagtttctccccgtggcctttcctgtgggaaacgccttctcatactatcagagcaacagaggcttccaggaagactcagagatccgagcagctgagaagaaatttgggagcaacaaggccgagatggtggtgcctgacttctcggagcttttcaaggagagagccacagcccccttctttgtatttcaggtgttctgtgtggggctctggtgcctggatgagtactggtactacagcgtctttacgctatccatgctggtggcgttcgaggcctcgctggtgcagcagcagatgcggaacatgtcggagatccggaagatgggcaacaagccccacatgatccaggtctaccgaagccgcaagtggaggcccattgccagtgatgagatcgtaccaggggacatcgtctccatcggccgctccccacaggagaacctggtgccatgtgacgtgcttctgctgcgaggccgctgcatcgtagacgaggccatgctcacgggggagtcygtgccacagatgaaggagcccatcgaagacctcagcccagaccgggtgctggacctccaggctgattcccggctgcacgtcatcttcgggggcaccaaggtggtgcagcacatccccccacagaaagccaccacgggcctgaagccggttgacagcgggtgygtggcctacgtcctgcggaccggattcaacacatcccagggcaagctgctgcgcaccatcctcttcggggtcaagagggtgactgcgaacaacctggagaccttcatcttcatcctcttcctcctggtgtttgccatcgctgcagctgcctatgtatggattgaaggtaccaaggaccccagccggaaccgctacaagctgtttctggagtgcaccctgatcctcacctcggtcgtgcctcctgagctgcccatcgagctgtccctggccgtcaacacctccctcatcgccctggccaagctctacatgtactgcacagagcccttccggatcccctttgctggcaaggtcgaggtgtgctgctttgacaagacggggacgttgaccagtgacagcctggtggtgcgyggtgtggccgggctgagagacgggaaggaggtgaccccagtgtccagcatccctgtagaaacacaccgggccctggcctcgtgccactcrctcatgcagctggacgacggcaccctcgtgggtgaccctctagagaaggccatgctgacggccgtggactggacgctgaccaaagatgagaaagtattcccccgaagtattaaaactcaggggctgaaaattcaccagcgctttcattttgccagtgccctgaagcgaatgtccgtgcttgcctcgtatgagaagctgggctccaccgacctctgctacatcgcggccgtgaagggggcccccgaaactctgcactccatgttctcccagtgcccgcccgactaccaccacatccacaccgagatctcccgggaaggagcccgcgtcctggcgctggggtacaaggagctgggacacctcactcaccagcaggccmgggaggtcaagcgggaggccctggagtgcagcctcaagttcgtcggcttcattgtggtctcctgcccgctcaaggctgactccaaggccgtgatccgggagatccagaatgcgtcccaccgggtggtcatgatcacgggagacaacccgctcactgcatgccacgtggcccaggagctgcacttcattgaaaaggcccacacgctgatcctgcagcctccctccgagaaaggccggcagtgcgagtggcgctccattgayggcagcatcgtgctgcccctggcccggggctccccaaaggcactggccctggagtacgcactgtgcctcacaggcgacggcttggcccacctgcaggccaccgacccccagcagctgctccgcctcatcccccatgtgcaggtgttcgcccgtgtggctcccaagcagaaggagtttgtcatcaccagcctgaaggagctgggctacgtgaccctcatgtgtggggatggcaccaacgacgtgggcgccctgaagcatgctgacgtgggtgtggcgctcttggccaatgcccctgagcgggttgtcgagcggcgacggcggccccgggacagcccaaccctgagcaacagtggcatcagagccacctccaggacagccaagcagcggtcggggctccctccctccgaggagcagccaacctcccagagggaccgcctgagccaggtgctgcgagacctcgaggacgagagtacgmccattgtgaaactgggggatgccagcatcgcagcacccttcacctccaagctctcatccatccagtgcatctgccacgtgatcaagcagggccgctgcacgctggtgaccacgctacagatgttcaagatcctggcgctcaatgccctcatcctggcctacagccagagcgtcctctacctggagggagtcaagttcagtgacttccaggccaccctacaggggctgctgctggccggctgcttcctcttcatctcccgttccaagcccctcaagaccctctcccgagaacggcccctgcccaacatcttcaacctgtacaccatcctcaccgtcatgctccagttctttgtgcacttcctgagccttgtctacctgtaccgtgaggcccaggcccggagccccgagaagcaggagcagttcgtggacttgtacaaggagtttgagccaagcctggtcaacagcaccgtctacatcatggccatggccatgcagatggccaccttcgccatcaattacaaaggcccgcccttcatggagagcctgcccgagaacaagcccctggtgtggagtctggcagtttcactcctggccatcattggcctgctcctcggctcctcgcccgacttcaacagccagtttggcctcgtggacatccctgtggagttcaagctggtcattgcccaggtcctgctcctggacttctgcctggcgctcctggccgaccgcgtcctgcagtwcttcctggggaccccgaagctgaaagtgccttcctgagatggcagtgctggtacccactgcccaccctggctgccgctgggcgggaaccccaacagggccccgggagggaaccctgcccccaaccccccacagcaaggctgtacagtctcgcccttggaagactgagctgggacccccacagccatccgctggcttggccagcagaaccagccccargccagcacctttggtaaataaagcagcatctgagattttaaaaa

SEQ ID NO: 6497 - DNA, 3485 bp, Homo sapiens
atggagaagtgggaggagctgaacagccatcagccaggagaggagtaygaccccagcaaagcgacctttgtgaaggtggtgccaacccccaacaatggctccacggagctcktggccctgcaccgcaatgagggcgaagacgggcttgaggtgctgtccttcgaattccagaagatcaagtattcctacgatgccctggagaagaagcagtttctccccgtggcctttcctgtgggaaacgccttctcatactatcagagcaacagaggcttccaggaagactcagagatccgagcagctgagaagaaatttgggagcaacaaggccgagatggtggtgcctgacttctcggagcttttcaaggagagagccacagcccccttctttgtatttcaggtgttctgtgtggggctctggtgcctggatgagtactggtactacagcgtctttacgctatccatgctggtggcgttcgaggcctcgctggtgcagcagcagatgcggaacatgtcggagatccggaagatgggcaacaagccccacatgatccaggtctaccgaagccgcaagtggaggcccattgccagtgatgagatcgtaccaggggacatcgtctccatcggccgctccccacaggagaacctggtgccatgtgacgtgcttctgctgcgaggccgctgcatcgtagacgaggccatgctcacgggggagtcygtgccacagatgaaggagcccatcgaagacctcagcccagaccgggtgctggacctccaggctgattcccggctgcacgtcatcttcgggggcaccaaggtggtgcagcacatccccccacagaaagccaccacgggcctgaagccggttgacagcgggtgygtggcctacgtcctgcggaccggattcaacacatcccagggcaagctgctgcgcaccatcctcttcggggtcaagagggtgactgcgaacaacctggagaccttcatcttcatcctcttcctcctggtgtttgccatcgctgcagctgcctatgtatggattgaaggtaccaaggaccccagccggaaccgctacaagctgtttctggagtgcaccctgatcctcacctcggtcgtgcctcctgagctgcccatcgagctgtccctggccgtcaacacctccctcatcgccctggccaagctctacatgtactgcacagagcccttccggatcccctttgctggcaaggtcgaggtgtgctgctttgacaagacggggacgttgaccagtgacagcctggtggtgcgyggtgtggccgggctgagagacgggaaggaggtgaccccagtgtccagcatccctgtagaaacacaccgggccctggcctcgtgccactcrctcatgcagctggacgacggcaccctcgtgggtgaccctctagagaaggccatgctgacggccgtggactggacgctgaccaaagatgagaaagtattcccccgaagtattaaaactcaggggctgaaaattcaccagcgctttcattttgccagtgccctgaagcgaatgtccgtgcttgcctcgtatgagaagctgggctccaccgacctctgctacatcgcggccgtgaagggggcccccgaaactctgcactccatgttctcccagtgcccgcccgactaccaccacatccacaccgagatctcccgggaaggagcccgcgtcctggcgctggggtacaaggagctgggacacctcactcaccagcaggccmgggaggtcaagcgggaggccctggagtgcagcctcaagttcgtcggcttcattgtggtctcctgcccgctcaaggctgactccaaggccgtgatccgggagatccagaatgcgtcccaccgggtggtcatgatcacgggagacaacccgctcactgcatgccacgtggcccaggagctgcacttcattgaaaaggcccacacgctgatcctgcagcctccctccgagaaaggccggcagtgcgagtggcgctccattgayggcagcatcgtgctgcccctggcccggggctccccaaaggcactggccctggagtacgcactgtgcctcacaggcgacggcttggcccacctgcaggccaccgacccccagcagctgctccgcctcatcccccatgtgcaggtgttcgcccgtgtggctcccaagcagaaggagtttgtcatcaccagcctgaaggagctgggctacgtgaccctcatgtgtggggatggcaccaacgacgtgggcgccctgaagcatgctgacgtgggtgtggcgctcttggccaatgcccctgagcgggttgtcgagcggcgacggcggccccgggacagcccaaccctgagcaacagtggcatcagagccacctccaggacagccaagcagcggtcggggctccctccctccgaggagcagccaacctcccagagggaccgcctgagccaggtgctgcgagacctcgaggacgagagtacgmccattgtgaaactgggggatgccagcatcgcagcacccttcacctccaagctctcatccatccagtgcatctgccacgtgatcaagcagggccgctgcacgctggtgaccacgctacagatgttcaagatcctggcgctcaatgccctcatcctggcctacagccagagcgtcctctacctggagggagtcaagttcagtgacttccaggccaccctacaggggctgctgctggccggctgcttcctcttcatctcccgttccaagcccctcaagaccctctcccgagaacggcccctgcccaacatcttcaacctgtacaccatcctcaccgtcatgctccagttctttgtgcacttcctgagccttgtctacctgtaccgtgaggcccaggcccggagccccgagaagcaggagcagttcgtggacttgtacaaggagtttgagccaagcctggtcaacagcaccgtctacatcatggccatggccatgcagatggccaccttcgccatcaattacaaaggcccgcccttcatggagagcctgcccgagaacaagcccctggtgtggagtctggcagtttcactcctggccatcattggcctgctcctcggctcctcgcccgacttcaacagccagtttggcctcgtggacatccctgtggagttcaagctggtcattgcccaggtcctgctcctggacttctgcctggcgctcctggccgaccgcgtcctgcagtwcttcctggggaccccgaagctgaaagtgccttcctgagatggcagtgctggtacccactgcccaccctggctgccgctgggcgggaaccccaacagggccccgggagggaaccctgcccccaaccccccacagcaaggctgtacagtctcgcccttggaagactgagctgggacccccacagccatccgctggcttggccagcagaaccagccccargccagcacctttggtaaataaagcagcatctgagattttaaaaa

SEQ ID NO: 6498 - DNA, 3940 bp, Homo sapiens
gcccggaagtgagcgcggcgctaggaaagatggcggcagcggcggcggtgggcaacgcggtgccctgcggggcccggccttgcggggtccggcctgacgggcagcccaagcccgggccgcagccgcgcgcgctccttgccgccgggccggcgctcatagcgaacggtgacgagctggtggctgccgtgtggccgtaccggcggttggcgctgttgcggcgcctcacggtgctgccattcgccgggctgctttacccggcctggttgggtgccgcagccgctggctgctggggctggggcagcagttgggtgcagatccccgaagctgcgctgctcgtgcttgccaccatctgcctcgcgcacgcgctcactgtcctctcggggcattggtctgtgcacgcgcattgcgcgctcacctgcaccccggagtaygaccccagcaaagcgacctttgtgaaggtggtgccaacccccaacaatggctccacggagctcktggccctgcaccgcaatgagggcgaagacgggcttgaggtgctgtccttcgaattccagaagatcaagtattcctacgatgccctggagaagaagcagtttctccccgtggcctttcctgtgggaaacgccttctcatactatcagagcaacagaggcttccaggaagactcagagatccgagcagctgagaagaaatttgggagcaacaaggccgagatggtggtgcctgacttctcggagcttttcaaggagagagccacagcccccttctttgtatttcaggtgttctgtgtggggctctggtgcctggatgagtactggtactacagcgtctttacgctatccatgctggtggcgttcgaggcctcgctggtgcagcagcagatgcggaacatgtcggagatccggaagatgggcaacaagccccacatgatccaggtgtggctgccagggagacccaggttgggggtgcagcacaggtgcggcttctgtgctgacacccatgccccgcccaggtctaccgaagccgcaagtggaggcccattgccagtgatgagatcgtaccaggggacatcgtctccatcggtgaggccgggttccgctcagtcccagtgggagccccagcctcagggcctctggccaaccctcctgcctctgccctgcaggccgctccccacaggagaacctggtgccatgtgacgtgcttctgctgcgaggccgctgcatcgtagacgaggccatgctcacgggggagtcygtgccacagatgaaggagcccatcgaagacctcagcccagaccgggtgctggacctccaggctgattcccggctgcacgtcatcttcgggggcaccaaggtggtgcagcacatccccccacagaaagccaccacgggcctgaagcgtagcggttgacagcgggtgygtggcctacgtcctgcggaccggattcaacacatcccagggcaagctgctgcgcaccatcctcttcggggtcaagagggtgactgcgaacaacctggagaccttcatcttcatcctcttcctcctggtgtttgccatcgctgcagctgcctatgtatggattgaaggtaccaaggaccccagccggaaccgctacaagctgtttctggagtgcaccctgatcctcacctcggtcgtgcctcctgagctgcccatcgagctgtccctggccgtcaacacctccctcatcgccctggccaagctctacatgtactgcacagagcccttccggatcccctttgctggcaaggtcgaggtgtgctgctttgacaagacggggacgttgaccagtgacagcctggtggtgcgyggtgtggccggggacggcaccctcgtgggtgaccctctagagaaggccatgctgacggccgtggactggacgctgaccaaagtgccctgaagcgaatgtccgtgcttgcctcgtatgagaagctgggctccaccgacctctgctacatcgcggccgtgaagggggcccccgaaactctgcactccatgttctcccagtgcccgcccgactaccaccacatccacaccgagatctcccgggaaggagcccgcgtcctggcgctggggtacaaggagctgggacacctcactcaccagcaggccmgggaggtcaagcgggaggccctggagtgcagcctcaagttcgtcggcttcattgtggtctcctgcccgctcaaggctgactccaaggccgtgatccgggagatccagaatgcgtcccaccgggtggtcatgatcacgggagacaacccgctcactgcatgccacgtggcccaggagctgcacttcattgaaaaggcccacacgctgatcctgcagcctccctccgagaaaggccggcagtgcgagtggcgctccattgayggcagcatcgtgctgcccctggcccggggctccccaaaggcactggccctggagtacgcactgtgcctcacaggcgacggcttggcccacctgcaggccaccgacccccagcagctgctccgcctcatcccccatgtgcaggtgttcgcccgtgtggctcccaagcagaaggagtttgtcatcaccagcctgaaggagctgggctacgtgaccctcatgtgtggggatggcaccaacgacgtgggcgccctgaagcatgctgacgtgggtgtggcgctcttggccaatgcccctgagcgggttgtcgagcggcgacggcggccccgggacagcccaaccctgagcaacagtggcatcagagccacctccaggacagccaagcagcggtcggggctccctccctccgaggagcagccaacctcccagagggtgagtcccaagaggggaggtgctgcaccccatcctggccagggctgacagcctgmtgtctaccctgcaggaccgcctgagccaggtgctgcgagacctcgaggacgagagtacgmccattgtgaaactgggggatgccagcatcgcagcacccttcacctccaagctctcatccatccagtgcatctgccacgtgatcaagcagggccgctgcacgctggtgaccacgctacagatgttcaagatcctggcgctcaatgccctcatcctggcctacagccagagcgtcctctacctggagggagtcaagttcagtgacttccaggccaccctacaggggctgctgctggccggctgcttcctcttcatctcccgttccaagcccctcaagaccctctcccgagaacggcccctgcccaacatcttcaacctgtacaccatcctcaccgtcatgctccagttctttgtgcacttcctgagccttgtctacctgtaccgtgaggcccaggcccggagccccgagaagcaggagcagttcgtggacttgtacaaggagtttgagccaagcctggtcaacagcaccgtctacatcatggccatggccatgcagatggccaccttcgccatcaattacaaagtaaggcctgggccctgcccraacattcactgtctgcccacccagccccaccccatgaagccatctgtccctcatccccacagggcccgcccttcatggagagcctgcccgagaacaagcccctggtgtggagtctggcagtttcactcctggccatcattggcctgctcctcggctcctcgcccgacttcaacagccagtttggcctcgtggacatccctgtggagttcaagctggtcattgcccaggtcctgctcctggacttctgcctggcgctcctggccgaccgcgtcctgcagtwcttcctggggaccccgaagctgaaagtgccttcctgagatggcagtgctggtacccaagcaaggctgtacagtctcgcccttggaagactgagctgggacccccacagccatccgctggcttggccagcagaaccagccccargccagcacctttggtaaataaagcagcatctgagatttt

SEQ ID NO: 6499 - DNA, 1825 bp, Homo sapiens
gcgccggaagcgcggatcacacgggcccctacaaggggcccctacaagyggccacaaggatggcaggcttcgcggagctygggctgtcatcgtggctcgtggaacaatgtcggcagctgggtttgaagcagcccacgcccgtgcagctcggctgcatccccgccatcctggagggtcgagactgcttgggctgtgctaagacaggcagtgggaagacagcagcgtttgtycttcccatcttgcagaagctgtctgaggatccctatggcatcttctgcctcgtcctgacacccaccagggagctggcctaccagatcgcagagcagttccgggtcctggggaagcctctagggctgaaagactgcatcatcgtcggtggcatggacatggtggcccaggcgctggagctctcycggaaaccacacgtggtcatcgccacgccggggcgcctggcagatcacctgcgcagctccaacacttttagtataaagaagatccgcttcctggtgatggatgaggcagaccggctgctggaacagggctgcactgacttcaccgtggacctggaggccatcctggcggctgtgccggcccgcaggcagacactgctgttcagcgccacgctgaccgacacactccgggagctgcagggtctggccaccaaccagcccttcttctgggaagcacaggccccggtgagcaccgtggagcagctggaccagcrctacctgctggtgcctgagaaggtcaaggacgcctacctggtccacctgatccagcgcttccaggatgagcacgaggactggtccattatcatcttcaccaacacgtgcaagacctgccagattctgtgcatgatgctgcgcaaattcagcttccccaccgtggctctgcactccatgatgaagcagaaagaacgctttgccgccctagccaagttcaagkccagcatctaccggatcctgatygcaacagacgtggcctcccggggcctggacatccctacggtacaggtggtcatcaaccacaacacccccgggctccccaagatctacatccaccgagtcggccggacggcccgtgcagggcggcagggtcaggccatcacgctggtgacacagtacgacatccacctggtgcacgccatcgaggagcagatcaagaagaagctggaggagttctccgtggaagaggccgaggtgctacagatcctcacacaggtcaacgtggtgcgaagagagtgtgagatcaaactggaggcggcccactttgacgaaaagaaggagatcaacaaacggaagcagctgatcctggaggggaaggaccctgacctggaggccaagcgcaaggctgagctggccaagatcaagcagaagaaccggcgcttcaaggagaaggtggaggagacgctgaagygacagaaggctggcagggctggccacaaggggcgtccacccaggacaccrtctgggtcccactcaggcccagtcccctcccagggcctggtytgagccccacacggccatctgcccagtccttgactcrtccatggagctgagggtcggaggaaccttccttgggggcagcagcccttcccgggggcctacccagtgccccacagcagaacccgtgggcgctcgtgttgtgcgggccctgctcctctgccccgaaaccactggctggycccttccctgagccctggccaagattcaggctgcaggggaagaaagaacatgaccgggaggttgtgaccccaacccaaggtcmccccccaggggtgccgcatacaggaggtgcttaataaacgggtcttttgacttcctca

SEQ ID NO: 6500 - DNA, 1711 bp, Homo sapiens
gcgccggaagcgcggatcacacgggcccctacaaggggcccctacaagyggccacaaggatggcaggcttcgcggagctygggctgtcatcgtggctcgtggaacaatgtcggcagctgggtttgaagcagcccacgcccgtgcagctcggctgcatccccgccatcctggagggtcgagactgcttgggctgtgctaagacaggcagtgggaagacagcagcgtttgtycttcccatcttgcagaagctgtctgaggatccctatggcatcttctgcctcgtcctgacacccaccaggggtcctgcagaattaaacaagatggccccggtgcagtggctcacacctgtaatcccagcactttgggagctccagggagctggcctaccagatcgcagagcagttccgggtcctggggaagcctctagggctgaaagactgcatcatcgtcggtggcatggacatggtggcccaggcgctggagctctcycggaaaccacacgtggtcatcgccacgccggggcgcctggcagatcacctgcgcagctccaacacttttagtataaagaagatccgcttcctggtgatggatgaggcagaccggctgctggaacagggctgcactgacttcaccgtggacctggaggccatcctggcggctgtgccggcccgcaggcagacactgctgttcagcgccacgctgaccgacacactccgggagctgcagggtctggccaccaaccagcccttcttctgggaagcacaggccccggtgagcaccgtggagcagctggaccagcrctacctgctggtgcctgagaaggtcaaggacgcctacctggtccacctgatccagcgcttccaggatgagcacgaggactggtccattatcatcttcaccaacacgtgcaaaaagaacgctttgccgccctagccaagttcaagkccagcatctaccggatcctgatygcaacagacgtggcctcccggggcctggacatccctacggtacaggtggtcatcaaccacaacacccccgggctccccaagatctacatccaccgagtcggccggacggcccgtgcagggcggcagggtcaggccatcacgctggtgacacagtacgacatccacctggtgcacgccatcgaggagcagatcaagaagaagctggaggagttctccgtggaagaggccgaggtgctacagatcctcacacaggtcaacgtggtgcgaagagagtgtgagatcaaactggaggcggcccactttgacgaaaagaaggagatcaacaaacggaagcagctgatcctggaggggaaggaccctgacctggaggccaagcgcaaggctgagctggccaagatcaagcagaagaaccggcgcttcaaggagaaggtggaggagacgctgaagygacagaaggctggcagggctggccacaaggggcgtccacccaggacaccrtctgggtcccactcaggcccagtcccccagtgccccacagcagaacccgtgggcgctcgtgttgtgcgggccctgctcctctgccccgaaaccactggctggycccttccctgagccctggccaagattcaggctgcaggggaagaaagaacatgaccgggaggttgtgaccccaacccaaggtcmccccccaggggtgccgcatacaggaggtgcttaataaacgggtcttttgacttcctcag

SEQ ID NO: 6501 - DNA, 2797 bp, Homo sapiens
gtaccacctcatggagacccccgcggccgccgcccccgctgggagcttattcccctccttcctgctcctggcctgcgggacgctggtggccgccttgctgggcgccgctcaccgcctggggctcttctatcagctgctgcacaaggtggacaaggcaagcgtccggcatggcggagagaacgtggccgytgtgctgagggcccatggtgtgcggttcatcttcacgctggtcggtgggcacatttccccgctgctggtggcctgtgagaaactgggcatccgtgtggtggacacacgccatgaggtcacrgccgtctttgctgctgatgctatggcccgcctgtccgggacggtgggcgtggcggcagtgacagcaggccctggcctcaccaacacggtgactgcggtgaagaatgctcagatggctcagtccccartcctgcttctgggtggggctgccagcactctgctgcagaaccggggtgcgctccaggctgttgatcagctgtcccttttccggccactctgtaagttttgtgtgtctgtgcggagggtgcgggacattgtgcccaccctgagggccgcgatggctgccgcccagtcgggcaccccaggtccggtgtttgtggagctgcccgttgacgtgctktacccctacttcatggtccagaaggagatggtgccagccaagccacccaagggcctcgtgggccgagtggtctcctggtatttagagaattacctggccaacctctttgcaggagcctgggagcctcagcccgagggaccgctgcccctggacatcccccaggcttccccgcagcaggttcagcgctgtgtggagatcctgagccgggccaagaggcctctgatggtgctggggagtcaggccctgctcaccccaacgtctgccgacaagcttcgggctgccgtggagaccttgggtgttccctgcttccttggagggatggcacgggggctgttaggccgcaaccaccccctccacatccgggagaaccgcagtgcggccctgaagaaggcggaygtcattgtcctagcaggaactgtgtgtgacttccgcctatcctatggccgtgtcctcagccacagcagcaagatcatcatcgtcaatcgtaatcgggaagagatgttgctcaactcagacatcttctggaagccccaggaggctgtgcagggagatgtgggttccttcgtgctgaagttagtggagggccttcagggccagacctgggccccagactgggtggaggagctgcgggaagccgaccggcagaaggagcagacctttcgggagaaggcagcgatgcctgtggcccagcacctgaacccagtgcaggtgctgcagctggtggaggaaacgctacctgacaactcaattctggtggtggatggyggggacttcgtgggcactgctgcccatctggtacagccccgcggccccctgcgctggctygatcctggggcctttgggactctgggagttggtgcaggatttgcacttggggccaagctgtgccrgccagatgctgaggtctggtgcctgtttggggacggagcttttggctacagcctcatcgaatttgatacattcgtcagacacaagatcccagtgatggccttggtagggaatgatgctggctggacacagatttctcgggagcaggtgccctctctgggcagcaacgtggcctgtggcctggcctacactgattatcacaaggcagccatgggtctgggggcccggggcttgctgctctcacgggagaacgaggatcaggtggtcaaggtgctgcacgatgcccagcagcagtgccgagacggccacccggttgtggtcaacatcctcattgggaggacggacttccgygatggctccattgctgtatagggccttgtgggtcaggacgcttggctgccttcctgcccctggactgtgtccagctggtttggagtctcatcattgcttgccctgggcctatcccatgaggcccagtgactccacaacctccctgaggaggggatggaggggtcaaatctcaragaggctctcttgtgagctcttggaccctcctcttcacggacccaactgtgccgtttgtcccctctcttatggagactgaataaaccacctctggcccatgtaggcccaagtactcagtctcaraacctgtgcatatttatttattatccacaaagatggaggtgcggaaaagaagagggagacaggagggaaccgtactctcccactggaactctggggcccactgaggcaccattattggggatttcagggtggctgggcactgcaaactgctccctcctctgtggtccmtgaaagagccccacacgcctgcttcagacgtgtccacgcacaccagtcctcacagacacacacacacatgcatggaggcaataaatatgttccgtaccagactgcccccagcctgacgcttcagggggccccctccaaaagggaggggtttaagtgctcaatttttttcgggggggggggggcaaggggggggcaaggagatggggattggaaaggccagactctgttatctccatttgctgactagaggccaatcgtggggtcttccccggraaagggtaggggaaaccagctgtttctctataagccccaggctacccctgtgtccatgctggaacccaggataggggctgccccccacaaasagtgcctcatgctagtctttgtgtcgtccaagggagggagaaacagtgcagtgctcaaagctaatactgatttggttgg

SEQ ID NO: 6502 - DNA, 3075 bp, Homo sapiens
aggtgartagcgtcgggggtcgagctggtgtgggagaaccacatcctgatgcgatgtgacctcgacccagcctggcccggggtcggggatcaggctcgggcccgtgcgctctttaagggagaggcgkgggttgcgtggagggtcgcgcccgctaacccgggggcgtgacctcgtgcctcttggtgacgtaacatggggcgggctcactactggggctgagatttggggtccggttgtggaaagagaggcggggcttccgcctgtccattgacaagtaggtaccacctcatggagacccccgcggccgccgcccccgctgggagcttattcccctccttcctgctcctggcctgcgggacgctggtggccgccttgctgggcgccgctcaccgcctggggctcttctatcagctgctgcacaaggtggacaaggcaagcgtccggcatggcggagagaacgtggccgytgtgctgagggcccatggtgtgcggttcatcttcacgctggtcggtgggcacatttccccgctgctggtggcctgtgagaaactgggcatccgtgtggtggacacacgccatgaggtcacrgccgtctttgctgctgatgctatggcccgcctgtccgggacggtgggcgtggcggcagtgacagcaggccctggcctcaccaacacggtgactgcggtgaagaatgctcagatggctcagtccccartcctgcttctgggtggggctgccagcactctgctgcagaaccggggtgcgctccaggctgttgatcagctgtcccttttccggccactctgtaagttttgtgtgtctgtgcggagggtgcgggacattgtgcccaccctgagggccgcgatggctgccgcccagtcgggcaccccaggtccggtgtttgtggagctgcccgttgacgtgctktacccctacttcatggtccagaaggagatggtgccagccaagccacccaagggcctcgtgggccgagtggtctcctggtatttagagaattacctggccaacctctttgcaggagcctgggagcctcagcccgagggaccgctgcccctggacatcccccaggcttccccgcagcaggttcagcgctgtgtggagatcctgagccgggccaagaggcctctgatggtgctggggagtcaggccctgctcaccccaacgtctgccgacaagcttcgggctgccgtggagaccttgggtgttccctgcttccttggagggatggcacgggggctgttaggccgcaaccaccccctccacatccgggagaaccgcagtgcggccctgaagaaggcggaygtcattgtcctagcaggaactgtgtgtgacttccgcctatcctatggccgtgtcctcagccacagcagcaagatcatcatcgtcaatcgtaatcgggaagagatgttgctcaactcagacatcttctggaagccccaggaggctgtgcagggagatgtgggttccttcgtgctgaagttagtggagggccttcagggccagacctgggccccagactgggtggaggagctgcgggaagccgaccggcagaaggagcagacctttcgggagaaggcagcgatgcctgtggcccagcacctgaacccagtgcaggtgctgcagctggtggaggaaacgctacctgacaactcaattctggtggtggatggyggggacttcgtgggcactgctgcccatctggtacagccccgcggccccctgcgctggctygatcctggggcctttgggactctgggagttggtgcaggatttgcacttggggccaagctgtgccrgccagatgctgaggtctggtgcctgtttggggacggagcttttggctacagcctcatcgaatttgatacattcgtcagacacaagatcccagtgatggccttggtagggaatgatgctggctggacacagatttctcgggagcaggtgccctctctgggcagcaacgtggcctgtggcctggcctacactgattatcacaaggcagccatgggtctgggggcccggggcttgctgctctcacgggagaacgaggatcaggtggtcaaggtgctgcacgatgcccagcagcagtgccgagacggccacccggttgtggtcaacatcctcattgggaggacggacttccgygatggctccattgctgtatagggccttgtgggtcaggacgcttggctgccttcctgcccctggactgtgtccagctggtttggagtctcatcattgcttgccctgggcctatcccatgaggcccagtgactccacaacctccctgaggaggggatggaggggtcaaatctcaragaggctctcttgtgagctcttggaccctcctcttcacggacccaactgtgccgtttgtcccctctcttatggagactgaataaaccacctctggcccatgtaggcccaagtactcagtctcaraacctgtgcatatttatttattatccacaaagatggaggtgcggaaaagaagagggagacaggagggaaccgtactctcccactggaactctggggcccactgaggcaccattattggggatttcagggtggctgggcactgcaaactgctccctcctctgtggtccmtgaaagagccccacacgcctgcttcagacgtgtccacgcacaccagtcctcacagacacacacacacatgcatggaggcaataaatatgttccgtaccagactgcccccagcctgacgcttcagggggccccctccaaaagggaggggtttaagtgctcaatttttttcgggggggggggggcaaggggggggcaaggagatggggattggaaaggccagactctgttatctccatttgctgactagaggccaatcgtggggtcttccccggraaagggtaggggaaaccagctgtttctctataagccccaggctacccctgtgtccatgctggaacccaggataggggctgccccccacaaasagtgcctcatgctagtctttgtgtcgtccaagggagggagaaacagtgcagtgctcaaagctaatactgatttggttgg

SEQ ID NO: 6503 - DNA, 2893 bp, Homo sapiens
ccaagtgggccacccgggcacggccacgctcccgggtcacgtgacacggagggggccgaattctgctggaggcagcgccatatcctggaggtgaaggtaccacctcatggagacccccgcggccgccgcccccgctgggagcttattcccctccttcctgctcctggcctgcgggacgctggtggccgccttgctgggcgccgctcaccgcctggggctcttctatcagctgctgcacaaggtggacaaggcaagcgtccggcatggcggagagaacgtggccgytgtgctgagggcccatggtgtgcggttcatcttcacgctggtcggtgggcacatttccccgctgctggtggcctgtgagaaactgggcatccgtgtggtggacacacgccatgaggtcacrgccgtctttgctgctgatgctatggcccgcctgtccgggacggtgggcgtggcggcagtgacagcaggccctggcctcaccaacacggtgactgcggtgaagaatgctcagatggctcagtccccartcctgcttctgggtggggctgccagcactctgctgcagaaccggggtgcgctccaggctgttgatcagctgtcccttttccggccactctgtaagttttgtgtgtctgtgcggagggtgcgggacattgtgcccaccctgagggccgcgatggctgccgcccagtcgggcaccccaggtccggtgtttgtggagctgcccgttgacgtgctktacccctacttcatggtccagaaggagatggtgccagccaagccacccaagggcctcgtgggccgagtggtctcctggtatttagagaattacctggccaacctctttgcaggagcctgggagcctcagcccgagggaccgctgcccctggacatcccccaggcttccccgcagcaggttcagcgctgtgtggagatcctgagccgggccaagaggcctctgatggtgctggggagtcaggccctgctcaccccaacgtctgccgacaagcttcgggctgccgtggagaccttgggtgttccctgcttccttggagggatggcacgggggctgttaggccgcaaccaccccctccacatccgggagaaccgcagtgcggccctgaagaaggcggaygtcattgtcctagcaggaactgtgtgtgacttccgcctatcctatggccgtgtcctcagccacagcagcaagatcatcatcgtcaatcgtaatcgggaagagatgttgctcaactcagacatcttctggaagccccaggaggctgtgcagggagatgtgggttccttcgtgctgaagttagtggagggccttcagggccagacctgggccccagactgggtggaggagctgcgggaagccgaccggcagaaggagcagacctttcgggagaaggcagcgatgcctgtggcccagcacctgaacccagtgcaggtgctgcagctggtggaggaaacgctacctgacaactcaattctggtggtggatggyggggacttcgtgggcactgctgcccatctggtacagccccgcggccccctgcgctggctygatcctggggcctttgggactctgggagttggtgcaggatttgcacttggggccaagctgtgccrgccagatgctgaggtctggtgcctgtttggggacggagcttttggctacagcctcatcgaatttgatacattcgtcagacacaagatcccagtgatggccttggtagggaatgatgctggctggacacagatttctcgggagcaggtgccctctctgggcagcaacgtggcctgtggcctggcctacactgattatcacaaggcagccatgggtctgggggcccggggcttgctgctctcacgggagaacgaggatcaggtggtcaaggtgctgcacgatgcccagcagcagtgccgagacggccacccggttgtggtcaacatcctcattgggaggacggacttccgygatggctccattgctgtatagggccttgtgggtcaggacgcttggctgccttcctgcccctggactgtgtccagctggtttggagtctcatcattgcttgccctgggcctatcccatgaggcccagtgactccacaacctccctgaggaggggatggaggggtcaaatctcaragaggctctcttgtgagctcttggaccctcctcttcacggacccaactgtgccgtttgtcccctctcttatggagactgaataaaccacctctggcccatgtaggcccaagtactcagtctcaraacctgtgcatatttatttattatccacaaagatggaggtgcggaaaagaagagggagacaggagggaaccgtactctcccactggaactctggggcccactgaggcaccattattggggatttcagggtggctgggcactgcaaactgctccctcctctgtggtccmtgaaagagccccacacgcctgcttcagacgtgtccacgcacaccagtcctcacagacacacacacacatgcatggaggcaataaatatgttccgtaccagactgcccccagcctgacgcttcagggggccccctccaaaagggaggggtttaagtgctcaatttttttcgggggggggggggcaaggggggggcaaggagatggggattggaaaggccagactctgttatctccatttgctgactagaggccaatcgtggggtcttccccggraaagggtaggggaaaccagctgtttctctataagccccaggctacccctgtgtccatgctggaacccaggataggggctgccccccacaaasagtgcctcatgctagtctttgtgtcgtccaagggagggagaaacagtgcagtgctcaaagctaatactgatttggttgg

SEQ ID NO: 6504 - DNA, 1671 bp, Homo sapiens
cgcccaggtgtttacctggcactcaggtgcccctggccggcagcgccgccgtggtcccggagcgcggcgacatgccggagctggtggtgaccgcgctgctggcgccgtcgcgcctgtcgctgaagctgctgcgcgccttcatgtggagcctggtgttctcggtggcgctggtggccgcggcggtctacggctgcatagcgctcacgcacgtgctgtgccggccccggcgcggctgctgcgggcgccgtcggagcgcgtcccccgcctgcctgagcgacccctcgctgggtgagcacggtttcctgaacctcaagagctcgggcctgcgtctgcactatgtctcggctggacgaggtaacggacccctcatgctgtttctgcacggcttccctgagaactggttctcctggcgttaccagctccgggagttccagagccgcttccatgttgtggctgtggacttgcgaggctatggcccctcggatgcacctcgggatgtggactgctacacaatcgacctgctgctggtggacatcaaagatgtcatcctaggcctgggttactcgaagtgcatccttgtggcccatgactggggtgccctccttgcctggcatttctccatctactacccatccctggtcgagcggatggttgtggtcagtggtgcccccatgtcggtgtaccaagactattccctgcaccacatcagccagttcttccgttcccactacatgttcctgttccagctgccctggctgcccgagaagctgctgtctatgtctgactttcagattctgaagaccaccctcacccaccgcaagacaggcatcccatgcttgacccccagcgagctcgaggccttcctttataacttctcacagcctggtggcctcactgggcccctcaactactaccgaaacctcttcaggaacttccccctggaaccccaggagctgaccacacccacattgctgctgtggggggagaaggacacttacttggagctggggctggtggaagccatcggcagcygctttgtgccgggccgcttggaggcccacatcctgccaggcatagggcattggatcccacagagcaacccccaggagatgcaccagtacatgtgggccttcttgcaagacctgctggactagtggtccttgctggcctgcccaggaggcatggatactcaggaaggaacacacacccattatctgtgtgtgcctgggagtccatacaatgtccatacatgggtgaactcttgaatcgctcataggcatgggactcctggatcccacacaagcgcacctatgggtgcctcgggacacaccaacccctatactcacacacaggcatggatgcatgtgtgtgtaacaaacactttgaccctgggaactgggtatacctctcttccagtggagccagatgccgagaccgagtgtcccacctcctcccttcctggggcctcactctgcgctttgccaaagtcgcttctctgccatagctgcacagaccttaaaccctgaccttcctgtccctgccttcgacctcctgcctgggtcttcagctcagtgctactctgaatacaatactgctgaccacatttggctacttcarcttaaatgtatgttaattgaaatgaaatacaatgaaaatgcagtgctcagtccc

SEQ ID NO: 6505 - DNA, 1809 bp, Homo sapiens
aggtgtttacctggcactcaggtgagtggtgcgctctggctgttttctgtcggagccgcccgcctcttccttcagcgcgtcccacaaatcccgacggcacggaggggccccaggccaagggcgatgggcccctgagccctgacaccgcttcgccgctgctgcaggtgcccctggccggcagcgccgccgtggtcccggagcgcggcgacatgccggagctggtggtgaccgcgctgctggcgccgtcgcgcctgtcgctgaagctgctgcgcgccttcatgtggagcctggtgttctcggtggcgctggtggccgcggcggtctacggctgcatagcgctcacgcacgtgctgtgccggccccggcgcggctgctgcgggcgccgtcggagcgcgtcccccgcctgcctgagcgacccctcgctgggtgagcacggtttcctgaacctcaagagctcgggcctgcgtctgcactatgtctcggctggacgaggtaacggacccctcatgctgtttctgcacggcttccctgagaactggttctcctggcgttaccagctccgggagttccagagccgcttccatgttgtggctgtggacttgcgaggctatggcccctcggatgcacctcgggatgtggactgctacacaatcgacctgctgctggtggacatcaaagatgtcatcctaggcctgggttactcgaagtgcatccttgtggcccatgactggggtgccctccttgcctggcatttctccatctactacccatccctggtcgagcggatggttgtggtcagtggtgcccccatgtcggtgtaccaagactattccctgcaccacatcagccagttcttccgttcccactacatgttcctgttccagctgccctggctgcccgagaagctgctgtctatgtctgactttcagattctgaagaccaccctcacccaccgcaagacaggcatcccatgcttgacccccagcgagctcgaggccttcctttataacttctcacagcctggtggcctcactgggcccctcaactactaccgaaacctcttcaggaacttccccctggaaccccaggagctgaccacacccacattgctgctgtggggggagaaggacacttacttggagctggggctggtggaagccatcggcagcygctttgtgccgggccgcttggaggcccacatcctgccaggcatagggcattggatcccacagagcaacccccaggagatgcaccagtacatgtgggccttcttgcaagacctgctggactagtggtccttgctggcctgcccaggaggcatggatactcaggaaggaacacacacccattatctgtgtgtgcctgggagtccatacaatgtccatacatgggtgaactcttgaatcgctcataggcatgggactcctggatcccacacaagcgcacctatgggtgcctcgggacacaccaacccctatactcacacacaggcatggatgcatgtgtgtgtaacaaacactttgaccctgggaactgggtatacctctcttccagtggagccagatgccgagaccgagtgtcccacctcctcccttcctggggcctcactctgcgctttgccaaagtcgcttctctgccatagctgcacagaccttaaaccctgaccttcctgtccctgccttcgacctcctgcctgggtcttcagctcagtgctactctgaatacaatactgctgaccacatttggctacttcarcttaaatgtatgttaattgaaatgaaatacaatgaaaatgcagtgctcagtccc

SEQ ID NO: 6506 - DNA, 1473 bp, Homo sapiens
atgcggggcaatgaggaggacatgmggctgatggaggatctgggccactacttccgtgatgtccaactctggtggcttgggtctttctaccctgtcctgcatctcgtccaccctaygttcrctgcccctgtgctccaggcttcagctgctgttgcactcaaggatatgagtttctatggcttcctgaagccctggctgggggatgggctcctgattagtgccggtgacaagtggagatggcaccgccacctgctcacacctgccttccacttcaaaatcctgaagccctatgtgaagattttcaatgagagcacgaacatcatgcacgccaaatggcaacgcctggccttggagggcagtgtccgtctggaaatgtttgagcacatcagcctcatgaccttggacagtctgcagaaatgcatcttcagctttgacagcaattgtcaggacgaatatattgatgccatcttggagctcagtgccctcagtctgaaacggcaccagcacatcttcctgctcacggacttcttgtacttcctcactcccaatgggcgacgcttctgcagggcctgtgacatagtgcacaacttcacagatgctgtcatccaggagcggcgtcgcaccctcactagccagggtgtcgatgacttcctgcaggccaaggccaagtccaagactttggacttcattgacgtgctcttgctggccaaggatgaaaatggaaagaagttgtcagatgagaacataagarcggaggctgacaccttcatgtctggkggccatgacaccwcggccagtggtctctcctgggtcctgtacaacctcgcgaggtacccagaataccaggagcactgccgacaggaggtgcaagagctcctgaagaacggtgatcctaaagagattgaatgggatgacytggcccagttgcccttcctgaccatgtgcctgaaggagagcctgcggctgcattccccagtctccaggatccaccgctgctgcccccaggacggggtgctcccggatggccgggtcatccccaaagggaacacttgcaccatcagcatctttgggatccatcacaacccttcagtctggccggacccggaggtgctaccccttccsccttctccatcccggggcctggtctatgacccctttcgcttcgacccagaaaatctccagaagacatcacctctggcttttattcccttctcagcagtgcccagacgaggttcccggcgcgatggggccgggatgggggtcctgggcacagtcagagtccccaccccctcccccgggaactgcatcggccagacgttcgccatggctgagatgaaggtggtcctggcgctcackctgctgcgcttccgcgtcctgccggaccacgcggagccccgcaggaagytgsagctgatcgtgcgcgcggaggatggactttggctacgggtggagcccctgagcgcggatctgcag

SEQ ID NO: 6507 - DNA, 3706 bp, Homo sapiens
ctcggctcggcccggcccgggccgcagcatggccgagccgctactcaggaaaaccttctcccgcctgcggggccgggagaaacttccccggaaaaagtcggacgccaaggagcgcggccacccagcccagcgcccagagcccagccctccagagccagagccccaggctcccgaagggtcccaggccggagcagaggggccctccagccccgaggcatcaaggagccctgcacggggagcctacctgcaaagcctggagcccagtagccgccgatgggtgctgggtggggccaagccagctgaggacacctctttagggcctggggtacctggcactggggagcccgccggcgagatctggtacaaccccatccctgaggaagaccccagacctccagcacctgagcccccggggccacagcctggctcagctgagtcagagggcctggccccccaaggtgcagcccccgccagccccccaaccaaagcctcccgcaccaagtccccgggccccgccaggcgcctctccataaagatgaagaagctgccggaactgcggcgccgcctgagcctgcgaggcccccgggctggcagggagcgcgagagggctgcccctgcgggctccgtcatcagccgctaccacctggacagcagcgtggggggccccgggccggcagcagggcctgggggcacccggagcccgagggccggttacctcagcgacggggactcaccggagcgcccagctgggcccccatcacccacctccttccggccctacgaggtgggtcccrcagcccgggcacccccggccgcactctggggccgcctcagcctgcacctgtacggtctcggggggctgcggccagcgccgggggccacccccagggacctctgctgcctactgcaagtggatggggaggccagggcccgaacagggccactgcgaggggggccggacttcctgcggctggaccacaccttccacctggagctggaggccgccaggctcctgcgcgccctggtgcttgcgtgggaccctggcgtgagaaggcaccggccctgtgcccagggcaccgtgctgctgcccacggtcttccgagggtgccaggcccaacagctggccgtgcgcctggagcctcaggggctgctgtatgccaagctgaccctgtcggagcagcaggaagcccctgccacagctgagccccgcgtctttgggctgcccctgccactgctggtggagcgggagcggccccccggccaggtgcccctcatcatccagaagtgcgttgggcagatcgagcgccgagggctgcgggtagtgggactgtaccgtctttgtggctcagcggcagtgaagaaagagcttcgggatgcctttgagcgggacagtgcagcggtctgcctatctgaggacctgtaccccgatatcaatgtcatcactggcatcctcaaggattatcttcgagagttgcccaccccactcatcacccarcccctgtataaggtggtactggaggccatggcccgggaccccccaaacagagttccccccaccactgagggcacccgagggctcctcagctgcctgccagatgtggaaagggccacgctgacgcttctcctggaccacctgcgcctcgtctcctccttccatgcctacaaccgcatgaccccacagaacttggccgtgtgcttcgggcctgtgctgctgccggcacgccaggcgcccacaaggcctcgtgcccgcagctccggcccaggccttgccagtgcagtggacttcaagcaccacatcgaggtgctgcactacctgctgcagtcttggccagatccccgcctgccccgacaatctccagatgtcgcgccttacttgcgacccaaacgacagccacctctgcacctgccgctggcagaccccgaagtggtgactcggccccgcggtcgaggaggccccgaaagccccccgagcaaccgctacgccggcgactggagcgtttgcgggcgggacttcctgccctgygggcgggatttcctgtccgggccagactacgaccacgtgacgggcagtgacagcgaggacgaggacgaggaggtcggcgagccgagggtcaccggtgacttcgaagacgacttcgatgcgcccttcaacccgcacctgaatctcaaagacttcgacgccctcatcctggatctggagagagagctctccaagcaaatcaacgtgtgcctctgagccagatgacggggtgggaccccggttagtaaggaccgggcgcccagtggctaaggcggtgccctggtgaccaaggagagccagacctgttgctcaggccgagctcctggttgccagcgagttaccacgggaccagtcgcgtgtatggctgagactcattcccagtttccagggcccggtatttggacactagttgccaagtctggggcctggggattttagggaccagcggttgtgaccatctttcctgagcaccaagggcttccccttttgttgccaaaaaggtagttctcgcgcttgctaggctggcctctcttgcctccccttggccggggcaacaccagttactgtgagcatcaccctggtgtggtgagtcacctctagtcggccctcttgctgctgccaaccaaatcagtattagctttgagcactgcactgtttctccctcccttggacgacacaaagactagcatgaggcactstttgtggggggcagcccctatcctgggttccagcatggacacaggggtagcctggggcttatagagaaacagctggtttcccctaccctttyccggggaagaccccacgattggcctctagtcagcaaatggagataacagagtctggcctttccaatccccatctccttgccccccccttgcccccccccccccgaaaaaaattgagcacttaaacccctcccttttggagggggccccctgaagcgtcaggctgggggcagtctggtacggaacatatttattgcctccatgcatgtgtgtgtgtgtctgtgaggactggtgtgcgtggacacgtctgaagcaggcgtgtggggctctttcakggaccacagaggagggagcagtttgcagtgcccagccaccctgaaatccccaataatggtgcctcagtgggccccagagttccagtgggagagtacggttccctcctgtctccctcttcttttccgcacctccatctttgtggataataaataaatatgcacaggttytgagactgagtacttgggcctacatgggccagaggtggtttattcagtctccataagagaggggacaaacggcacagttgggtccgtgaagaggagggtccaagagctcacaagagagcctctytgagatttgacccctccatcccctcctcagggaggttgtggagtcactgggcctcatgggataggcccagggcaagcaatgatgagactccaaaccagctggacacagtccaggggcaggaaggcagccaagcgtcctgacccacaaggccctatacagcaatggagccatcrcggaagtccgtcctcccaatgaggatgttgaccacaaccgggtggccgtctcggcactgctgctgggcatcgtgcagcaccttgaccacctgatcctcgttctcccgtgagagcagcaagccccgggcccccagacccatggctgccttgtgataatc

SEQ ID NO: 6508 - DNA, 3229 bp, Homo sapiens
ctcggctcggcccggcccgggccgcagcatggccgagccgctactcaggaaaaccttctcccgcctgcggggccgggagaaacttccccggaaaaagtcggacgccaaggagcgcggccacccagcccagcgcccagagcccagccctccagagccagagccccaggctcccgaagggtcccaggccggagcagaggggccctccagccccgaggcatcaaggagccctgcacggggagcctacctgcaaagcctggagcccagtagccgccgatgggtgctgggtggggccaagccagctgaggacacctctttagggcctggggtacctggcactggggagcccgccggcgagatctggtacaaccccatccctgaggaagaccccagacctccagcacctgagcccccggggccacagcctggctcagctgagtcagagggcctggccccccaaggtaagaacaagcttcccatccccttccccaaggcgcctctccataaagatgaagaagctgccggaactgcggcgccgcctgagcctgcgaggcccccgggctggcagggagcgcgagagggctgcccctgcgggctccgtcatcagccgctaccacctggacagcagcggtgccaggcccaacagctggccgtgcgcctggagcctcaggggctgctgtatgccaagctgaccctgtcggagcagcaggaagcccctgccacagctgagccccgcgtctttgggctgcccctgccactgctggtggagcgggagcggccccccggccaggtgcccctcatcatccagaagtgcgttgggcagatcgagcgccgagggctgcgggtagtgggactgtaccgtctttgtggctcagcggcagtgaagaaagagcttcgggatgcctttgagcgggacagtgcagcggtctgcctatctgaggacctgtaccccgatatcaatgtcatcactggcatcctcaaggattatcttcgagagttgcccaccccactcatcacccarcccctgtataaggtggtactggaggccatggcccgggaccccccaaacagagttccccccaccactgagggcacccgagggctcctcagctgcctgccagatgtggaaagggccacgctgacgcttctcctggaccacctgcgcctcgtctcctccttccatgcctacaaccgcatgaccccacagaacttggccgtgtgcttcgggcctgtgctgctgccggcacgccaggcgcccacaaggcctcgtgcccgcagctccggcccaggccttgccagtgcagtggacttcaagcaccacatcgaggtgctgcactacctgctgcagtcttggccagatccccgcctgccccgacaatctccagatgtcgcgccttacttgcgacccaaacgacagccacctctgcacctgccgctggcagaccccgaagtggtgactcggccccgcggtcgaggaggccccgaaagccccccgagcaaccgctacgccggcgactggagcgtttgcgggcgggacttcctgccctgygggcgggatttcctgtccgggccagactacgaccacgtgacgggcagtgacagcgaggacgaggacgaggaggtcggcgagccgagggtcaccggtgacttcgaagacgacttcgatgcgcccttcaacccgcacctgaatctcaaagacttcgacgccctcatcctggatctggagagagagctctccaagcaaatcaacgtgtgcctctgagccagatgacggggtgggaccccggttagtaaggaccgggcgcccagtggctaaggcggtgccctggtgaccaaggagagccagacctgttgctcaggccgagctcctggttgccagcgagttaccacgggaccagtcgcgtgtatggctgagactcattcccagtttccagggcccggtatttggacactagttgccaagtctggggcctggggattttagggaccagcggttgtgaccatctttcctgagcaccaagggcttccccttttgttgccaaaaaggtagttctcgcgcttgctaggctggcctctcttgcctccccttggccggggcaacaccagttactgtgagcatcaccctggtgtggtgagtcacctctagtcggccctcttgctgctgccaaccaaatcagtattagctttgagcactgcactgtttctccctcccttggacgacacaaagactagcatgaggcactstttgtggggggcagcccctatcctgggttccagcatggacacaggggtagcctggggcttatagagaaacagctggtttcccctaccctttyccggggaagaccccacgattggcctctagtcagcaaatggagataacagagtctggcctttccaatccccatctccttgccccccccttgcccccccccccccgaaaaaaattgagcacttaaacccctcccttttggagggggccccctgaagcgtcaggctgggggcagtctggtacggaacatatttattgcctccatgcatgtgtgtgtgtgtctgtgaggactggtgtgcgtggacacgtctgaagcaggcgtgtggggctctttcakggaccacagaggagggagcagtttgcagtgcccagccaccctgaaatccccaataatggtgcctcagtgggccccagagttccagtgggagagtacggttccctcctgtctccctcttcttttccgcacctccatctttgtggataataaataaatatgcacaggttytgagactgagtacttgggcctacatgggccagaggtggtttattcagtctccataagagaggggacaaacggcacagttgggtccgtgaagaggagggtccaagagctcacaagagagcctctytgagatttgacccctccatcccctcctcagggaggttgtggagtcactgggcctcatgggataggcccagggcaagcaatgatgagactccaaaccagctggacacagtccaggggcaggaaggcagccaagcgtcctgacccacaaggccctatacagcaatggagccatcrcggaagtccgtcctcccaatgaggatgttgaccacaaccgggtggccgtctcggcactgctgctgggcatcgtgcagcaccttgaccacctgatcctcgttctcccgtgagagcagcaagccccgggcccccagacccatggctgccttgtgataatc

SEQ ID NO: 6509 - DNA, 3769 bp, Homo sapiens
ctcggctcggcccggcccgggccgcagcatggccgagccgctactcaggaaaaccttctcccgcctgcggggccgggagaaacttccccggaaaaagtcggacgccaaggagcgcggccacccagcccagcgcccagagcccagccctccagagccagagccccaggctcccgaagggtcccaggccggagcagaggggccctccagccccgaggcatcaaggagccctgcacggggagcctacctgcaaagcctggagcccagtagccgccgatgggtgctgggtggggccaagccagctgaggacacctctttagggcctggggtacctggcactggggagcccgccggcgagatctggtacaaccccatccctgaggaagaccccagacctccagcacctgagcccccggggccacagcctggctcagctgagtcagagggcctggccccccaaggtgcagcccccgccagccccccaaccaaagcctcccgcaccaagtccccgggccccgccaggcgcctctccataaagatgaagaagctgccggaactgcggcgccgcctgagcctgcgaggcccccgggctggcagggagcgcgagagggctgcccctgcgggctccgtcatcagccgctaccacctggacagcagcgtggggggccccgggccggcagcagggcctgggggcacccggagcccgagggccggttacctcagcgacggggactcaccggagcgcccagctgggcccccatcacccacctccttccggccctacgaggtgggtcccrcagcccgggcacccccggccgcactctggggccgcctcagcctgcacctgtacggtctcggggggctgcggccagcgccgggggccacccccagggacctctgctgcctactgcaagtggatggggaggccagggcccgaacagggccactgcgaggggggccggacttcctgcggctggaccacaccttccacctggagctggaggccgccaggctcctgcgcgccctggtgcttgcgtgggaccctggcgtgagaaggcaccggccctgtgcccagggcaccgtgctgctgcccacggtcttccgagggtgccaggcccaacagctggccgtgcgcctggagcctcaggggctgctgtatgccaagctgaccctgtcggagcagcaggaagcccctgccacagctgagccccgcgtctttgggctgcccctgccactgctggtggagcgggagcggccccccggccaggtgcccctcatcatccagaagtgcgttgggcagatcgagcgccgagggctgcgggtagtgggactgtaccgtctttgtggctcagcggcagtgaagaaagagcttcgggatgcctttgagcgggacagtgcagcggtctgcctatctgaggacctgtaccccgatatcaatgtcatcactgctgtgccctccttagccttagaagccagtggtgccctgaccagaggggrccctgtgttcacaggcatcctcaaggattatcttcgagagttgcccaccccactcatcacccarcccctgtataaggtggtactggaggccatggcccgggaccccccaaacagagttccccccaccactgagggcacccgagggctcctcagctgcctgccagatgtggaaagggccacgctgacgcttctcctggaccacctgcgcctcgtctcctccttccatgcctacaaccgcatgaccccacagaacttggccgtgtgcttcgggcctgtgctgctgccggcacgccaggcgcccacaaggcctcgtgcccgcagctccggcccaggccttgccagtgcagtggacttcaagcaccacatcgaggtgctgcactacctgctgcagtcttggccagatccccgcctgccccgacaatctccagatgtcgcgccttacttgcgacccaaacgacagccacctctgcacctgccgctggcagaccccgaagtggtgactcggccccgcggtcgaggaggccccgaaagccccccgagcaaccgctacgccggcgactggagcgtttgcgggcgggacttcctgccctgygggcgggatttcctgtccgggccagactacgaccacgtgacgggcagtgacagcgaggacgaggacgaggaggtcggcgagccgagggtcaccggtgacttcgaagacgacttcgatgcgcccttcaacccgcacctgaatctcaaagacttcgacgccctcatcctggatctggagagagagctctccaagcaaatcaacgtgtgcctctgagccagatgacggggtgggaccccggttagtaaggaccgggcgcccagtggctaaggcggtgccctggtgaccaaggagagccagacctgttgctcaggccgagctcctggttgccagcgagttaccacgggaccagtcgcgtgtatggctgagactcattcccagtttccagggcccggtatttggacactagttgccaagtctggggcctggggattttagggaccagcggttgtgaccatctttcctgagcaccaagggcttccccttttgttgccaaaaaggtagttctcgcgcttgctaggctggcctctcttgcctccccttggccggggcaacaccagttactgtgagcatcaccctggtgtggtgagtcacctctagtcggccctcttgctgctgccaaccaaatcagtattagctttgagcactgcactgtttctccctcccttggacgacacaaagactagcatgaggcactstttgtggggggcagcccctatcctgggttccagcatggacacaggggtagcctggggcttatagagaaacagctggtttcccctaccctttyccggggaagaccccacgattggcctctagtcagcaaatggagataacagagtctggcctttccaatccccatctccttgccccccccttgcccccccccccccgaaaaaaattgagcacttaaacccctcccttttggagggggccccctgaagcgtcaggctgggggcagtctggtacggaacatatttattgcctccatgcatgtgtgtgtgtgtctgtgaggactggtgtgcgtggacacgtctgaagcaggcgtgtggggctctttcakggaccacagaggagggagcagtttgcagtgcccagccaccctgaaatccccaataatggtgcctcagtgggccccagagttccagtgggagagtacggttccctcctgtctccctcttcttttccgcacctccatctttgtggataataaataaatatgcacaggttytgagactgagtacttgggcctacatgggccagaggtggtttattcagtctccataagagaggggacaaacggcacagttgggtccgtgaagaggagggtccaagagctcacaagagagcctctytgagatttgacccctccatcccctcctcagggaggttgtggagtcactgggcctcatgggataggcccagggcaagcaatgatgagactccaaaccagctggacacagtccaggggcaggaaggcagccaagcgtcctgacccacaaggccctatacagcaatggagccatcrcggaagtccgtcctcccaatgaggatgttgaccacaaccgggtggccgtctcggcactgctgctgggcatcgtgcagcaccttgaccacctgatcctcgttctcccgtgagagcagcaagccccgggcccccagacccatggctgccttgtgataatc

SEQ ID NO: 6510 - DNA, 2388 bp, Homo sapiens
gtagtgggactgtaccgtctttgtggctcagcggcagtgaagaaagagcttcgggatgcctttgagcgggacagtgcagcggtctgcctatctgaggacctgtaccccgatatcaatgtcatcactggcatcctcaaggattatcttcgagagttgcccaccccactcatcacccarcccctgtataaggtggtactggaggccatggcccgggaccccccaaacagagttccccccaccactgagggcacccgagggctcctcagctgcctgccagatgtggaaagggccacgctgacgcttctcctggaccacctgcgcctcgtctcctccttccatgcctacaaccgcatgaccccacagaacttggccgtgtgcttcgggcctgtgctgctgccggcacgccaggcgcccacaaggcctcgtgcccgcagctccggcccaggccttgccagtgcagtggacttcaagcaccacatcgaggtgctgcactacctgctgcagtcttggccagatccccgcctgccccgacaatctccagatgtcgcgccttacttgcgacccaaacgacagccacctctgcacctgccgctggcagaccccgaagtggtgactcggccccgcggtcgaggaggccccgaaagccccccgagcaaccgctacgccggcgactggagcgtttgcgggcgggacttcctgccctgygggcgggatttcctgtccgggccagactacgaccacgtgacgggcagtgacagcgaggacgaggacgaggaggtcggcgagccgagggtcaccggtgacttcgaagacgacttcgatgcgcccttcaacccgcacctgaatctcaaagacttcgacgccctcatcctggatctggagagagagctctccaagcaaatcaacgtgtgcctctgagccagatgacggggtgggaccccggttagtaaggaccgggcgcccagtggctaaggcggtgccctggtgaccaaggagagccagacctgttgctcaggccgagctcctggttgccagcgagttaccacgggaccagtcgcgtgtatggctgagactcattcccagtttccagggcccggtatttggacactagttgccaagtctggggcctggggattttagggaccagcggttgtgaccatctttcctgagcaccaagggcttccccttttgttgccaaaaaggtagttctcgcgcttgctaggctggcctctcttgcctccccttggccggggcaacaccagttactgtgagcatcaccctggtgtggtgagtcacctctagtcggccctcttgctgctgccaaccaaatcagtattagctttgagcactgcactgtttctccctcccttggacgacacaaagactagcatgaggcactstttgtggggggcagcccctatcctgggttccagcatggacacaggggtagcctggggcttatagagaaacagctggtttcccctaccctttyccggggaagaccccacgattggcctctagtcagcaaatggagataacagagtctggcctttccaatccccatctccttgccccccccttgcccccccccccccgaaaaaaattgagcacttaaacccctcccttttggagggggccccctgaagcgtcaggctgggggcagtctggtacggaacatatttattgcctccatgcatgtgtgtgtgtgtctgtgaggactggtgtgcgtggacacgtctgaagcaggcgtgtggggctctttcakggaccacagaggagggagcagtttgcagtgcccagccaccctgaaatccccaataatggtgcctcagtgggccccagagttccagtgggagagtacggttccctcctgtctccctcttcttttccgcacctccatctttgtggataataaataaatatgcacaggttytgagactgagtacttgggcctacatgggccagaggtggtttattcagtctccataagagaggggacaaacggcacagttgggtccgtgaagaggagggtccaagagctcacaagagagcctctytgagatttgacccctccatcccctcctcagggaggttgtggagtcactgggcctcatgggataggcccagggcaagcaatgatgagactccaaaccagctggacacagtccaggggcaggaaggcagccaagcgtcctgacccacaaggccctatacagcaatggagccatcrcggaagtccgtcctcccaatgaggatgttgaccacaaccgggtggccgtctcggcactgctgctgggcatcgtgcagcaccttgaccacctgatcctcgttctcccgtgagagcagcaagccccgggcccccagacccatggctgccttgtgataatc

SEQ ID NO: 6511 - DNA, 4009 bp, Homo sapiens
  misc_feature (1)...(4009): n = A,T,C or G
tgaagaggaacctcacgccactgcctggagctccgccttagccccgtgggccccacggagtgagcggcatgcagcacccccgggcctgtccagtgtcctctggcctgctgccctgcacccccagaaggccctgacgccctggggcacttctgctctgcacaggaccacgcgggggtttgccatggtgacataaaggggcgcggaggaaggaaggagcgtgaccagcctgtggactgcgcccctggctgggaggaaggacygggggcccagatcctccactcccagtgccccacaagggcgtcgcttcctaagtctctgtgaatttgttggtcagtggacgattctcgtgtctcctcctgtgtggggccttggggtagccagggcaggccgggcctccggtggccaagktctcggaggccaggatgcctgccctggcatgcctccggaggctgtgtcggcacgtgtccccgcaggctgtccttttcctgctgttcatcttctgcctgttcagcgttttcatctcggcctactacctatatggctggaagcgaggcctggagccctcggcggatgcccccgagcctgactgcggggacccgccgcctgtggcccccagtcgcctgctgccactcaagcctgtgcaggcagccaccccttcccgcacagacccgttggtgctggtctttgtggagagcctctactcgcaactgggccaggaggtggtggccatcctggagtccagccgcttcaaataccgcacagagattgcgccgggcaagggtgacatgcccacgctcactgacaagggccgtggccgcttcgccctcatcatctatgagaacatcctcaagtatgtcaacctggacgcctggaaccgggagctgctggacaagtactgtgtggcctacggcgtgggcatcattggcttcttcaaggccaatgagaacagcctgctgagtgcgcagctcaagggcttccccctgttcctgcactcaaacctgggcctgaaggactgcagcatcaaccccaagtccccgctgctctacgtgacgcgacctagcgaggtggagaaaggtgtgctccccggcgaggactggacggtnttccagtcaaatcactccacctatgagccagtgctgctggccaagacgcgctcgtctgagtccatcccrcacctgggcgcagacgccggcctgcatgctgcactgcaygccactgtggtccaggacctgggcctgcacgacggcatccagcgcgtgctgtttggcaacaacctgaacttctggctgcacaagcttgtcttcgtggatgccgtggccttcctcacggggaagcgcctctccctgccattggaccgctacatcctggtggacattgatgacatcttygtgggcaaggagggcacacgcatgaaggtggaggacgtgaaggccctgtttgacacacagaaygaactacgcgcacacatcccaaacttcaccttcaacctgggctactcagggaaattcttccacacaggtaccaatgctgaggacgctggggatgatctgctgctgtcgtatgtgaaggagttctggtggttcccccacatgtggagccacatgcagccccaccttttccacaaccagtccgtgttggccgagcagatggccttgaacaagaagttcgctgtcgagcatggcattcccacagacatggggtatgcagtggcgccccaccactcgggcgtgtaccccgtgcacgtgcagctgtacgaggcttggaagcaggtgtggagcatccgcgtgaccagcacggaggagtacccccacctgaagccagcccgctaccgccgtggcttcatccacaatggcatcatggttctcccacggcagacctgcggcctcttcacacacaccatcttctacaacgagtaccctggcggctccagtgagctggacaagatcatcaacgggggcgagctcttcctcaccgtgctcctcaatcctatcagcatcttcatgacgcacctgtccaactatgggaatgaccgcctgggcctgtacaccttcaagcacctggtgcgcttcctgcactcctggacsaacctccggctgcagacactgccccctgtgcagttggcrcagaagtacttccagatcttctccgaggagaaggacccgctctggcaggacccctgcgaggacaaacgtcacaaagacatctggtccaaggagaagacgtgtgaccgcttcccaaagctcctcatcatcggcccccagaaaacaggcaccactgccctctacctgttcctgggcatgcaccctgacctaagcagcaactaccccagctctgagacctttgaggagatccagttttttaatggccacaactatcacaaaggcatcgactggtacatggagttcttccccatcccttccaacaccacctccgacttctactttgagaaaagcgccaactactttgattcagaagtggcgccccggcgggcagcagccctcttgcccaaagccaaggtcctgaccatcctcatcaaccccgcggaccgggcctattcctggtaccagcaccagcgagcccatgacgacccagtggccctaaagtacaccttccatgaggtgattaccgccggctctgacgcatcctcgaagctgcgtgccctccagaaccgctgcctggtccctggctggtacgccacccacatcgagcgctggctcagtgcctatcacgccaaccagattctggtcttggatggcaaactgcttcgcacagaacctgccaaagtgatggacatggtgcagaagttccttggggtgaccaacaccattgactaccacaaaaccttggcgtttgatccaaagaaaggattttggtgccaactgcttgaaggaggaaaaaccaagtgtctgggcaaaagcaagggccggaaatatcccgagatggacttggattcccgagccttcctgaaggactattaccgggaccacaacatcgagctctccaagctgctgtataagatgggccagacacttcccacttggctacgagaggacctccagaacaccaggtagccgtggccaccacagccagactgaacgtttgtgaaagctrggacatcccaccacacgctgagccagacctgcagagtgggaagctggaccagggcagctgcrcacttatgagcaakactctgwggaggtctggtggggctgggggagcacccaggcggatctgcaagcacctcggagcacccaccgctgggtctgcggcctaagggacctccctcgccagcagaggtccattccgttcccagctgctcctggggaggccgcttcctggtaggagggagtccacgagactcttttctgtccctcactgtgttccgccgactgtcccctstcgtcacccatcactccctgcttccgcagggcgcccctcagtattcgctgccatatgtccctgtcctccaggctgtaggggaggagagcctggccgggggagacagactggacatttccctgtttcgagccaggctcttccaaggggccagctgggtccccggagtcagtcctaggctggatgggagggtggccccctcaagaggactcccagcctccacatctggttcctaccttcacatctcaccctcccgttctggggaagaatttctggttcctacagtatccactccatcctcaaggcttcccgcagggccttggggcactgccttgccatcgggcccagttctccgggccccasctgcacccctttcttccccctgggatatgatgtgtggtgtttcctgtggtaaaagactgaggcaggccaggggtctgccagtaacatgttcccatgtacagacacggtccccacaccctcccagcctcaggcccaggcagacatgggcgagctggtgagactgccagccacggctttgcttagccacctgtggccgagggctctcagagacccccttaacctcccaaatactaagaagctaaaatatttt

SEQ ID NO: 6512 - DNA, 4013 bp, Homo sapiens
  misc_feature (1)...(4013): n = A,T,C or G
tgaagaggaacctcacgccactgcctggagctccgccttagccccgtgggccccacggagtgagcggcatgcagcacccccgggcctgtccagtgtcctctggcctgctgccctgcacccccagaaggccctgacgccctggggcacttctgctctgcacaggaccacgcgggggtttgccatggtgacataaaggggcgcggaggaaggaaggagcgtgaccagcctgtggactgcgcccctggctgggaggaaggacygggggcccagatcctccactcccagtgccccacaagggcgtcgcttcctaagtctctgtgaatttgttggtcagtggacgattctcgtgtctcctcctgtgtggggccttggggtagccagggcaggccgggcctccggtggccaagktctcggaggccaggatgcctgccctggcatgcctccggaggctgtgtcggcacgtgtccccgcaggctgtccttttcctgctgttcatcttctgcctgttcagcgttttcatctcggcctactacctatatggctggaagcgaggcctggagccctcggcggatgcccccgagcctgactgcggggacccgccgcctgtggcccccagtcgcctgctgccactcaagcctgtgcaggcagccaccccttcccgcacagacccgttggtgctggtctttgtggagagcctctactcgcaactgggccaggaggtggtggccatcctggagtccagccgcttcaaataccgcacagagattgcgccgggcaagggtgacatgcccacgctcactgacaagggccgtggccgcttcgccctcatcatctatgagaacatcctcaagtatgtcaacctggacgcctggaaccgggagctgctggacaagtactgtgtggcctacggcgtgggcatcattggcttcttcaaggccaatgagaacagcctgctgagtgcgcagctcaagggcttccccctgttcctgcactcaaacctgggcctgaaggactgcagcatcaaccccaagtccccgctgctctacgtgacgcgacctagcgaggtggagaaaggtgtgctccccggcgaggactggacggtnttccagtcaaatcactccacctatgagccagtgctgctggccaagacgcgctcgtctgagtccatcccrcacctgggcgcagacgccggcctgcatgctgcactgcaygccactgtggtccaggacctgggcctgcacgacggcatccagcgcgtgctgtttggcaacaacctgaacttctggctgcacaagcttgtcttcgtggatgccgtggccttcctcacggggaagcgcctctccctgccattggaccgctacatcctggtggacattgatgacatcttygtgggcaaggagggcacacgcatgaaggtggaggacgtgaaggccctgtttgacacacagaaygaactacgcgcacacatcccaaacttcaccttcaacctgggctactcagggaaattcttccacacaggtaccaatgctgaggacgctggggatgatctgctgctgtcgtatgtgaaggagttctggtggttcccccacatgtggagccacatgcagccccaccttttccacaaccagtccgtgttggccgagcagatggccttgaacaagaagttcgctgtcgagcatggcattcccacagacatggggtatgcagtggcgccccaccactcgggcgtgtaccccgtgcacgtgcagctgtacgaggcttggaagcaggtgtggagcatccgcgtgaccagcacggaggagtacccccacctgaagccagcccgctaccgccgtggcttcatccacaatggcatcatggttctcccacggcagacctgcggcctcttcacacacaccatcttctacaacgagtaccctggcggctccagtgagctggacaagatcatcaacgggggcgagctcttcctcaccgtgctcctcaatcctatcagcatcttcatgacgcacctgtccaactatgggaatgaccgcctgggcctgtacaccttcaagcacctggtgcgcttcctgcactcctggacsaacctccggctgcagacactgccccctgtgcagttggcrcagaagtacttccagatcttctccgaggagaaggacccgctctggcaggacccctgcgaggacaaacgtcacaaagacatctggtccaaggagaagacgtgtgaccgcttcccaaagctcctcatcatcggcccccagaaaacaggcaggcaccactgccctctacctgttcctgggcatgcaccctgacctaagcagcaactaccccagctctgagacctttgaggagatccagttttttaatggccacaactatcacaaaggcatcgactggtacatggagttcttccccatcccttccaacaccacctccgacttctactttgagaaaagcgccaactactttgattcagaagtggcgccccggcgggcagcagccctcttgcccaaagccaaggtcctgaccatcctcatcaaccccgcggaccgggcctattcctggtaccagcaccagcgagcccatgacgacccagtggccctaaagtacaccttccatgaggtgattaccgccggctctgacgcatcctcgaagctgcgtgccctccagaaccgctgcctggtccctggctggtacgccacccacatcgagcgctggctcagtgcctatcacgccaaccagattctggtcttggatggcaaactgcttcgcacagaacctgccaaagtgatggacatggtgcagaagttccttggggtgaccaacaccattgactaccacaaaaccttggcgtttgatccaaagaaaggattttggtgccaactgcttgaaggaggaaaaaccaagtgtctgggcaaaagcaagggccggaaatatcccgagatggacttggattcccgagccttcctgaaggactattaccgggaccacaacatcgagctctccaagctgctgtataagatgggccagacacttcccacttggctacgagaggacctccagaacaccaggtagccgtggccaccacagccagactgaacgtttgtgaaagctrggacatcccaccacacgctgagccagacctgcagagtgggaagctggaccagggcagctgcrcacttatgagcaakactctgwggaggtctggtggggctgggggagcacccaggcggatctgcaagcacctcggagcacccaccgctgggtctgcggcctaagggacctccctcgccagcagaggtccattccgttcccagctgctcctggggaggccgcttcctggtaggagggagtccacgagactcttttctgtccctcactgtgttccgccgactgtcccctstcgtcacccatcactccctgcttccgcagggcgcccctcagtattcgctgccatatgtccctgtcctccaggctgtaggggaggagagcctggccgggggagacagactggacatttccctgtttcgagccaggctcttccaaggggccagctgggtccccggagtcagtcctaggctggatgggagggtggccccctcaagaggactcccagcctccacatctggttcctaccttcacatctcaccctcccgttctggggaagaatttctggttcctacagtatccactccatcctcaaggcttcccgcagggccttggggcactgccttgccatcgggcccagttctccgggccccasctgcacccctttcttccccctgggatatgatgtgtggtgtttcctgtggtaaaagactgaggcaggccaggggtctgccagtaacatgttcccatgtacagacacggtccccacaccctcccagcctcaggcccaggcagacatgggcgagctggtgagactgccagccacggctttgcttagccacctgtggccgagggctctcagagacccccttaacctcccaaatactaagaagctaaaatatttt

SEQ ID NO: 6513 - DNA, 2403 bp, Homo sapiens
  misc_feature (1)...(2403): n = A,T,C or G
tgaagaggaacctcacgccactgcctggagctccgccttagccccgtgggccccacggagtgagcggcatgcagcacccccgggcctgtccagtgtcctctggcctgctgccctgcacccccagaaggccctgacgccctggggcacttctgctctgcacaggaccacgcgggggtttgccatggtgacataaaggggcgcggaggaaggaaggagcgtgaccagcctgtggactgcgcccctggctgggaggaaggacygggggcccagatcctccactcccagtgccccacaagggcgtcgcttcctaagtctctgtgaatttgttggtcagtggacgattctcgtgtctcctcctgtgtggggccttggggtagccagggcaggccgggcctccggtggccaagktctcggaggccaggatgcctgccctggcatgcctccggaggctgtgtcggcacgtgtccccgcaggctgtccttttcctgctgttcatcttctgcctgttcagcgttttcatctcggcctactacctatatggctggaagcgaggcctggagccctcggcggatgcccccgagcctgactgcggggacccgccgcctgtggcccccagtcgcctgctgccactcaagcctgtgcaggcagccaccccttcccgcacagacccgttggtgctggtctttgtggagagcctctactcgcaactgggccaggaggtggtggccatcctggagtccagccgcttcaaataccgcacagagattgcgccgggcaagggtgacatgcccacgctcactgacaagggccgtggccgcttcgccctcatcatctatgagaacatcctcaagtatgtcaacctggacgcctggaaccgggagctgctggacaagtactgtgtggcctacggcgtgggcatcattggcttcttcaaggccaatgagaacagcctgctgagtgcgcagctcaagggcttccccctgttcctgcactcaaacctgggcctgaaggactgcagcatcaaccccaagtccccgctgctctacgtgacgcgacctagcgaggtggagaaaggtgtgctccccggcgaggactggacggtnttccagtcaaatcactccacctatgagccagtgctgctggccaagacgcgctcgtctgagtccatcccrcacctgggcgcagacgccggcctgcatgctgcactgcaygccactgtggtccaggacctgggcctgcacgacggcatccagcgcgtgctgtttggcaacaacctgaacttctggctgcacaagcttgtcttcgtggatgccgtggccttcctcacggggaagcgcctctccctgccattggaccgctacatcctggtggacattgatgacatcttygtgggcaaggagggcacacgcatgaaggtggaggacgtgaaggccctgtttgacacacagaaygaactacgcgcacacatcccaaacttcaccttcaacctgggctactcagggaaattcttccacacaggtaccaatgctgaggacgctggggatgatctgctgctgtcgtatgtgaaggagttctggtggttcccccacatgtggagccacatgcagccccaccttttccacaaccagtccgtgttggccgagcagatggccttgaacaagaagttcgctgtcgagcatggcattcccacagacatggggtatgcagtggcgccccaccactcgggcgtgtaccccgtgcacgtgcagctgtacgaggcttggaagcaggtgtggagcatccgcgtgaccagcacggaggagtacccccacctgaagccagcccgctaccgccgtggcttcatccacaatggcatcatggttctcccacggcagacctgcggcctcttcacacacaccatcttctacaacgagtaccctggcggctccagtgagctggacaagatcatcaacgggggcgagctcttcctcaccgtgctcctcaatcctgtgagtgctccacagcccatggctgctggtgagaaggggctgctgcacagcctgtctgcagctgacacaggcttcctggagccaggaaagggtggagaggcatgagtgagtgcctggcagttgggagacccactctccagcactggccctgcctcggctgtgtgaccttggctaaagaatccgagcatgctttttttttcctttcctaatcatgtactttaatacaaaagtgttggcatttttatgcatgttcccttcagtctttgctcatgtgtgtatacacacatacacagatacacacacatatatgaacaacatttgagttttctaggtctcgctttccttatttgtaaaatgcaaacaattacctctgctttaataatattaaataaacttcaagtggtggttgttattc

SEQ ID NO: 6514 - DNA, 4754 bp, Homo sapiens
agtatgttttgcagacaagacccagagaagtccagactggacttgttgcagactgcaaaactgccattggaaggcctcygtcccagtccttctacagagtagccagtgggattcccagccatgggcgaggtgacagcagaggaggtggagaagttcctggactcgaatattggctttgccaaacagtactacaacctccactaycgggccaagctcatctccgacctccttggggccaaggaggctgccgtggacttcagcaactaccactccccgagcagcatggaggagagcgaaatcatctttgatctcctgcgggactttcaggagaatttacagacagagaaatgcatcttcaatgtcatgaagaagctgtgcttcctcctgcaggcagaccgcatgagcctgttcatgtaccggacccgcaatggcatcgcagagctggccaccmggcttttcaatgtccacaaggatgctgtcctcgaggactgcctggtgatgcccgaccaagagatcgtcttccctttggacatgggcatcgtgggccatgtcrcacactctaagaagattgctaacgtccccaayacagaggaggatgagcatttctgtgactttgtggacatcctcacagagtacaagaccargaacatcttggcttcccccataatgaatgggaaggatgtggtggccataatcatggctgtgaataaagtggatggatcccacttcaccaagagagatgaagagattcttctcaagtacctcarttttgcaaatctaatcatgaaggtgtaccacctgagttacctgcacaactgtgaaactcgacgtggccagatactgctgtggtctgggagcaaagtctttgaagaacttacggacatcgaacgacagttccacaaagccctgtacacagtccgtgctttcctcaactgtgacagatactctgtgggtctcttagacatgaccaagcagaaggaattttttgatgtgtggccggttctgatgggtgaagttccaccttactstggtcccaggactccggatggaagagaaattaacttttacaaggtcattgactacatcctgcatggcaaagaggacatcaaagtcatcccgaatccacctcctgaccaytgggctttagtaagcggtctcccagcttatgttgcccagaatggcctgatttgcaacatcatgaatgcgcctgcggaggacttttttgcatttcagaaagaacctctggatgagtctggatggatgattaaaaatgtgctttcaatgccgattrtgaacaagaaggaagaaattgttggagtggccacattttacaatcgtaaagatgggaagccctttgatgaaatggatgagacgctcatggagtctttgactcaatttctgggctggtctgtcttaaatcctgacacctatgagtcaatgaataaacttgaaaataggaaggatattttccaggacatagtaaaatatcatgtgaagtgtgacaatgaagaaattcagaaaatcttgaaaaccagagaggtgtatgggaaggagccatgggagtgtgaggaagaggagctggctgagatcctgcaagcggagctgccagatgcagataaatacgaaattaataaatttcacttcagtgacttacccctaacagaastggagctggtaaaatgtggaatacagatgtattatgagctcaaagtggtggataaatttcacattccacaagaggccctggtgcggttcatgtactccctgagtaagggctaccgcaagatcacctaccacaactgrcggcacggcttcaacgtggggcagaccatgttctccctgctggtgacgggaaagctgaagcgctacttcacggacctagaggccttggccatggtcactgctgctttytgccatgacattgaccacagaggcaccaataacctctaccagatgaaatcccagaacccactggccaagctccatgggtcctctatcttggaaagacaccacttggagtttggcaaaacactgctcagagacgagagcctgaatatctttcaaaacctcaatcgtcgacagcatgagcatgccatccacatgatggacattgcaatcattgccacagacctcgccctgtatttcaagaagaggacgatgttccaaaagatcgtggatcagtctaagacatatgagagtgaacaggagtggacacagtacatgatgctggagcagacacggaaggaaatcgttatggccatgatgatgaccgcctgtgatctctcagccatcaccaaaccctgggaggtgcagagccaggtagctctgctggtggctgctgaattctgggaacaaggtgacctggagcgcacggtgctgcaacagaatcccattcccatgatggacagaaacaaagcagatgaactccctaagcttcaagtcggcttcattgacttygtttgcaccttcgtctacaaggaattctcccgtttccacgaggagatcaccccaatgttggaygggatcaccaacaatcgcaaggartggaaggcgcttgctgatgagtacgatgccaagatgaaggtgcaggaggagaagaagcagaaacagcagtcggccaagtcagcagccgcaggaaatcagccggggggaaaccccagcccagggggtgcaactacatccaagtcctgctgcatccagtaacaccactggggatgtgctggctggacggcaccaccctttcctgggaagagatgactcaagccagtggaagaccacacaccttgagaagtagaagagtcataggatttgaaagctgttagagaatttagcttccaggactgttcaatcttttggcttccctgggccacattggaagaattgtcttgggtcacacataaaatacagtaacactaatgatagctgttgaacttaaaaaaaaaaaatcgccaaaaaaaaaaatttcataatgttttaagaaagtttatgaatttgtgttgggccgcattcaaagccgtcctgggctgcatgtggcccacgggccgtgggttgaacaagcttggcttataccttatccagtggcttttaaacattcttttagtcttgagaactgcctattgagctaaaaccaatattctagctttcatagacatcagttaaacatttaattacatttaattaatgccagattcactggcttgcttagaatcatttttgttcttatactttcagttaatgtattgtaaaaattttcaatcattttcaaaagtagagaattgtacgttgaatccccacatacccatcacccagatyccaatatcaagattttgctacatgcatttcgtctgtcctttttacattttcttttcaattttttttcttacctgaagtgtttaaaggcaaatcctggccaggcgtggtggctcacacctgtaatcccagcacttcaggaggctgaggygggcagactgcatgagcccaggagtctgagaccaacctgrgcaaaatggcaaaaccctgtctctacaaaaaatacaaaaattagcactcacctgtagtctcagctacctgggaggcagaggtgagaggatctcttgaacccaggaggcggaagttgcagtgagctgagatcatgctactgcactccagcttgggcgaccgagcgagactctgactcaaacaaaagcaaaagaaaaggcaaatcccaaacatatcatttcacacctctactatctcatctttaaagaaataagtatgttttctaacataaccacatcactggcccatgcaaccaatgcctgcctaatacccagctgtgatctatgctttgatgggctgcacagaccccaagcttcagcaaaggacttgggaccccaccagctttgagtgctgttgacagacccttagtatcaaccccatcaggtgttactgcagccttccccagggtggcctacacccaatgactgatccatgccaggtggagaggcctggccatcttggctgagcatgggataactgtgcagggctgttccagctccacgactcctcgtggggtccactaaggctgtcrctgggctcacatcccaactcgacttctccctctgcccactcctatttccttcccttccccaagcatcggtccccagggcactgcttaataagcatcctgcagactaagtccattttagagtctgctttctgggacacccaacttgtgatgccagcccttaatcaaccttccttcattctcatgaacgttttcaatggttggcttgcctgaatctgatccaaacaaattcacatattgaatttagttgtttctttttgttggtttttagaaaaaagaagatgtactttttattcttggatttttcattgatttcacagagtataaattaagtcagattattctcaattccagaacttctgtttcttaaattagcaggcattctgttggtttaaaaagatagatgttggccgggcgcggtggctcacgcctgtaattccagcactttgggaggccaaggtgggtggatcacctgaggtcaggagttcaagaccagcctggccaacatggtgaaaccccatctctactaaaaatacaaaaattagctgggtgtggtggtgtgcacctgtaatcccagctactcaggaggctgaggcaggagaatcgcttgaacctgggaggcgaaggttgcagtgagctgagatcatgccactgcactccagcctgggcaacaagagcaagactccgt

SEQ ID NO: 6515 - DNA, 2997 bp, Homo sapiens
gaaatgtttcactttgaccaaggtctgcaaaataatggggagcttacaaaatggtgcagttgggactaacaccaggtagccgagaccacagacgggaaagctgaagcgctacttcacggacctagaggccttggccatggtcactgctgctttytgccatgacattgaccacagaggcaccaataacctctaccagatgaaatcccagaacccactggccaagctccatgggtcctctatcttggaaagacaccacttggagtttggcaaaacactgctcagagacgagagcctgaatatctttcaaaacctcaatcgtcgacagcatgagcatgccatccacatgatggacattgcaatcattgccacagacctcgccctgtatttcaagaagaggacgatgttccaaaagatcgtggatcagtctaagacatatgagagtgaacaggagtggacacagtacatgatgctggagcagacacggaaggaaatcgttatggccatgatgatgaccgcctgtgatctctcagccatcaccaaaccctgggaggtgcagagccaggtagctctgctggtggctgctgaattctgggaacaaggtgacctggagcgcacggtgctgcaacagaatcccattcccatgatggacagaaacaaagcagatgaactccctaagcttcaagtcggcttcattgacttygtttgcaccttcgtctacaaggaattctcccgtttccacgaggagatcaccccaatgttggaygggatcaccaacaatcgcaaggartggaaggcgcttgctgatgagtacgatgccaagatgaaggtgcaggaggagaagaagcagaaacagcagtcggccaagtcagcagccgcaggaaatcagccggggggaaaccccagcccagggggtgcaactacatccaagtcctgctgcatccagtaacaccactggggatgtgctggctggacggcaccaccctttcctgggaagagatgactcaagccagtggaagaccacacaccttgagaagtagaagagtcataggatttgaaagctgttagagaatttagcttccaggactgttcaatcttttggcttccctgggccacattggaagaattgtcttgggtcacacataaaatacagtaacactaatgatagctgttgaacttaaaaaaaaaaaatcgccaaaaaaaaaaatttcataatgttttaagaaagtttatgaatttgtgttgggccgcattcaaagccgtcctgggctgcatgtggcccacgggccgtgggttgaacaagcttggcttataccttatccagtggcttttaaacattcttttagtcttgagaactgcctattgagctaaaaccaatattctagctttcatagacatcagttaaacatttaattacatttaattaatgccagattcactggcttgcttagaatcatttttgttcttatactttcagttaatgtattgtaaaaattttcaatcattttcaaaagtagagaattgtacgttgaatccccacatacccatcacccagatyccaatatcaagattttgctacatgcatttcgtctgtcctttttacattttcttttcaattttttttcttacctgaagtgtttaaaggcaaatcctggccaggcgtggtggctcacacctgtaatcccagcacttcaggaggctgaggygggcagactgcatgagcccaggagtctgagaccaacctgrgcaaaatggcaaaaccctgtctctacaaaaaatacaaaaattagcactcacctgtagtctcagctacctgggaggcagaggtgagaggatctcttgaacccaggaggcggaagttgcagtgagctgagatcatgctactgcactccagcttgggcgaccgagcgagactctgactcaaacaaaagcaaaagaaaaggcaaatcccaaacatatcatttcacacctctactatctcatctttaaagaaataagtatgttttctaacataaccacatcactggcccatgcaaccaatgcctgcctaatacccagctgtgatctatgctttgatgggctgcacagaccccaagcttcagcaaaggacttgggaccccaccagctttgagtgctgttgacagacccttagtatcaaccccatcaggtgttactgcagccttccccagggtggcctacacccaatgactgatccatgccaggtggagaggcctggccatcttggctgagcatgggataactgtgcagggctgttccagctccacgactcctcgtggggtccactaaggctgtcrctgggctcacatcccaactcgacttctccctctgcccactcctatttccttcccttccccaagcatcggtccccagggcactgcttaataagcatcctgcagactaagtccattttagagtctgctttctgggacacccaacttgtgatgccagcccttaatcaaccttccttcattctcatgaacgttttcaatggttggcttgcctgaatctgatccaaacaaattcacatattgaatttagttgtttctttttgttggtttttagaaaaaagaagatgtactttttattcttggatttttcattgatttcacagagtataaattaagtcagattattctcaattccagaacttctgtttcttaaattagcaggcattctgttggtttaaaaagatagatgttggccgggcgcggtggctcacgcctgtaattccagcactttgggaggccaaggtgggtggatcacctgaggtcaggagttcaagaccagcctggccaacatggtgaaaccccatctctactaaaaatacaaaaattagctgggtgtggtggtgtgcacctgtaatcccagctactcaggaggctgaggcaggagaatcgcttgaacctgggaggcgaaggttgcagtgagctgagatcatgccactgcactccagcctgggcaacaagagcaagactccgt

SEQ ID NO: 6516 - DNA, 1809 bp, Homo sapiens
gcatgctctgctcaggcggcagcagtggctttttggaggtgtctcggccatgacacacatttgacatgccctccctcaacctacttatagactatttttcttgctctgcagcatggaccaaagagaaattctgcagaagttcctggatgaggcccaaagcaagaaaattactaaagaggagtttgccaatgaatttctgaagctgaaaaggcaatctaccaagtacaaggcagacaaaacctatcctacaactgtggcygagaagcccaagaatatcaagaaaaacagatataaggatattttgccctatgattatagccgggtagaactatccctgataacctctgatgaggattccagctacatcaatgccaacttcattaagggagtttatggacccaaggcttatattgccacccagggtcctttatctacaaccctcctggacttctggaggatgatttgggaatatagtgtccttatcattgttatggcatgcatggagtatgaaatgggaaaggaagctgaaaaaaggaaatctgattatataatcaggactctaaaagttaagttcaatagtgtatctgtaattcttgcccaccaaacaagcctgcagaatctgttcagtcaaataactccagctcatttctgaattttggttttgcaaaccgtttttcaaaacccaaaggaccaaggaatccaccaccaacttggaatatttaataaaactccagatttataataatatgggctgcaagtacacctgcaaataaaactactagaatactgctagttaaaataagtgctctatatgcataatatcaaatatgaagatatgctaatgtgttaatagcttttaaaagaaaagcaaaatgccaataagtgccagttttgcattttcatatcatttgcattgagttgaaaactgcaaataaaagtttgtcacttgagcttatgtacagaatgctatatgagaaacacttttagaatggatttatttttcatttttgccagttatttttattttcttttacttttytacataaacataaacttcaaaaggtttgtaagatttggatctcaactaatttctacattgccagaatatactataaaaagttaaaaaaaaaacttactttgtgggttgcaatacaaactgctcttgacaatgactattccctgacagttatttttgcctaaatggagtataccttgtaaatcttcccaaatgttgtggaaaactggaatattaagaaaatgagaaattatatttattagaataaaatgtgcaaataatgacaattatttgaatgtaacaaggaattcaactgaaatcctgataagttttaaccaaagtcattaaattaccaattctagaaaagtaatcaatgaaatataatagctatcttttggtagcaaaagatataaattgtatatgtttatacaggatctttcagatcatgtgcaatttttatctaaccaatcagaaatactagtttaaaatgaatttctatatgaatatggatctgccataagaaaatmtagttcaactctaattttatgtagtaaataaattggcaggtaatygtttttacaaagaatccacctgacttcccctaatgcattaaaaatatttttatttaaataactttatttataacttttaraaacatgtagtattgtttaaacatcatttgttcttcagtatttttcatttggaagtccaatagggcaaattgaatgaagtattattatctgtctcttgtagtacaatgtatccaacagacactcaataaactttttggttgt

SEQ ID NO: 6517 - DNA, 3551 bp, Homo sapiens
gcatgctctgctcaggcggcagcagtggctttttggaggtgtctcggccatgacacacatttgacatgccctccctcaacctacttatagactatttttcttgctctgcagcatggaccaaagagaaattctgcagaagttcctggatgaggcccaaagcaagaaaattactaaagaggagtttgccaatgaatttctgaagctgaaaaggcaatctaccaagtacaaggcagacaaaacctatcctacaactgtggcygagaagcccaagaatatcaagaaaaacagatataaggatattttgccctatgattatagccgggtagaactatccctgataacctctgatgaggattccagctacatcaatgccaacttcattaagggagtttatggacccaaggcttatattgccacccagggtcctttatctacaaccctcctggacttctggaggatgatttgggaatatagtgtccttatcattgttatggcatgcatggagtatgaaatgggaaaggaagctgaaaaaaggaaatctgattatataatcaggactctaaaagttaagttcaatagtgaaactcgaactatctaccagtttcattacaagaattggccagaccatgatgtaccttcatctatagaccctattcktgagctcatctgggatgtacgttgttaccaagaggatgacagtgttcccatatgcattcactgcagtgctggctgtggaaggactggtgttatttgtgctattgattatacatggatgttgctaaaagatgggataattcctgagaacttcagtgttttcagtttgatccrggaaatgcggacacagaggccttcattagttcaaacgcaggaacaatatgaactggtctacaatgctgtattagaactatttaagagacagatggatgttatcagagataaacattctggaacagagagtcaagcaaagcattgtattcctgagaaaaatcacactctccaagcagactcttattctcctaatttaccaaaaagtaccacaaaagcagcaaaaatgatgaaccaacaaaggacaaaaatggaaatcaaagaatcttcttcctttgactttaggacttctgaaataagtgcaaaagaagagctagttttgcaccctgctaaatcaagcacttcttttgactttctggagctaaattacagttttgacaaaaatgctgacacaaccatgaaatggcagacaaaggcatttccaatagttggggagcctcttcagaagcatcaaagtttggatttgggctctcttttgtttgagggatgttctaattctaaacctgtaaatgcagcaggaagatattttaattcaaaggtgccaataacacggaccaaatcaactccttttgaattgatacagcagagagaaaccaaggaggtggacagcaaggaaaacttttcttatttggaatctcaaccacatgattcttgttttgtagagatgcaggctcaaaaagtaatgcatgtttcttcagcagaactgaattattcactgccatatgactctaaacaccaaatacgtaatgcctctaatgtaaagcaccatgactctagtgctcttggtgtatattcttacatacctttagtggaaaatccttatttttcatcatggcctccaagtggtaccagttctaagatgtctcttgatttacctgagaagcaagatggaactgtttttccttcttctctgttgccaacatcctctacatccctcttctcttattacaattcacatgattctttatcactgaattctccaaccaatatttcctcactattgaaccaggagtcagctgtactagcaactgctccaaggatagatgatgaaatcccccctccacttcctgtayggacacctgaatcatttattgtggttgaggaagctggagaattctcaccaaatgttcccaaatccttatcctcagctgtgaaggtaaaaattggaacatcactggaatggggtggaacatctgaaccaaagaaatttgatgactctgtgatacttagaccaagcaagagtgtaaaactccgaagtcctaaatcagaactacatcaagatcgttcttctcccccacctcctctcccagaaagaactctagagtccttctttcttgccgatgaagattgtatgcaggcccaatctatagaaacatattctactagctatcctgacaccatggaaaattcaacatcttcaaaacagacactgaagactcctggaaaaagtttcacaaggagtaagagtttgaaaattttgcgaaacatgaaaaagagtatctgtaattcttgcccaccaaacaagcctgcagaatctgttcagtcaaataactccagctcatttctgaattttggtatgtcaaaccgtttttcaaaacccaaaggaccaaggaatccaccaccaacttggaatatttaataaaactccagatttataataatatgggctgcaagtacacctgcaaataaaactactagaatactgctagttaaaataagtgctctatatgcataatatcaaatatgaagatatgctaatgtgttaatagcttttaaaagaaaagcaaaatgccaataagtgccagttttgcattttcatatcatttgcattgagttgaaaactgcaaataaaagtttgtcacttgagcttatgtacagaatgctatatgagaaacacttttagaatggatttatttttcatttttgccagttatttttattttcttttacttttytacataaacataaacttcaaaaggtttgtaagatttggatctcaactaatttctacattgccagaatatactataaaaagttaaaaaaaaaacttactttgtgggttgcaatacaaactgctcttgacaatgactattccctgacagttatttttgcctaaatggagtataccttgtaaatcttcccaaatgttgtggaaaactggaatattaagaaaatgagaaattatatttattagaataaaatgtgcaaataatgacaattatttgaatgtaacaaggaattcaactgaaatcctgataagttttaaccaaagtcattaaattaccaattctagaaaagtaatcaatgaaatataatagctatcttttggtagcaaaagatataaattgtatatgtttatacaggatctttcagatcatgtgcaatttttatctaaccaatcagaaatactagtttaaaatgaatttctatatgaatatggatctgccataagaaaatmtagttcaactctaattttatgtagtaaataaattggcaggtaatygtttttacaaagaatccacctgacttcccctaatgcattaaaaatatttttatttaaataactttatttataacttttaraaacatgtagtattgtttaaacatcatttgttcttcagtatttttcatttggaagtccaatagggcaaattgaatgaagtattattatctgtctcttgtagtacaatgtatccaacagacactcaataaactttttggttgtt

SEQ ID NO: 6518 - DNA, 3622 bp, Homo sapiens
gcatgctctgctcaggcggcagcagtggctttttggaggtgtctcggccatgacacacatttgacatgccctccctcaacctacttatagactatttttcttgctctgcagcatggaccaaagagaaattctgcagaagttcctggatgaggcccaaagcaagaaaattactaaagaggagtttgccaatgaatttctgaagctgaaaaggcaatctaccaagtacaaggcagacaaaacctatcctacaactgtggcygagaagcccaagaatatcaagaaaaacagatataaggatattttgccctatgattatagccgggtagaactatccctgataacctctgatgaggattccagctacatcaatgccaacttcattaagggagtttatggacccaaggcttatattgccacccagggtcctttatctacaaccctcctggacttctggaggatgatttgggaatatagtgtccttatcattgttatggcatgcatggagtatgaaatgggaaagaaaaagtgtgagcgctactgggctgagccaggagagatgcagctggaatttggccctttctctgtatcctgtgaagctgaaaaaaggaaatctgattatataatcaggactctaaaagttaagttcaatagtgaaactcgaactatctaccagtttcattacaagaattggccagaccatgatgtaccttcatctatagaccctattcktgagctcatctgggatgtacgttgttaccaagaggatgacagtgttcccatatgcattcactgcagtgctggctgtggaaggactggtgttatttgtgctattgattatacatggatgttgctaaaagatgggataattcctgagaacttcagtgttttcagtttgatccrggaaatgcggacacagaggccttcattagttcaaacgcaggaacaatatgaactggtctacaatgctgtattagaactatttaagagacagatggatgttatcagagataaacattctggaacagagagtcaagcaaagcattgtattcctgagaaaaatcacactctccaagcagactcttattctcctaatttaccaaaaagtaccacaaaagcagcaaaaatgatgaaccaacaaaggacaaaaatggaaatcaaagaatcttcttcctttgactttaggacttctgaaataagtgcaaaagaagagctagttttgcaccctgctaaatcaagcacttcttttgactttctggagctaaattacagttttgacaaaaatgctgacacaaccatgaaatggcagacaaaggcatttccaatagttggggagcctcttcagaagcatcaaagtttggatttgggctctcttttgtttgagggatgttctaattctaaacctgtaaatgcagcaggaagatattttaattcaaaggtgccaataacacggaccaaatcaactccttttgaattgatacagcagagagaaaccaaggaggtggacagcaaggaaaacttttcttatttggaatctcaaccacatgattcttgttttgtagagatgcaggctcaaaaagtaatgcatgtttcttcagcagaactgaattattcactgccatatgactctaaacaccaaatacgtaatgcctctaatgtaaagcaccatgactctagtgctcttggtgtatattcttacatacctttagtggaaaatccttatttttcatcatggcctccaagtggtaccagttctaagatgtctcttgatttacctgagaagcaagatggaactgtttttccttcttctctgttgccaacatcctctacatccctcttctcttattacaattcacatgattctttatcactgaattctccaaccaatatttcctcactattgaaccaggagtcagctgtactagcaactgctccaaggatagatgatgaaatcccccctccacttcctgtayggacacctgaatcatttattgtggttgaggaagctggagaattctcaccaaatgttcccaaatccttatcctcagctgtgaaggtaaaaattggaacatcactggaatggggtggaacatctgaaccaaagaaatttgatgactctgtgatacttagaccaagcaagagtgtaaaactccgaagtcctaaatcagaactacatcaagatcgttcttctcccccacctcctctcccagaaagaactctagagtccttctttcttgccgatgaagattgtatgcaggcccaatctatagaaacatattctactagctatcctgacaccatggaaaattcaacatcttcaaaacagacactgaagactcctggaaaaagtttcacaaggagtaagagtttgaaaattttgcgaaacatgaaaaagagtatctgtaattcttgcccaccaaacaagcctgcagaatctgttcagtcaaataactccagctcatttctgaattttggttttgcaaaccgtttttcaaaacccaaaggaccaaggaatccaccaccaacttggaatatttaataaaactccagatttataataatatgggctgcaagtacacctgcaaataaaactactagaatactgctagttaaaataagtgctctatatgcataatatcaaatatgaagatatgctaatgtgttaatagcttttaaaagaaaagcaaaatgccaataagtgccagttttgcattttcatatcatttgcattgagttgaaaactgcaaataaaagtttgtcacttgagcttatgtacagaatgctatatgagaaacacttttagaatggatttatttttcatttttgccagttatttttattttcttttacttttytacataaacataaacttcaaaaggtttgtaagatttggatctcaactaatttctacattgccagaatatactataaaaagttaaaaaaaaaacttactttgtgggttgcaatacaaactgctcttgacaatgactattccctgacagttatttttgcctaaatggagtataccttgtaaatcttcccaaatgttgtggaaaactggaatattaagaaaatgagaaattatatttattagaataaaatgtgcaaataatgacaattatttgaatgtaacaaggaattcaactgaaatcctgataagttttaaccaaagtcattaaattaccaattctagaaaagtaatcaatgaaatataatagctatcttttggtagcaaaagatataaattgtatatgtttatacaggatctttcagatcatgtgcaatttttatctaaccaatcagaaatactagtttaaaatgaatttctatatgaatatggatctgccataagaaaatmtagttcaactctaattttatgtagtaaataaattggcaggtaatygtttttacaaagaatccacctgacttcccctaatgcattaaaaatatttttatttaaataactttatttataacttttaraaacatgtagtattgtttaaacatcatttgttcttcagtatttttcatttggaagtccaatagggcaaattgaatgaagtattattatctgtctcttgtagtacaatgtatccaacagacactcaataaactttttggttgt

SEQ ID NO: 6519 - DNA, 2329 bp, Homo sapiens
gcatgctctgctcaggcggcagcagtggctttttggaggtgtctcggccatgacacacatttgacatgccctccctcaacctacttatagactatttttcttgctctgcagcatggaccaaagagaaattctgcagaagttcctggatgaggcccaaagcaagaaaattactaaagaggagtttgccaatgaatttctgaagctgaaaaggcaatctaccaagtacaaggcagacaaaacctatcctacaactgtggcygagaagcccaagaatatcaagaaaaacagatataaggatattttgccctatgattatagccgggtagaactatccctgataacctctgatgaggattccagctacatcaatgccaacttcattaagggagtttatggacccaaggcttatattgccacccagggtcctttatctacaaccctcctggacttctggaggatgatttgggaatatagtgtccttatcattgttatggcatgcatggagtatgaaatgggaaagaaaaagtgtgagcgctactgggctgagccaggagagatgcagctggaatttggccctttctctgtatcctgtgaagctgaaaaaaggaaatctgattatataatcaggactctaaaagttaagttcaatagtgaaactcgaactatctaccagtttcattacaagaattggccagaccatgatgtaccttcatctatagaccctattcktgagctcatctgggatgtacgttgttaccaagaggatgacagtgttcccatatgcattcactgcagtgctggctgtggaaggactggtgttatttgtgctattgattatacatggatgttgctaaaagatgggataattcctgagaacttcagtgttttcagtttgatccrggaaatgcggacacagaggccttcattagttcaaacgcaggaacaatatgaactggtctacaatgctgtattagaactatttaagagacagatggatgttatcagagataaacattctggaacagagagtcaagcaaagcattgtattcctgagaaaaatcacactctccaagcagactcttattctcctaatttaccaaaaagtaccacaaaagcagcaaaaatgatgaaccaacaaaggacaaaaatggaaatcaaagaatcttcttcctttgactttaggacttctgaaataagtgcaaaagaagagctagttttgcaccctgctaaatcaagcacttcttttgactttctggagctaaattacagttttgacaaaaatgctgacacaaccatgaaatggcagacaaaggcatttccaatagttggggagcctcttcagaagcatcaaagtttggatttgggctctcttttgtttgagggatgttctaattctaaacctgtaaatgcagcaggaagatattttaattcaaaggtgccaataacacggaccaaatcaactccttttgaattgatacagcagagagaaaccaaggaggtggacagcaaggaaaacttttcttatttggaatctcaaccacatgattcttgttttgtagagatgcaggctcaaaaagtaatgcatgtttcttcagcagaactgaattattcactgccatatgactctaaacaccaaatacgtaatgcctctaatgtaaagcaccatgactctagtgctcttggtgtatattcttacatacctttagtggaaaatccttatttttcatcatggcctccaagtggtaccagttctaagatgtctcttgatttacctgagaagcaagatggaactgtttttccttcttctctgttgccaacatcctctacatccctcttctcttattacaattcacatgattctttatcactgaattctccaaccaatatttcctcactattgaaccaggagtcagctgtactagcaactgctccaaggatagatgatgaaatcccccctccacttcctgtayggacacctgaatcatttattgtggttgaggaagctggagaattctcaccaaatgttcccaaatccttatcctcagctgtgaaggtaaaaattggaacatcactggaatggggtggaacatctgaaccaaagaaatttgatgactctgtgatacttagaccaagcaagagtgtaaaactccgaagtcctaaatcaggtaaaaatttctcttggctttagatgacatttagccctaagattggaagaatggttcgttaagtttagagtaattcacttcaggaagttacttggttcccataatagcttccagtattcattgatttatttctggctttcccagactagaaattttgtaaagag

SEQ ID NO: 6520 - DNA, 1659 bp, Homo sapiens
tggaggaggagggagcaatgagtatgtggcaggagttcaagccctcttctgggtcacgctagaatcagatctgctctccagcatcttctgtttcctggyaagtgtttcctgctactttggattggccacgatgggctggagctgcyttgtgacaggaghaggagggcttctggrtcagaggatcgtccgcctgttggtggaagagaaggaactgaaggagatcagggccttggacaaggccttcagaccagaattgagagaggaattttctaagctccagaacaggaccaagctgactgtacttgaaggagacattctggatgagccattcctgaaaagagcctgccaggacgtctcggtcgtcatccacaccrcctgtatcattgatgtctttggtgtcactcacagasagtccatcatgaatgtcartgtgaaaggtacccagctactgtkggaggcctgtgtccaagccagtgtgccagtcttcatctacaccagtagcatagaggtagccrggcccaactcctacaagkaaatcatccagaacggccacraagaagagcctctggaaaacacatggcccactccataccygtacagcaaaaagcttgctgagaaggctgtgctggcrgctaatgggtrgaatckaaaaaatggtgataccttgtacacttgtgcrttaagacycacatatatctatggggaaggaggcccattcctttctgccagtataaatgaggcccygaacaacaatgggatcctgtcaagtgttggaaagttctctacagtcaacmmagtctatgttggcaacgtggcctgggcccacattctggcctygagggctctgcgggaccccaagaagsccccaagtgtcygaggtcaattcwatkacatctcagatgacabrcctcaccaaagctatgataaccttaattacatcctgagcaaagagtttggcctccgccttgattccagatggagccttcctttaaccctgatgtactggattgkcttcctgctggaagtagtgagcttcctactcagcccaatttastcctatcaaccccccttcaaccgccacacagtcacattatcaaatagtgtgttcaccttctcttacaagaaggctcagcgagatctggcgtataagccactctacagctgggaggaagccaagcagaaaaccgtggagtgggttggttcccttgtggaccggcacaaggagaccctgaagtccaagactcagtgatttaaggatgacagagatgtgcatgtgggtattgttaggaaatgtcatcaaactccacccacctggcttcatacagaaggcaacaggggcacaagsccaggtcctgctgcctctctttcacacaatgcccaacttactgtcttcttcatgtcatcaaaatctgcacagtcactggcccaaccagaactttctgtcctaatcatacaccagaagacaaacaatatgatttgctgttaccaaatctcagtrgctgattctgaacaattgtggtctctyttaacttgaggttctcttttgactaatagagctccatttcccctsttaaatgagaaagcatttcttttctctttaatctcctattccttcacacagttcaacataaagagcaataaatgttttaatgcttaaca

SEQ ID NO: 6521 - DNA, 1680 bp, Homo sapiens
tccagggatgaggcagtaaggacttggactcctctgtccagcttttaacaatctaagttacgccctcttctgggtcacgctagaatcagatctgctctccagcatcttctgtttcctggyaagtgtttcctgctactttggattggccacgatgggctggagctgcyttgtgacaggaghaggagggcttctggrtcagaggatcgtccgcctgttggtggaagagaaggaactgaaggagatcagggccttggacaaggccttcagaccagaattgagagaggaattttctaagctccagaacaggaccaagctgactgtacttgaaggagacattctggatgagccattcctgaaaagagcctgccaggacgtctcggtcgtcatccacaccrcctgtatcattgatgtctttggtgtcactcacagasagtccatcatgaatgtcartgtgaaaggtacccagctactgtkggaggcctgtgtccaagccagtgtgccagtcttcatctacaccagtagcatagaggtagccrggcccaactcctacaagkaaatcatccagaacggccacraagaagagcctctggaaaacacatggcccactccataccygtacagcaaaaagcttgctgagaaggctgtgctggcrgctaatgggtrgaatckaaaaaatggtgataccttgtacacttgtgcrttaagacycacatatatctatggggaaggaggcccattcctttctgccagtataaatgaggcccygaacaacaatgggatcctgtcaagtgttggaaagttctctacagtcaacmmagtctatgttggcaacgtggcctgggcccacattctggcctygagggctctgcgggaccccaagaagsccccaagtgtcygaggtcaattcwatkacatctcagatgacabrcctcaccaaagctatgataaccttaattacatcctgagcaaagagtttggcctccgccttgattccagatggagccttcctttaaccctgatgtactggattgkcttcctgctggaagtagtgagcttcctactcagcccaatttastcctatcaaccccccttcaaccgccacacagtcacattatcaaatagtgtgttcaccttctcttacaagaaggctcagcgagatctggcgtataagccactctacagctgggaggaagccaagcagaaaaccgtggagtgggttggttcccttgtggaccggcacaaggagaccctgaagtccaagactcagtgatttaaggatgacagagatgtgcatgtgggtattgttaggaaatgtcatcaaactccacccacctggcttcatacagaaggcaacaggggcacaagsccaggtcctgctgcctctctttcacacaatgcccaacttactgtcttcttcatgtcatcaaaatctgcacagtcactggcccaaccagaactttctgtcctaatcatacaccagaagacaaacaatatgatttgctgttaccaaatctcagtrgctgattctgaacaattgtggtctctyttaacttgaggttctcttttgactaatagagctccatttcccctsttaaatgagaaagcatttcttttctctttaatctcctattccttcacacagttcaacataaagagcaataaatgttttaatgcttaaca

SEQ ID NO: 6522 - DNA, 1675 bp, Homo sapiens
gaggcagtaaggacttggactcctctgtccagcttttaacaatctaagttacggttaccctcttctgggtcacgctagaatcagatctgctctccagcatcttctgtttcctggyaagtgtttcctgctactttggattggccacgatgggctggagctgcyttgtgacaggaghaggagggcttctggrtcagaggatcgtccgcctgttggtggaagagaaggaactgaaggagatcagggccttggacaaggccttcagaccagaattgagagaggaattttctaagctccagaacaggaccaagctgactgtacttgaaggagacattctggatgagccattcctgaaaagagcctgccaggacgtctcggtcgtcatccacaccrcctgtatcattgatgtctttggtgtcactcacagasagtccatcatgaatgtcartgtgaaaggtacccagctactgtkggaggcctgtgtccaagccagtgtgccagtcttcatctacaccagtagcatagaggtagccrggcccaactcctacaagkaaatcatccagaacggccacraagaagagcctctggaaaacacatggcccactccataccygtacagcaaaaagcttgctgagaaggctgtgctggcrgctaatgggtrgaatckaaaaaatggtgataccttgtacacttgtgcrttaagacycacatatatctatggggaaggaggcccattcctttctgccagtataaatgaggcccygaacaacaatgggatcctgtcaagtgttggaaagttctctacagtcaacmmagtctatgttggcaacgtggcctgggcccacattctggcctygagggctctgcgggaccccaagaagsccccaagtgtcygaggtcaattcwatkacatctcagatgacabrcctcaccaaagctatgataaccttaattacatcctgagcaaagagtttggcctccgccttgattccagatggagccttcctttaaccctgatgtactggattgkcttcctgctggaagtagtgagcttcctactcagcccaatttastcctatcaaccccccttcaaccgccacacagtcacattatcaaatagtgtgttcaccttctcttacaagaaggctcagcgagatctggcgtataagccactctacagctgggaggaagccaagcagaaaaccgtggagtgggttggttcccttgtggaccggcacaaggagaccctgaagtccaagactcagtgatttaaggatgacagagatgtgcatgtgggtattgttaggaaatgtcatcaaactccacccacctggcttcatacagaaggcaacaggggcacaagsccaggtcctgctgcctctctttcacacaatgcccaacttactgtcttcttcatgtcatcaaaatctgcacagtcactggcccaaccagaactttctgtcctaatcatacaccagaagacaaacaatatgatttgctgttaccaaatctcagtrgctgattctgaacaattgtggtctctyttaacttgaggttctcttttgactaatagagctccatttcccctsttaaatgagaaagcatttcttttctctttaatctcctattccttcacacagttcaacataaagagcaataaatgttttaatgcttaaca

SEQ ID NO: 6523 - DNA, 1350 bp, Homo sapiens
acagaactccagaacaagaycaagytgacagtgctggaaggagacattctggatgagccattcctgaagagagcctgccaggacgtytcggtcrtcatccacaccgcctgtatcattgatgtcttcggwgtcactcacagagagtctatcatgaatgtcaatgtgaaagtcttcatctacaccagtagcatagaggtagccgggcccaactcctacaaggaaatcatccagaatggccatgaagaagagcctctggaaaacacatggcccgctccatacccacacagcaaaaagcttgctgagaaggctgtactggcggctaacgggtggaatctgaaaaacggcggcaccctgtacacttgtgccttacgacccatgtatatctatggggaaggaagccgattcctttctgctagtataaacgaggccctgaacaacaatgggatcctgtcaagtgttggaaagttctccactgttaacccagtctatgttggcaatgtggcctgggcccacattctggccttgagggccctgcaggacccyaagaaggccccaagcatccgaggacagttctactatatctcagatgacacgcctcaccaaagctatgataaccttaattacaccctgagcaaagagttcggcctccgccttgattccagatggagcyttcctttatccctgatgtattggattggcttcctgctggaaatagtgagcttcctactcaggccaatttacacctatcgaccrcccttcaaccgccacatagtcacattgtcaaatagcgtattcaccttctcttataagaaggctcagcgagatytggcgtataagccactctacagctgggaggaagccaagcagaaaacggtggagtgggttggttcccttgtggaccggcacaaggagamcctgaagtccaagactcagtgatttaaggatgacagagatgtgcatgtgggtattgttagkagatgtcatcaagctccaccctcctggcctcatacagaaagtgacaagggcacaagctcaggtcctgctgcctccctttcatacaatggccaacttattgtattcctcatgtcatcaaaacctgcgcagtcattggcccaacaagaaggtttctgtcctaatcatataccagaggaaagaccatgtggtttgctgttaccaaatctcagtrgctgattctgaacaatttagggactcttttaacttgagggtcgttttgactactagagctccatttctactcttaaatgagaaaggatttcctttctttttaatcttccattccttcacatagtttgataaaaagatcaataaatgtttgaatgtttaatgtgg

SEQ ID NO: 6524 - DNA, 1666 bp, Homo sapiens
actcttctgtccagcttttaacaatctaactaatgctctttttagccctctccagggtcaccctagaatcagatcygctccccagcatcttctgtttcctggtgagtgattcctgctactttggatggccatgacgggctggagctgccttgtgacaggagcaggagggtttctgggacagaggatcatccgcctcttggtgaaggagaaggagctgaaggagatcagggtcttggacaaggccttcggaccagaattgagagaggaattttctaaactccagaacaagaycaagytgacagtgctggaaggagacattctggatgagccattcctgaagagagcctgccaggacgtytcggtcrtcatccacaccgcctgtatcattgatgtcttcggwgtcactcacagagagtctatcatgaatgtcaatgtgaaaggtacccagctcctgttagaggcctgtgtccaagctagtgtgccagtcttcatctacaccagtagcatagaggtagccgggcccaactcctacaaggaaatcatccagaatggccatgaagaagagcctctggaaaacacatggcccgctccatacccacacagcaaaaagcttgctgagaaggctgtactggcggctaacgggtggaatctgaaaaacggcggcaccctgtacacttgtgccttacgacccatgtatatctatggggaaggaagccgattcctttctgctagtataaacgaggccctgaacaacaatgggatcctgtcaagtgttggaaagttctccactgttaacccagtctatgttggcaatgtggcctgggcccacattctggccttgagggccctgcaggacccyaagaaggccccaagcatccgaggacagttctactatatctcagatgacacgcctcaccaaagctatgataaccttaattacaccctgagcaaagagttcggcctccgccttgattccagatggagcyttcctttatccctgatgtattggattggcttcctgctggaaatagtgagcttcctactcaggccaatttacacctatcgaccrcccttcaaccgccacatagtcacattgtcaaatagcgtattcaccttctcttataagaaggctcagcgagatytggcgtataagccactctacagctgggaggaagccaagcagaaaacggtggagtgggttggttcccttgtggaccggcacaaggagamcctgaagtccaagactcagtgatttaaggatgacagagatgtgcatgtgggtattgttagkagatgtcatcaagctccaccctcctggcctcatacagaaagtgacaagggcacaagctcaggtcctgctgcctccctttcatacaatggccaacttattgtattcctcatgtcatcaaaacctgcgcagtcattggcccaacaagaaggtttctgtcctaatcatataccagaggaaagaccatgtggtttgctgttaccaaatctcagtrgctgattctgaacaatttagggactcttttaacttgagggtcgttttgactactagagctccatttctactcttaaatgagaaaggatttcctttctttttaatcttccattccttcacatagtttgataaaaagatcaataaatgtttgaatgtttaatgtgg

SEQ ID NO: 6525 - DNA, 3179 bp, Homo sapiens
cccttctcaagatggcgctgcactcaatgcggaaagcgcgtgagcgctggagcttcatccgggcacttcataagggatccgcagctgctcccgctctccagaaagacagcaagaagcgagtattttccggcattcaacctacaggaatcctccacctgggcaattacctgggagccattgagagctgggtgaggttacaggatgaatatgactctgtattatacagcattgttgacctccactccattactgtcccccaagacccagctgtccttcggcagagcatcctggacatgactgctgttcttcttgcctgtggcataaacccggaaaaaagcatccttttccaacaatctcaggtgtctgaacacacacaattaagttggatcctttcctgcatggtcagactacctcgattacaacatttacatcagtggaaggcaaagactaccaagcagaagcaygatggcacggtgggcctgctcacatacccagtactccaggcagccgacattctgttgtacaagtccacacacgttcctgttggggaggatcaagtccagcacatggaactagttcaggatctagcacaaggtttcaacaagaagtatggggagttctttccagtgcccgagtccattctcacatccatgaagaaggtaaaatccctacgtgatccttctgccaaaatgtcgaaatcagaccctgacaaactggccaccgtccgaataacagacagcccagaggagatagtgcagaaattccgcaaggctgtgacagacttcacctcggaggtcacctatgacccgsctggccgcgctggcgtgtccaacatagtggcggtgcatgccgcggtgacggggctctccgtggaggaagtggtgcgccgcagcgcgggcatgaacactgctcgctacaagctggccgtggcagatgctgtgattgagaagtttgccccaattaagcgtgaaattgaaaaactgaagctggacaaggaccatttagagaaggttttacaaattggatcagcaaaagccaaagaattagcatacactgtgtgccaggaggtgaagaaattggtgggttttcyataggaagtttcaacgaatcacagcaaggcttttgtgccttgcactccatgcattctgataacggcagctttcctaaaaagaaaaagttatagttttgggacatttaatttggtatagctgattattggctttatttgatgaatattgctttgtagctttgaaatacgacagtgttccaaatcccatcaacaaaatgctgtgaacaacaacaacaaaaaataaatcaagaaggcatagctstctgaatccccaattattgaggcacactccttggcctgcagaaatgtgattgaagtaaggagtartttgggaaatggagtatcatttgtgcttctctctggagtacttactgtaacagatgcacackttatctacttcaacccttttataaagcaatatatagaggtcttagatgtataatccttgagatgccatttgatcagatgccaatttgtattcagagctcataaaaacaagtccattcttatagtttgtttgtcactgagacggtgcctgatttaatatatttaagctgcttaacttgttttccaagagataacaccaactgttccagcaataatttgttttttaattcagagatatgggatatgatcttctaaggaggttgcattattttgacctgatttatttattgtacaagagcccaagtccctgaattatattcttaataagtgctttcttgcattcatttcagtttagtctcaccaaccccctatgaattaggagaattattgtcattttacacatgaggaaagtgaggctgagagaatccaattagcttgtacgatatcactccataagagaagcaaatctgagagtaaaacccttaccccttattcttaagaatagtgcttgtttattcagtacaaaaaaaatgctgaaaggcagcgttttttagactctaaacattctgattttgaaggtgggtrttggaacgactgatgatgttttttatatcatcaattcagccaatggatgcgaacttaaaatctggattcacagaaccgtggtcacatttccccatcaaaatccccaaggcgggtcccaagttctctcctctacgctcattgcagaaatactttgaaataggttctgccagtctacaatagcagtgaagactgacaaatcagatattcccaatgactgacagcttctcatcttgcctctacctcagttaagtaatgtcaccctgaaacctagcttttctgcacttccatttctgacacctgaaaawgaaaatgataatcctaacttatacaccaagacctgttagcaagatcgattttgtaacagaaattgcttataagttttttatcagtaaggaccatgatcaccatttgtacatacataactaggttgttgagcaaagcatttttgctcatgtttcttaaggaagtagagtagtccttgtgtcagaacacatgttaatccacaaaacgccscatcccagattccaaattaaaacatcgtttttaggattcttggagctagcctggatcatgggtaaaggaaacattttgccttttgtatcttatactggaatgggatgtctgtaagtcctagaacctctttgagcatatttcttacaagcctctgttttttcccctttaaaggaaactttgaaaggattgtgaatactggaaaatgacaaaactraaggtagatctatcaagccaattgtctgtttatctgtttgtgtggtttttacccccttgcaatacctttcctccaaaaaattaaggcactatggaaagaatctcagaggagaaaaacagataacttgtgataacttccagggaccgaagtctatgcattggtgagggtggacttgtttgcaacctgttgttattttttttaagtgacccaactgttcaagtccaaacttggcccataattattaagagaatcttatccggttaatcagtattaatcaggattcttcagagaaacaaaaccaataggatatatatctatatattagagaatttattatggggattagctcacccaattatgaaggctgagaagttccatgataggctatgtgcaagctggacccaagagaga

SEQ ID NO: 6526 - DNA, 556 bp, Homo sapiens
atgaygggctggaacttccttgtgacaggagcaggaatgtttctggatcagagaatcatccatctcttggtgaaggagaaggagctgaaggagatcagggctttggaaaaggccttcagaccagaattgaggaaggaattttccaccagatccagaaatcattgcaatgacctgacccatgttcatgcaaagctccaaaacaagaccaagctaacagtgttggaaggagacattctgaatgagtcatgccttaaaagagcctgccaggacatcttggtcrtcatccacactgcctctatcattgacgtcttcggtgtcactcacagacagtctatcatgaaagmcaatgtgaaaggtacccaacttctgttgggaacctgtgtccaagctagtatgccaggcttcatccacaccagcatcatagaagtatccaggcccaactcctgcaatgagatcatccagaatggccacgaataagagcctttggaaaacatatggcctgctccatacccatagagcaaaaagcttgctgaggaggccgtgctggcagctaatg

SEQ ID NO: 6527 - DNA, 1143 bp, Homo sapiens
tactctgcgagactctgctgaactggctgcatcagggagaaatttcatctcccagaagggtgttgctcatcgtttcttcccggaaacatctgcagagactagcttttcaggctaaggtatcctccatgatgttaccattgcaaggtgcccagatgctgcagatgctggagaaatccttgaggaagagcctcccagcatccttaaaggtttatggaactgtctttcacataaaccatggaaatccattcaatctgaaggctgtggtggacaagtggcctgattttaatacagtggttgtctgccctcaggagcaggatatgacagatgaccttgatcactataccaatacttaccaaatctactccaaagatccccaaaactgtcaggaattccttggatcaccagaactcatcaactggaaacagcatttacagattcaaagttcacagcctagcctgaatgaggctatacaaaatcttgcagccattaagtccttcaaagtcaaacaaacacaacgcattctctatatggcagctgaaacagccaaggaactgactcctttcctgctgaaatcaaagattttatctcccartggtggcaaacccaaggccatcaaccaagagatgttwaaactctmatccatggatgttacccatgctcacttggtgaataaattctggcattttggtggtaatgagaggagccagagattcattgagcgctgcattcagacctttcccacctgctgtctcctggggcctgaggggacccctgtgtgctgggatctaatggaccagactggagagatgagaatggcaggcaccttgccggaataccggctccatggccttgtgacgtatgtcatctattcccacgcccagaaattgggcaaacttgggtttcctgtctattctcatgtagactacagcaatgaagctatgcaaaaaatgagttacacactgcaacatgttcccattcccagaagctggaaccagtggaactgtgtacctctgtgatgccaatcctgaacataagacagtgttgggcaggtctgggcgtataatttgaggagtggatggyggatgaaaagaaataataaattgtaatcagcagtaaaggagtgggcactgtttggactctggg

SEQ ID NO: 6528 - DNA, 1535 bp, Homo sapiens
tactctgcgagactctgctgaactggctgcatcagggagaaatttcatctcccagaagggtgttgctcatcgtttcttcccggaaacatctgcagagactagcttttcaggctaaggtatcctccatgatgttaccattgcaaggtgcccagatgctgcagatgctggagaaatccttgaggaagagcctcccagcatccttaaaggtttatggaactgtctttcacataaaccatggaaatccattcaatctgaaggctgtggtggacaagtggcctgattttaatacagtggttgtctgccctcaggagcaggatatgacagatgaccttgatcactataccaatacttaccaaatctactccaaagatccccaaaactgtcaggaattccttggatcaccagaactcatcaactggaaacagcatttacagattcaaagttcacagcctagcctgaatgaggctatacaaaatcttgcagccattaagtccttcaaagtcaaacaaacacaacgcattctctatatggcagctgaaacagccaaggaactgactcctttcctgctgaaatcaaagattttatctcccartggtggcaaacccaaggccatgtgagtttgataaaatccagtctrtaccactcacacytctcaagtaacctcccaacttctctccctgcattcactctggctttcctacaatcaatgttgtacaaagaaatcagaattacatttttaaaaaatgtaactcagaacatgtttctctcctgcttaaaagactccaccatctcccttctcatctagaataaaccaggcctctggctaccacttggacctttattgcccttcctgctttcttcctccaacagctctgaccttcactctgttcctctttcatcacaagctcatctatattccaggacttcacatttgttatttcttctgtctactctgtctctcaagacaatagaggtcacagcaaatacaaayctttatactaatggattwwgttttcttcttggaccctccatagcaaccaagagatgttwaaactctmatccatggatgttacccatgctcacttggtgaataaattctggcattttggtggtaatgagaggagccagagattcattgagcgctgcattcagacctttcccacctgctgtctcctggggcctgaggggacccctgtgtgctgggatctaatggaccagactggagagatgagaatggcaggcaccttgccggaataccggctccatggccttgtgacgtatgtcatctattcccacgcccagaaattgggcaaacttgggtttcctgtctattctcatgtagactacagcaatgaagctatgcaaaaaatgagttacacactgcaacatgttcccattcccagaagctggaaccagtggaactgtgtacctctgtgatgccaatcctgaacataagacagtgttgggcaggtctgggcgtataatttgaggagtggatggyggatgaaaagaaataataaattgtaatcagcagt

SEQ ID NO: 6529 - DNA, 6533 bp, Homo sapiens
ggttctgcgggttggcgctgagtttggaagtcgcgcgggaccccttttatagcagcgtgggcgacgtgccacacgggtgtcccagcccaggggctggtctgagctggaagaggttrtgcaaataagggccccacctccacggcaggagggtgrgccctaggtccagatgctcacactggcgcaggtctgtcctgagccgacacctgcacagtggcgagaccaaggacccagagagaaaggtgagagtgcagccggggaggctgaggatcggcggagctggaagagtgagggtgaaggcaagaagtagagcacagaagcaaagattttaagaggaaagaagacatctgaacccaacaccaccctaaaccacaggctgcagggttggcatgctccgtgcaagaccagaggcactgatgctcctgggagctcttctgactggatccctgggtccatcgggcaatcaggacgcactctcactgccctgggaagtgcagcgctatgacggctggtttaacaacctgaggcaccacgagcgtggtgctgttggctgccggttgcagcgccgcgtaccagccaattacgccgacggtgtgtatcaggctctggaggagccgcagctgcccaacccgcgccggctcagcaacgcagccacgcggggcatagccggcctgccgtcgctccacaaccgcaccgtactgggggtcttctttggctaccatgttctttccgacgtggtgagcgtggaaacgcccggttgccccgccgagttcctcaacatccgcatcccacctggagaccycgtgttcgaccccgaccagcgcggggacgtggtgctgcccttccagaggagccgctgggaccccgagaccggacggagtcccagcaacccccgggacctggccaaccaggtgacgggctggctggacggcagcgccatctatggytcctcgcaytcctggagcgacgcgctgcggagcttctcsrggggacagctggcgtcggggcccgaccccgctttyccccgagactcgcagaaccccctgctcatgtgggcggcgcccgaccccgccaccgggcagaacgggccccgggggctgtacgccttcggggcagagagagggaaccgggaacccttcctgcaggcgctgggcctgctctggttccgctaccacaacctgtgggcgcagaggctggcccgccagcacccagactgggaggacgaggagctgttccagcacgcacgcaagagggtcatcgccacctaccagaacatcgctgtgtatgagtggctgcccagcttcctgcagaaaacactcccggagtatacaggataccgtcctttcctagaccccagcatctccccggaatttgtggtggcctctgagcagttcttctctaccatggtgccccctggtgtctacatgagaaatgccagctgtcatttccggaaggtcctgaacaagggttttcaaagctcccaagctctcagggtctgcaacaactactggattcgggagaaccccaatctgaacagtacccaggaggtgaatgagctgctgctgggaatggcctcccagatttcggagttggaggacaacatagtggttgaagatctgagggattactggcctggccctggcaaattctcccgtacagactatgtggccagcagcatccaacgtggcygagatatggggctgcccagctatagccaggccctgctggcctttgggctggacatcccaaggaactggagtgatctcaaccctaatgtggacccccaggtgctggaggccacagctgccctgtacaaccaggacctatcccagctagagctgctccttggsgggctcctggagagccatggggaccctggacccctgttcagtgccattgtcctcgaccagtttgtacggctgcgggatggtgaccgctactggtttgagaacaccaggaatgggctgttctccaagaaggagattgaagacatccgaaataccaccctgcgggacgtgctggtcgctgttatcaacattgaccccagtgccctgcagcccaatgtctttgtctggcataaaggtgcaccctgccctcaacctaagcagctcacaactgacggcctgccccagtgtgcacccctgactgtgcttgacttctttgaaggcagcagccctggttttgccatcaccatcattgctctctgctgccttcccttagtgagtctgcttctctctggagtggtggcctatttccggggccgagaacacaagaagctacaaaagaaactcaaagagagcgtgaagaaggaagcagccaaagatggagtgccagcgatggagtggccaggccccaaggagaggagcagtcccatcatcatccagctgctgtcagacaggtgtctgcaggtcctgaacaggcatctcactgtgctccgtgtggtcyagctgcagcctctgcagcaggtcaacctcatcctgtccaacaacygaggatgccgcaccctgctgctcaagatccctaaggagtatgacctggtgctgctgtttagttctgaagaggaacggggcgcctttgtgcagcagctatgggacttctgcgtgcgctgggctctgggcctccatgtggctgagatgagcgagaaggagctatttaggaaggctgtgacaaagcagcagcgggaacgcatcctggagatcttcttcagacacctttttgctcaggtgctggacatcaaccaggccgacgcagggaccctgcccctggactcctcccagaaggtrcgggaggccctgacctgcgagctgagcarggccgagtttgccgagtccctgggcctcaagccccaggacatgtttgtggagtccatgttctctctggctgacaaggatggcaatggctacctgtccttccgagagttcctggacatcctggtggtcttcatgaaaggctccccagaggataagtcccgtctaatgtttaccatgtatgacctggatgagaatggcttcctctccaaggacgaattcttcaccatgatgcgatccttcatcgagatctccaacaactgcctgtccaaggcccagctggccgaggtggtggagtctatgttccgggagtcgggattccaggacaaggaggagctgacatgggaggattttcacttcatgctgcgggaccatgacagcgagctccgcttcacgcagctctgtgtcaaaggtggaggtggaggtggaaatggtattagagatatctttaaacaaaacatcagctgtcgagtctcgttcatcactcggacacctggggagcgctcccacccccagggactggggscccctgccccagaagccccagagctgggaggccctggactgaagaagaggtttggcaaaaaggcagcagtgcccactccccrgctgtacacagaggcgctgcaagagaagatgcagcgaggcttcctagcccaaaagctgcagcagtacaagcgcttcgtggagaactaccggaggcacatcgtgtgtgtggcaatcttctcggccatctgtgttggcgtgtttgcagatcgtgcttactactatggctttgcctygccaccctcggacattgcacagaccaccctcgtgggcatcatcctgtcacgaggcacggcggccagcgtctccttcatgttctcttatatcttgctcaccatgtgccgcaacctcataaccttcctgcgagagactttcctcaaccgctatgtgccttttgatgccgcagtggacttccaccgctggatcgccatggctgctgttgtcctggccattttgcacagtgctggccacgcagtcaatgtctacatcttctcagtcagcccactcagcctgctggcctgcatattccccaacgtctttgtgaatgatgggtccaagcttccccagaagttctattggtggttcttccagaccgtcccaggtatgacaggtgtgcttctgctcctggtcctggccatcatgtatgtcttcgcctcccaccacttccgccgccgcagcttccggggcttctggctgacccaccacctctacatcctgctctatgccctgctcatcatccatggcagctatgctctgatccagctgcccactttccacatctacttcctggtcccggcaatcatctatggaggtgacaagctggtgagcctgagccggaagaaggtggagatcagcgtggtgaaggcggagctgctgccctcaggagtgacctacctgcaattccagaggccccaaggctttgagtacaagtcaggacagtgggtgcggatcgcctgcctggctctggggaccaccgagtaccaccccttcacactgacctcygcgccccatgaggacacactcagcctgcacatccgggcagtggggccctggaccactcgcctcagggagatctactcatccccaaagggcaatggctgtgctggatacccaaagctgtaccttgatggaccgtttggagagggccatcaggagtggcataaatttgaggtgtcagtgttggtgggagggggcattggggtcaccccctttgcctccatcctcaaagacctggtcttcaagtcatccttgggcagccaaatgctgtgtaagaagatctacttcatctgggtgacacggacccagcgtcagtttgagtggctggctgacatcatccaagaggtggaggagaacgaccaccaggacctggtgtctgtgcacatttatgtcacccagctggctgagaagttcgacctcaggaccaccatgctatacatctgcgagcggcacttccagaaagtgctgaaccggagtctgttcacgggcctgcgctccatcacccactttggccgtccccccttcgagcccttcttcaactccctgcaggaggtccacccacaggtgcgcaagatcggggtgttcagctgcggccctccaggaatgaccaagaatgtagagaaggcctgtcagctcgtcaacaggcaggaccgagcccacttcatgcaccactatgagaacttctgagcctgtcctccctggctgctgcttccagtatcctgccttctcttctgtgcacctaagttgcccagccctgctggcaatctctccatcagaatccaccttaggcctcagctggagggctgcagagcccctcccaatattgggagaatattgacccagacaattatacaaatgagaaaaggcaggagactatgttctacaattgcagtgcatgatgattataagtccacctgtttatcaacggcaccattcctgcagccctccagacttcctgcccttagcaagtgcgcaaccagtcaggatctcccaaagaagataaagaccactcctcaccccagctcaagccatggcaggcgtggcaagcaaagtggggaggagacagtccctgcttgtgacaagtgtggaggtgaaaaggtacaatagtgcttgtctccgatagctccccacatctctaaytgacttccacaaaatcgatgcgttgctttggtatttgcttggactgacatttgagggaggaggaggctgggatcctctggctgagaatctcctcagagcccagtgcagaagctgtgatgcttagaacctggacagcccgactgcctcaactctgtctccaggtctattccctccagctccaaaaggagcagccctacttctaccccttcccrtccccaaagtgtcagcaactttgaggagggcaccaggaaacaaagatgcctccccagccctgatattcttgatgtcaccagtgatacccactgccctgacccctgggcaggcccctctctgcatctactggagtggtccctgggctctggggctgaaggattccagcctctctgccagatattcagwactcgatctcaattcccctcttccacaagagttgggtgaccagctgtcctagtttgcccaggactctccctgttttagcactgaaagtctcttgccccaggaaaccccatcagtcccaggcagattgggacagctggtcaccttacgcaagagccaggctgaaacatcccctccatactcagctctttaacttttcttttcctttttcatcgggctctttcctaaaaagctgagctgtaaaatattttacatcgaggtataataaataatcatgtacatgttttaccaccacccaggtcaagacatagaatgtttcaacatttccatcaccccagaaactccccttgtacccccttccacttcgtctcccctagctcctagaagcaaccactgatgtgatttctaccaaatccagttttggtcctactaaatatactcttttgagactggcctcttttactcaccataatgcctttgtaattcatccatgctgttgtgtgtatcagcagtttgttccttttcattgctgagtagtattctattgtagagatgtaccacagtttgtttattcttctgttgatggacgtttgggttgtttctaattttgaatgattataaataaaaattctgtgagtgttcttgtaccta

SEQ ID NO: 6530 - DNA, 3306 bp, Homo sapiens
  misc_feature (1)...(3306): n = A,T,C or G
aaagcctcggctacttccgagggggtgagtggcttcaccgccggtcccttgcagcgctgcctttcgatctctccacatctcggtggcgcgggatctcaagatgcgcctccacctgctcctgctgctcgcgctgtgcggtgcaggcaccaccgccgcggagctcagttacagcttgcgtggcaactggagcatctgcaatgggaacggctcgctggagctgcccggggcggtccctggctgcgtgcacagcgccttgttccagcagggcctgatccaggattcttactacagatttaatgaccttaactacagatgggtctctttggataactggacctatagcaaagaatttaaaatcccctttgaaattagcaaatggcaaaaagtaaatttgattcttgagggagtggatacrgtttcaaaaatcctgttcaatgaagtcactattggggaaacagacaatatgttcaatagatatagctttgatattaccaacgtggtcagggacgtgaactccattgagctgcgtttccagtcagcggtgttgtatgcagcacagcagagcaaagctcacactcgctaccaggttcccccagactgccctccacttgtgcagaagggtgaatgccatgtcaactttgttcggaaggagcaatgttcctttagttgggactgggggccttcctttcctacccagggaatctggaaagatgttagaattgaagcctataatatttgtcacctgaactacttcacattttccccaatatatgataagagtgcccaggagtggaatctggaaatagagtctacatttgatgttgtcagctcaaagccagttggtggtcaagtgatcrtagccatccctaagttgcaaacacaacagacatacagcattgaacttcaacctgggaaaaggattgttgagctatttgtgaacattagcaagaatattactgtagaaacttggtggcctcatggacatggaaaccagactgggtacaacatgactgttctttttgaactggatggaggcttaaatattgaaaaatcagctaaggtttattttaggacagtggaacttatagaagagcctataaaagggtctcctggtttgagtttctatttcaaaattaatggatttcccatatttctaaaaggctcaaactggatcccagcagattcattccaggaccgagtaacctctgagttgttacggctccttttacagtctgttgtggatgctaatatgaatactcttcgggtttggggaggaggaatttatgagcaggatgaattctatgaactctgtgatgaactaggaataatggtatggcaggattttatgtttgcctgtgccctttatccaactgatcagggcttcctggattcagtgacagcagaagttgcctaccagatcaagagactgaaatctcatccttctatcatcatatggagtggcaataatgaaaatgaggaggcgctgatgatgaattggtatcatatcagtttcactgaccggccaatctacatcaaggactatgtgacactctatgtgaaaaacatcagagagctcgtactggcaggagacaagagtcgtccttttattacgtccagtcctacaaatggggctgaaactgttgcagaagcctgggtctctcaaaaccctaatagcaattattttggtgatgtacatttttatgactatatcagtgattgctggaactggaaagttttcccaaaagctcgatttgcatctgaatatggatatcagtcctggccgtccttcagtacattagaaaaggtctcgtctacagaggactggtctttcaatagcaagttttcacttcatcgacaacatcacgaaggtggtaacaaacaaatgctttatcaggctggacttcatttcaaactcccccaaagcacagatccattacgcacatttaaagataccatctaccttactcaggtgatgcaggcccagtgtgtcaaaacagaaactgaattctaccgccgtagtcgcagcgagatagtggatcagcaagggcacacgatgggggcactttattggcagttgaatgacatctggcaagctccttcctgggcttctcttgagtacggaggaaagtggaaaatgcttcattactttgctcagaatttctttgctccactgttgccagtaggctttgagaatgaaaacangttctatatctatggtgtgtcagatcttcactcggattattcgatgacactcagtgtgagagtccatacatggagctccctggagcccgtgtgctctcgtgtgactgaacgttttgtgatgaaaggaggagaggctgtctgcctttatgaggagccagtgtctgaattgctgaggagatgtgggaattgcacacgggaaagctgtgtggtttccttttacctttcagctgaccatgaactcctgagcccgaccaactaccacttcytgtcctcaccgaaggaggccgtggggctctgcaaggcgcagatcactgccatcatctctcagcaaggtgacatatttgtttttgacctggagacctcagctgtcgctccctttgtttggttggatgtaggaagcatcccagggagatttagtgacaatggtttcctcatgactgagaagacacgaactatattattttacccttgggagcccaccagcaagaatgagttggagcaatcttttcatgtgacctccttaacagatatttactgaaggaatctaggttgtattttcagtggacaatgggaataaagcatttctaaagcaccgactggagaggaaggcaacagagacaaggagagaagccgagagacatgtctgcgtgctgccacgcatytgagcgattgctctgtgaagagttgtacactgaacayttycaggggaggctgtttacccaggcaatgtcctcaaacaagcctgtgccggggtgtcctggaatctgtgccaggactgtgtttttagcccttcacctctcagctttagcaggacatgaaccagttataacaagatggccctgcagctggttacaagaatgtgacatggcaggatctatggaaccaaatggaaggttttgaggtgatgtaggtctttcacagytagctttggggaatacrgaatactcaaataaagtgctttgttattatttcagagggaatggcgattgaaatgttacaacagagatttcttggtggtagctatttgggtaaaggtatatggrtatttttctgtacatgtgaaattatataaaaataaaagttatataaattacattgamaact

SEQ ID NO: 6531 - DNA, 2629 bp, Homo sapiens
agacgttagtgaagtgaatactcaccgacggtatcggaatgtgccatttggaccggtcggcagcagctacggttgccggtcccgcactgaaaaacgacagtggtgacgggtgagctcccagaagcagaagaatgacaggcaacacctgaagccacgcagcmgccgccatcttcacagccgtggagtgcctaccgaaagcatttcaccctcttccggactcattgcgtacacgccctcaccgccgcccagtttcggttcctaacaaaagcacgttcctcatcagccacccataatcaagacaaatttgccaaataaatcattgtagaaacgctagtttgggcctgaaaaattccaggagcaagagtcaagatttgtcactccatgagaatctggaggggactcccttcccagaaacttgacgatgaagtactggttgtaattttagaaagacacccaatcggcttttttaaaagatcgcccagggcccttgtcctgagagctgggagctggtcggagtgacagagaagccatggaagcagcagtgaaagaggaaataagtsttgaagatgaagctgtagataaaaacattttcagagactgtaacargatcgcattttacaggaagaaaagcgtattatgttaattctgaacaggcgtcagaaacagtggctttccaagaagtccacctatcrggcattattggattcagtcacaacagatgaagacagcaccaggttccaaatcatcaatgaagcaagtaaggttcctctcctggctgaaatttatggtatagaaggaaacattttcaggcttaaaattaaygaagagactcctctaaaacccagatttgaagttccggatgtcctcacaagcaagccaagcactgtaaggctgatttcatgctctggggacacaggcagtctgatattggcagatggaaaaggagacctgaagtgccatatcacagcaaacccattcaaggtagacttggtgtctgaagaagaggttgtgattagcataaattccctgggccaattatactttgagcatctacagrttcttcacaaacaaagagctgctaaagaaaatgaggaggagacatcagtggacacctctcaggaaaatcaagaagatctgggcctgtgggaagagaaatttggaaaatttgtggatatcaaagctaatggcccttcttctattggtttggatttctccttgcatggatttgagcatctttatgggatcccacaacatgcagaatcacaccaacttaaaaatactggtgatggagatgcttaccgtctttataacctggatgtctatggataccaaatatatgataaaatgggcatttatggttcagtaccttatctcctggcccacaaactgggcagaactataggtattttctggctgaatgcctyggaaacactggtggagatcaatacagagcctgcagtagagtacacactgacccagatgggcccagttgctgctaaacaaaaggtcagatctcgcactcatgtgcactggatgtcagagagtggcatcattgatgtttttctgctgacaggacctacaccttctgatgtcttcaaacagtactcacaccttacagagaaaggctgcagtgagcactgttcatgctgctgctctcccgcctagacaacagagcgagaccctatctctaaaaacaacaacaacaacaacaacaacaacaacaacaaaattaatgtaatagtgacatggaaaaaatacagctggatgcttaaaatgaatttggacagagtagctccaaaagttctgtgacagcctacctcttttacagacattggagaaaaatagctctcagtctgaggaagatactgagaaaaggaaagaagttgaaagcatcttgaagaaaaattcagattggatatgggattggacaagttggccagaaaatattccccacaaggagttcctctttaaagcacctgaagcacgtagctacccagcatggaatttaaagcctgatgaggaaagggggcattttctcagcagaatttccaaagggttttgctgctgtctcatctggtggccatgggattggggatctatattggaaggcatctgacaacttctaccagcaccttttgatgaataatttgaatccagctttgtgcgtatagtggggatttctatctgagcttgtgacacagctaactcaggagctgttatggtccttggktggctgtttcacttgtttttatttgttctgtaaatactgctttcctaatttagtaaaatgaaagaatagacactaaaatcacactgacctatacttatacctatagaatcagttaataaggktatcagactgattaatatctactgtaacaatttggcagtgagttttctttggatattagtataaatatgtaagtatcgttttaatatattagtcatgatatagyattttaaaaattatctgtaacctgaattctgttaaaacactttatattccaaaagaatgaatgacagtgatattaaaatcactacattaaagggtttgcccagaataaatattgtggccttacttacactactgtggaaaatattatgtttaatttaaataaatgcaggttgt

SEQ ID NO: 6532 - DNA, 5226 bp, Homo sapiens
ggcgtagcggcccctctctcagacagtcgtctgtgcgccgtgagactttggacctactgcgcaggcgtcatcctgttggaacctggtcagctgggttagagagatcgctacatgccagcctggcctgagtcttttctgtctcccagccgttaaaggttttaggaccaggcaggcaccccgtgcaggatttggctctctacttccgctcgccccagcccttcatcccttctaagtcaatgtcagactttggggccagaaagtctggaaaagccctaagcctggctgcccaagtggcgtctagtagtgagttctccggtttgggtggtatttaagcaaaggctggaattcggcggtggtggagtacacgcgattcctagactgggtagtgtaacaaccttcaaaggccccttctagccctgaagagtacgatgctgcagtacaatctggctggagacctagcctccagcaaagacccggccggcacttcccacccttaaccgaaaacggagacagagagggtcagttttcaaaatctgtggcgtgaccccgccactgagatagatctgcagatgcttcgtcccagtcagggaggccgtctcggcatttccaggttcttaacgctcttgatttttaccctctaggactcattgcgtacacgccctcaccgccgcccagtttcggttcctaacaaaagcacgttcctcatcagccacccataatcaagacaaatttgccaaataaatcattgtagaaacgctagtttgggcctgaaaaattccaggagcaagagtcaagatttgtcactccatgagaatctggaggggactcccttcccagaaacttgacgatgaagtactggttgtaattttagaaagacacccaatcggcttttttaaaagatcgcccagggcccttgtcctgagagctgggagctggtcggagtgacagagaagccatggaagcagcagtgaaagaggaaataagtsttgaagatgaagctgtagataaaaacattttcagagactgtaacargatcgcattttacaggcgtcagaaacagtggctttccaagaagtccacctatcrggcattattggattcagtcacaacagatgaagacagcaccaggttccaaatcatcaatgaagcaagtaaggttcctctcctggctgaaatttatggtatagaaggaaacattttcaggcttaaaattaaygaagagactcctctaaaacccagatttgaagttccggatgtcctcacaagcaagccaagcactgtaaggctgatttcatgctctggggacacaggcagtctgatattggcagatggaaaaggagacctgaagtgccatatcacagcaaacccattcaaggtagacttggtgtctgaagaagaggttgtgattagcataaattccctgggccaattatactttgagcatctacagrttcttcacaaacaaagagctgctaaagaaaatgaggaggagacatcagtggacacctctcaggaaaatcaagaagatctgggcctgtgggaagagaaatttggaaaatttgtggatatcaaagctaatggcccttcttctattggtttggatttctccttgcatggatttgagcatctttatgggatcccacaacatgcagaatcacaccaacttaaaaatactggtgatggagatgcttaccgtctttataacctggatgtctatggataccaaatatatgataaaatgggcatttatggttcagtaccttatctcctggcccacaaactgggcagaactataggtattttctggctgaatgcctyggaaacactggtggagatcaatacagagcctgcagtagagtacacactgacccagatgggcccagttgctgctaaacaaaaggtcagatctcgcactcatgtgcactggatgtcagagagtggcatcattgatgtttttctgctgacaggacctacaccttctgatgtcttcaaacagtactcacaccttacaggcacacaagccatgccccctcttttctctttgggataccaccagtgccgctggaactatgaagatgagcaggatgtaaaagcagtggatgcagggtttgatgagcatgacattccttatgatgccatgtggctggacatagagcacactgagggcaagaggtacttcacctgggacaaaaacagattcccaaaccccaagaggatgcaagagctgctcaggarcaaaaagcgtaagcttgtggtcatcagtgatccccacatcaagattgawcctgactactcagtatatgtgaaggccaaagatcagggcttctttgtgaagaatcaggaaggggaagactttgaaggggtgtgttggccaggtctctcctcttacctggatttcaccaatcccaaggtcagagagtggtattcaagtctttttgctttccctgtttatcagggatctacggacatcctcttcctttggaatgacatgaatgagccttctgtctttagagggccagagcaaaccatgcagaagaatgccattcatcatggcaattgggagcacagagagctccacaacatctacggtttttatcatcaaatggctactgcagaaggactgataaaacgatctaaagggaaggagagaccctttgttcttacacgttctttctttgctggatcacaaaagtatggtgccgtgtggacaggcgacaacacagcagaatggagcaacttgaaaatttctatcccaatgttactcactctcagcattactgggatctctttttgcggagctgacataggcgggttcattgggaatccagagacagagctgctagtgcgttggtaccaggcyggagcctaccagcccttcttccgtggccatgccaccatgaacaccaarcgacgagagccctggctctttggggaggaacacacccgactcatccgagaagccatcagagagcgctatggcctcctgccatattggtattctctgttctaccatgcacacgtggcttcccaacctgtcatgaggcctctgtgggtagagttccctgatgaactaaagacttttgatatggaagatgaatacatgctggggagtgcattattggttcatccagtcacagaaccaaaagccaccacagttgatgtgtttcttccaggatcaaatgaggtctggtatgactataagacatttgctcattgggaaggagggtgtactgtaaagatcccagtagccttggacactattccagtgtttcagcgaggtggaagtgtgataccaataaagacaactgtaggaaaatccacaggctggatgactgaatcctcctatggactccgggttgctctaagcactaagggttcttcagtgggtgagttatatcttgatgatggccattcattccaatacctccaccagaagcaatttttgcacaggaagttttcattctgttccagtgttctgatcaatagttytgctgaccrgaggggtcattatcccagcaagtgtgtggtggagaagatcttggtcttaggcttcaggaaggagccatcttctgtgactacccactcatctgatggtaaagatcagcctgtggcttttacgtattgtgccaaaacatccatcctgagcctggagaagctctcactcaacattgccactgactgggaggtccgcatcatatgacaaagaactgcccctggtgatgtgagcagggacctgcctgcccctttcaacctttcccctcaccttttttgagatttttgctgcaatctgtttgccttccctgaatcaaaataatctttcattcgtcaccattatactaatgaacaatagatttcatgtttcaaaatttcagattttacatgttaagatgtactaacaatattccttgtatcaaacatctccttttctccctgatacatagccctgagacatttatagcgttcaggagtcttctattgcttccattccttcagcagggctgcgtgggtctgttttaacgtgggccaagcctacctgggcagcccatttgccagggyttgcctcaggccatgcagcattggcgctctggctgcagcagctgagttgctcaaggccagtgtccaagtggacagcagcctctggtactccccccagttatcttccacccacatggactgggcagagcagccctcttctgtgtgcactgcatacgctgcagccgtgggagttattctcccctagagatcgacttggcagcacgaaggattcttttctctttcatgcttctcaggctcaatagtttctaattaatcttaaaatccatgtcttttacattgtttttttaattaagtgctgtttactaaccaaataatatttataacatgagtaagctataattaataacaatgaaataaatacccatgtacccaccactggacttcagaagtagaactcatgactgggactaggatgaggcaagggagaccctggccttgggcacaaaatgtaagggatgccaaaaaaatacagtaatcaaagtaagtaatatttcaatccaatatttttaaaaatcagaattaatgcaaaaaaaaccatgatgaacaaaatattaaaatttaaaataaagacaggattagtattactgagttttccttttgtcccaggctctaatatggcttggcatggggcagaacattacaacataccagtcgtgtcatggtgcccaaggctccacagacctcagtggctccctgctgcctgccacagcatctgttttagcagcctcgactcctcagcactcctcagcacacacctcttcttatcaggcttcctccacttagcarcttgctaacggccacctctgtgccttctgatccctgggcgccaatatcctcctgcccttaccatccttccaggcccaacttaaatcccactttcccatgaagcctaactgcgtgaacacccctacccccatacccattagcagtgattttgcccttccccgtaatgctgtcccacttataactgtgctctacttagcattctcagggatcataccttaatgttttcagtatgtctgcgttctcctactagattgtatgtccctcaagagcatgttctgtttctcttctrtctgacagagcactattatacctgactttcagtaactgttagctgtgattagttagctggtggatttaattgattaaaaaattacgattgaatgt

SEQ ID NO: 6533 - DNA, 2348 bp, Homo sapiens
tgcgacgctcgggtctgggtccgggtccggacgtgcaacagaagccgtcagtggccccgctggctaaaaaagggcaagcatcggaggctcgagccagcggccgcggcgcttcccgacagttcctaattcggggcgctacgccggccccaccacctgttcccggcagccaatggggccgcggggggcggccggggcggagcgcggctacaaaaggcctcgggccccgcgcgcccgcccaccccgctccgggcgcgctctcgggaaggcttggaccgacgcggcccagaggccaggaacagtccgcgcgtggaccagccgggccagggcgatgctgcgggtgcggtgtctgcgcggcgggagccgcggcgccgaggcggtgcactacatcggatctcggcttggacgaaccttgacaggatgggtgcagcgaactttccagagcacccaggcagctacggcttcctcccggaactcctgtgcagctgacgacaaagccactgagcctctgcccaaggactgccctgtctcttcttacaacgaatgggaccccttagaggaagtgatagtgggcagagcagaaaacgcctgtgttccaccgttcaccrtcgaggtgaaggccaacacatatgaaaagtactggccattttaccagaagcawggagggcattattttcccaaagatcatttgaaaaaggctgttgctgaaattgaagaaatgtgcaatattttaaaaacggaaggagtgacagtaaggaggcctgaccccattgactggtcattgaagtataaaactcctgattttgagtctacgggtttatacagtgcaatgcctcgagacatcctgatagttgtgggcaatgagattatcgaggctcccatggcatggcgttcacgcttctttgagtaccgagcgtacaggtcaattatcaaagactacttccaccgtggcgccaagtggacaacagctcctaagcccacaatggctgatgagctttataaccaggattatcccatccactctgtagaagacagacacaaattggctgctcagggaaaatttgtgacaactgagtttgagccatgctttgatgctgctgacttcattcgagctggaagagatatttttgcacagagaagccaggttacaaactacctaggcattgaatggatgcgtaggcatcttgctccagactacagagtrcatatcatctcytttaaagaycccaatcccatgcatattgatgctaccttcaacrtcattggacctggtattgtgctttccaaccctgaccgaccatgtcaccagattgatcttttcaagaaagcaggatggactatcattactcctccaacaccaatcatcccagacgatcatccactctggatgtcatccaaatggctttccatgaatgtcttaatgctagatgaaaaacgtgttatggtggatgccaatgaagttccaattcaaaagatgtttgaaaagctgggtatcactaccattaaagttaacattcgtaatgccaattccctgggaggaggcttccattgctggacctgcgatgtccggcgccgaggcaccytacagtcctacttggactgaacaggcctgatggagcttgtggctggcctcagatacacctaagaagcttaggggcaaggttcattctcctgctttaaaaagtgcatgaactgtagtgctttaaacaatcatctccttaacaggggtcgtaagcctggtttgcttctattacttttctttgacataaagaaaataacttctgctaggtattactctctactcctaaagttatttactatttggcttcaagtataaaattttggtgaatgtgtaccaagaaaaaattagtcacctgagtaacttggccactaataattaaccatctacctctgtttttaatttttttkttttttaaaaaataacctagactatgcaaaacatcaragtgaattttccatgaatgtttttaatattctcatctcaacattgtgatatatgctactaaaaaccttttcatatacatcttacctcatttcaagtgaattattttaatcttttyctctctttccmaaaatttacaggaatgtttagtgtaattggatttcgctatcagttcccatccttaagttttgatattcaatatctgatagatacactgcatctttggtcatctaagatttgtttacaaatgtrcaaattatttagagcatagactttataagcattaaaaaaaactaatggaggtaaaacctaaatgcgatgtgaaataattttagtgttgatacygtatgtgtatttttattctaataaacttttgtgttccagattg

SEQ ID NO: 6534 - DNA, 2587 bp, Homo sapiens
tgcgacgctcgggtctgggtccgggtccggacgtgcaacagaagccgtcagtggccccgctggctaaaaaagggcaagcatcggaggctcgagccagcggccgcggcgcttcccgacagttcctaattcggggcgctacgccggccccaccacctgttcccggcagccaatggggccgcggggggcggccggggcggagcgcggctacaaaaggcctcgggccccgcgcgcccgcccaccccgctccgggcgcgctctcgggaaggcttggaccgacgcggcccagaggccaggaacagtccgcgcgtggaccagccgggccagggcgatgctgcgggtgcggtgtctgcgcggcgggagccgcggcgccgaggcggtgcactacatcggatctcggcttggacgaaccttgacaggatgggtgcagcgaactttccagagcacccaggcagctacggcttcctcccggaactcctgtgcagctgacgacaaagccactgagcctctgcccaaggactgccctgtctcttcttacaacgaatgggaccccttagaggaagtgatagtgggcagagcagaaaacgcctgtgttccaccgttcaccrtcgaggtgaaggccaacacatatgaaaagtactggccattttaccagaagcawggagggcattattttcccaaagatcatttgaaaaaggctgttgctgaaattgaagaaatgtgcaatattttaaaaacggaaggagtgacagtaaggaggcctgaccccattgactggtcattgaagtataaaactcctgattttgagtctacgggtttatacagtgcaatgcctcgagacatcctgatagttgtgggcaatgagattatcgaggctcccatggcatggcgttcacgcttctttgagtaccgagcgtacaggtcaattatcaaagactacttccaccgtggcgccaagtggacaacagctcctaagcccacaatggctgatgagctttataaccaggattatcccatccactctgtagaagacagacacaaattggctgctcagggaaaatttgtgacaactgagtttgagccatgctttgatgctgctgacttcattcgagctggaagagatatttttgcacagagaagccaggttacaaactacctaggcattgaatggatgcgtaggcatcttgctccagactacagagtrcatatcatctcytttaaagaycccaatcccatgcatattgatgctaccttcaacrtcattggacctggtattgtgctttccaaccctgaccgaccatgtcaccagattgatcttttcaagaaagcaggatggactatcattactcctccaacaccaatcatcccagacgatcatccactctggatgtcatccaaatggctttccatgaatgtcttaatgctagatgaaaaacgtgttatggtggatgccaatgaagttccaattcaaaagatgtttgaaaagctgggtatcactaccattaaagttaacattcgtaatgccaattccctgggaggaggcttccattgctggacctgcgatgtccggcgccgaggcaccytacagtcctacttggactgaacaggcctgatggagcttgtggctggcctcagatacacctaagaagcttaggggcaaggttcattctcctgctttaaaaagtgcatgaactgtagtgctttaaacaatcatctccttaacaggggtcgtaagcctggtttgcttctattacttttctttgacataaagaaaataacttctgctaggtattactctctactcctaaagttatttactatttggcttcaagtataaaattttggtgaatgtgtaccaagaaaaaattagtcacctgagtaacttggccactaataattaaccatctacctctgtttttaattttctttccaaaaggcagcttgaaatgttggtcctaatcttaattttttttcctcttctatagacttgagaatgtttttctctaaatgagagaaagacttagaatgtacacagatccaaaatagaatcagattatctctttttttctaaaggagagaaagacttagaacatacacagatcctaagtagaaccaggtaattgtctctttttctaataaggaatttgggtaatttttaattttttkttttttaaaaaataacctagactatgcaaaacatcaragtgaattttccatgaatgtttttaatattctcatctcaacattgtgatatatgctactaaaaaccttttcatatacatcttacctcatttcaagtgaattattttaatcttttyctctctttccmaaaatttacaggaatgtttagtgtaattggatttcgctatcagttcccatccttaagttttgatattcaatatctgatagatacactgcatctttggtcatctaagatttgtttacaaatgtrcaaattatttagagcatagactttataagcattaaaaaaaactaatggaggtaaaacctaaatgcgatgtgaaataattttagtgttgatacygtatgtgtatttttattctaataaacttttgtgttccagattgaa

SEQ ID NO: 6535 - DNA, 1466 bp, Homo sapiens
atgacgtcattgagctgcgacccttgttcaacgccgttggcgaagccagctgctggaggtgccgagaatctgagtttcggcaagcagccaggtctggaaactaatattttaaaaatgactacaccaaacaagacacctcctggtgctgaccccaagcagttggaaaggactggaacagtacgggaaattgggtcacaagctgtttggtcactctcatcttgcaaaccaggatttggagtggatcagttacgagatgacaatctagaaacttattggcaatcagatggttcccagcctcatttagtgaacatccaattcagaagaaaaacaacagtgaagacattatgtatttatgcagactacaaatctgatgaaagctatactccaagcaagatctcagtcagagtaggaaataattttcacaaccttcaagaaattcggcaacttgagttggtggaaccaagtggctggattcatgttcccttaactgacaatcataagaagccaactcgtacattcatgatacagattgctgttctagccaatcaccagaatggaagagacacccatatgagacaaattaaaatatacacaccagtagaagagagctccattggtaaatttcctagatgtacaactatagatttcatgatgtatcgttcaataaggtgactttaaaatgagaygaaaatcattaaacgtatctttgttttatcctgtatttaaataatatatcatgtacctttattgaacaaggcatccgttatatctaattttgtatatgtttaaaaatattttattgtaactttgacaaataaatttggggtcatattatctttattttctttaacatgtaataaagctcacatattttacattactaaaaatggatttgaagccaatcattttattttcccttgtatcaaaagaaaagagttccttgtatcaaaagaaaagagttgaactgaaaatttcagtatatacacaattataatagctaggtgattatttcattagtgttcatacattagagtaatggtttattgcatatttgagaacaagactgtgttttatcaatatatatcatctttaataggtcaaaattactattttttctacccagaggaaggttattcttttaatactggatcttttaaaaaacagtgtcaaataagcttagtgttaggttgtctgatgagaaccaatctaatatggggagtataattaattgtctcatattcaccttcacggaatacttacagccctagggttgtctgtatcctaatgatattatgtaaagattgcctgtataatctagcagtacttatggaagagttctagcagtacttatggaagagttattttcaaatttgtgtctgacattgtagcattccctgggcagtcatatatcccataaaatcgtaaaagtatgtgaaattttttatatatattaaaagattttaaag

SEQ ID NO: 6536 - DNA, 1157 bp, Homo sapiens
attgcttttagaagaaaaacaacagtgaagacattatgtatttatgcagactacaaatctgatgaaagctatactccaagcaagatctcagtcagagtaggaaataattttcacaaccttcaagaaattcggcaacttgagttggtggaaccaagtggctggattcatgttcccttaactgacaatcataagaagccaactcgtacattcatgatacagattgctgttctagccaatcaccagaatggaagagacacccatatgagacaaattaaaatatacacaccagtagaagagagctccattggtaaatttcctagatgtacaactatagatttcatgatgtatcgttcaataaggtgactttaaaatgagaygaaaatcattaaacgtatctttgttttatcctgtatttaaataatatatcatgtacctttattgaacaaggcatccgttatatctaattttgtatatgtttaaaaatattttattgtaactttgacaaataaatttggggtcatattatctttattttctttaacatgtaataaagctcacatattttacattactaaaaatggatttgaagccaatcattttattttcccttgtatcaaaagaaaagagttccttgtatcaaaagaaaagagttgaactgaaaatttcagtatatacacaattataatagctaggtgattatttcattagtgttcatacattagagtaatggtttattgcatatttgagaacaagactgtgttttatcaatatatatcatctttaataggtcaaaattactattttttctacccagaggaaggttattcttttaatactggatcttttaaaaaacagtgtcaaataagcttagtgttaggttgtctgatgagaaccaatctaatatggggagtataattaattgtctcatattcaccttcacggaatacttacagccctagggttgtctgtatcctaatgatattatgtaaagattgcctgtataatctagcagtacttatggaagagttctagcagtacttatggaagagttattttcaaatttgtgtctgacattgtagcattccctgggcagtcatatatcccataaaatcgtaaaagtatgtgaaattttttatatatattaaaagattttaaag

SEQ ID NO: 6537 - DNA, 1511 bp, Homo sapiens
caacgccgttggcgaagccagctgctggaggtgccgagaatctgagtttcggcaagcagccaggtctggaaactgtaacaggacattcagttagtaatgatggttgcaggttgaatagtctcgccctagatctcacctaacttgcagaatattttaaaaatgactacaccaaacaagacacctcctggtgctgaccccaagcagttggaaaggactggaacagtacgggaaattgggtcacaagctgtttggtcactctcatcttgcaaaccaggatttggagtggatcagttacgagatgacaatctagaaacttattggcaatcagatggttcccagcctcatttagtgaacatccaattcagaagaaaaacaacagtgaagacattatgtatttatgcagactacaaatctgatgaaagctatactccaagcaagatctcagtcagagtaggaaataattttcacaaccttcaagaaattcggcaacttgagttggtggaaccaagtggctggattcatgttcccttaactgacaatcataagaagccaactcgtacattcatgatacagattgctgttctagccaatcaccagaatggaagagacacccatatgagacaaattaaaatatacacaccagtagaagagagctccattggtaaatttcctagatgtacaactatagatttcatgatgtatcgttcaataaggtgactttaaaatgagaygaaaatcattaaacgtatctttgttttatcctgtatttaaataatatatcatgtacctttattgaacaaggcatccgttatatctaattttgtatatgtttaaaaatattttattgtaactttgacaaataaatttggggtcatattatctttattttctttaacatgtaataaagctcacatattttacattactaaaaatggatttgaagccaatcattttattttcccttgtatcaaaagaaaagagttccttgtatcaaaagaaaagagttgaactgaaaatttcagtatatacacaattataatagctaggtgattatttcattagtgttcatacattagagtaatggtttattgcatatttgagaacaagactgtgttttatcaatatatatcatctttaataggtcaaaattactattttttctacccagaggaaggttattcttttaatactggatcttttaaaaaacagtgtcaaataagcttagtgttaggttgtctgatgagaaccaatctaatatggggagtataattaattgtctcatattcaccttcacggaatacttacagccctagggttgtctgtatcctaatgatattatgtaaagattgcctgtataatctagcagtacttatggaagagttctagcagtacttatggaagagttattttcaaatttgtgtctgacattgtagcattccctgggcagtcatatatcccataaaatcgtaaaagtatgtgaaattttttatatatattaaaagattttaaag

SEQ ID NO: 6538 - DNA, 3739 bp, Homo sapiens
caaatgcgaacttaggctgttacacaactgctggggtctgttctcgccgcccgccmggcagtcaggcagcgtcgccgccgtggtagcagcctcagccgtttctggagtctcgggcccacagtcaccgccgcttacctgcgcctcctcgagcctccggagtcccmgtccgcccgcacaggccggttcgccgtctgcgtctcccccacgccgcctcgcctgccgccgcgctcgtccctccgggccgacatgagtggggaccacctccacaacgattcccagatcgaagcggatttccgattgaatgattctcataaacacaaagataaacacaaagatcgagaacaccggcacaaagaacacaagaaggagaaggaccgggaaaagtccaarcatagcaacagtgaacataaagattctgaaaagaaacacaaagagaaggagaagaccaaacacaaagatggaagctcagaaaagcataaagacaaacataaagacagagacaaggaaaaacgaaaagaggaaaaggttcgagcctctggggatgcaaaaataaagaaggagaaggaaaatggcttctctagtccaccacaaattaaagatgaacctgaagatgatggctattttgttcctcctaaagaggatataaagccattaaagagacctcgagatgaggatgatgctgattataaacctaagaaaattaaaacagaagataccaagaaggagaagaaaagaaaactagaagaagaagaggatggtaaattgaaaaaacccaagaataaagataaagataaaaaagttcctgagccagataacaagaaaaagaagccgaagaaagaagaggaacagaagtggaaatggtgggaagaagagcgctatcctgaaggcatcaagtggaaattcctagaacataaaggtccagtatttgccccaccatatgagcctcttccagagaatgtcaagttttattatgatggtaaagtcatgaagctgagccccaaagcagaggaagtagctacgttctttgcaaaaatgctcgaccatgaatatactaccaaggaaatatttaggaaaaatttctttaaagactggagaaaggaaatgactaatgaagagaagaatattatcaccaacctaagcaaatgtgattttacccagatgagccagtatttcaaagcccagacggaagctcggaaacagatgagcaaggaagagaaactgaaaatcaaagaggagaatgaaaaattactgaaagaatatggattctgtattatggataaccacaaagagaggattgctaacttcaagatagagcctcctggacttttccgtggccgcggcaaccaccccaagatgggcatgctgaagagacgaatcatgcccgaggatataatcatcaactgtagcaaagatgccaaggttccttctcctcctccaggacataagtggaaagaagtccggcatgataacaaggttacttggctggtttcctggacagagaacatccaaggttccattaaatacatcatgcttaaccctagttcacgaatcaagggtgagaaggactggcagaaatacgagactgctcggcggctgaaaaaatgtgtggacaagatccggaaccagtatcgagaagactggaagtccaaagagatgaaagtccggcagagagctgtagccctgtacttcatcgacaagcttgctctgagagcaggcaatgaaaaggaggaaggagaaacagcggacactgtgggctgctgctcacttcgtgtggagcacatcaatctacrcccagagttggatggtcaggaatatgtggtagagtttgacttcctcgggaaggactccatcagatactataacaaggtccctgttgagaaacgagtttttaagaacctacaactatttatggagaacaagcagcccgaggatgatctttttgatagactcaatactggtattctgaataagcatcttcaggatctcatggagggcttgacagccaaggtattccgtacrtacaatgcctccatcacgctacagcagcagctaaaagaactgacagccccggatgagaacatcccagcgaagatcctttcttataaccgtgccaatcgagctgttgcaattctttgtaaccatcagagggcaccaccaaaaacttttgagaagtctatgatgaacttgcaaactaagattgatgccaagaaggaacagctagcagatgcccggagagacctgaaaagtgctaaggctgatgccaaggtcatgaaggatgcaaagacgaagaaggtagtagagtcaaagaagaaggctgttcagagactggaggaacagttgatgaagctggaagttcaagccacagaccgagaggaaaataaacagattgccctgggaacctccaaactcaattatctggaccctaggatcacagtggcttggtgcaagaagtggggtgtcccaattgagaagatttacaacaaaacccagcgggagaagtttgcctgggccattgacatggctgatgaagactatgagttttagccagtctcaagaggcagagttctgtgaagaggaacagtgtggtttgggaaagatggataaactgagcctcacttgccctcgtgcctgggggagagaggcagcaagtcttaacaaaccaacatctttgcgaaaagataaacctggagatattataagggagagctgagccagttgtcctatggacaacttatttaaaaatatttcagatatcaaaattctagctgtatgatttgttttgaattttgtttttattttcaagagggcaagtggatgggaatttgtcagcgttctaccaggcaaattcactgtttcactgaaatgtttggattctcttagctactgtatgcaaagtccgattatattggtgcgtttttacagttagggttttgcaataacttytwtwttttaatagaaataaattcctaaactcccttccctctctcccatttcaggaatttaaaattaagtagaacaaaaaacccagcgcacctgttagagtcgtcactctctattgtcatggggatcaattttcattaaacttgaagcagtcgtggctttggcagtgttttggttcagacacctgttcacagaaaaagcatgatgggaaaatatttcctgacttgagtgttcctttttaaatgtgaatttttatttctttttaattattttaaaatatttaaacctttttcttgatcttaaagatcgtgtagattggggttggggagggatgaagggcgagtgaatctaaggataatgaaataatcagtgactgaaaccattttcccatcatcctttgttctgagcattcgctgtaccctttaagatatccatctttttytttttaaccctaatctttcacttgaaagattttattgtataaaaagtttcacaggtcaataaacttagaggaaaatgagtatttggtccaaaaaaaggaaaaataatcaagattttagggcttttattttttyttttgtaattgtgtaaaaaatggaaaaaaacataaaaagcagaattttaatgtgaagacattttttgctataatcattagttttaraggcattgttagtttagtgtgtgtgcagagtccatttcccacatctttcctcaagtatcttctatttttatcatgaattcccttttaatcaactgtaggttatttaaaataaattcctacaacttaatggaaacttaa

SEQ ID NO: 6539 - DNA, 3593 bp, Homo sapiens
caaatgcgaacttaggctgttacacaactgctggggtctgttctcgccgcccgccmggcagtcaggcagcgtcgccgccgtggtagcagcctcagccgtttctggagtctcgggcccacagtcaccgccgcttacctgcgcctcctcgagcctccggagtcccmgtccgcccgcacaggccggttcgccgtctgcgtctcccccacgccgcctcgcctgccgccgcgctcgtccctccgggccgacatgagtggggaccacctccacaacgattcccagatcgaagcggatttccgattgaatgattctcataaacacaaagataaacacaaagatcgagaacaccggcacaaagaacacaagaaggagaaggaccgggaaaagtccaarcatagcaacagtgaacataaagattctgaaaagaaacacaaagagaaggagaagaccaaacacaaagatggaagctcagaaaagcataaagacaaacataaagacagagacaaggaaaaacgaaaagaggaaaaggttcgagcctctggggatgcaaaaataaagaaggagaaggaaaatggcttctctagtccaccacaaattaaagatgaacctgaagatgatggctattttgttcctcctaaagaggatataaagccattaaagagacctcgagatgaggatgatgctgattataaacctaagaaaattaaaacagaagataccaagaaggagaagaaaagaaaactagaagaagaagaggatggtaaattgaaaaaacccaagaataaagataaagataaaaaagttcctgagccagataacaagaaaaagaagccgaagaaagaagaggaacagaagtggaaatggtgggaagaagagcgctatcctgaaggcatcaagtggaaattcctagaacataaaggtccagtatttgccccaccatatgagcctcttccagagaatgtcaagttttattatgatggtaaagtcatgaagctgagccccaaagcagaggaagtagctacgttctttgcaaaaatgctcgaccatgaatatactaccaaggaaatatttaggaaaaatttctttaaagactggagaaaggaaatgactaatgaagagaagaatattatcaccaacctaagcaaatgtgattttacccagatgagccagtatttcaaagcccagacggaagctcggaaacagatgagcaaggaagagaaactgaaaatcaaagaggagaatgaaaaattactgaaagaatatggattctgtattatggataaccacaaagagaggattgctaacttcaagatagagcctcctggacttttccgtggccgcggcaaccaccccaagatgggcatgctgaagagacgaatcatgcccgaggatataatcatcaactgtagcaaagatgccaaggttccttctcctcctccaggacataagtggaaagaagtccggcatgataacaaggttacttggctggtttcctggacagagaacatccaaggttccattaaatacatcatgcttaaccctagttcacgaatcaagggtgagaaggactggcagaaatacgagactgctcggcggctgaaaaaatgtgtggacaagatccggaaccagtatcgagaagactggaagtccaaagagatgaaagtccggcagagagctgtagccctgtacttcatcgacaagcttgctctgagagcaggcaatgaaaaggaggaaggagaaacagcggacactgtgggctgctgctcacttcgtgtggagcacatcaatctacrcccagagttggatggtcaggaatatgtggtagagtttgacttcctcgggaaggactccatcagatactataacaaggtccctgttgagaaacgagtttttaagaacctacaactatttatggagaacaagcagcccgaggatgatctttttgatagactcaatactggtattctgaataagcatcttcaggatctcatggagggcttgacagccaaggtattccgtacrtacaatgcctccatcacgctacagcagcagctaaaagaactgacagccccggatgagaacatcccagcgaagatcctttcttataaccgtgccaatcgagctgttgcaattctttgtaaccatcagagggcaccaccaaaaacttttgagaagtctatgatgaacttgcaaactaagattgatgccaagaaggaacagctagcagatgcccggagagacctgaaaagtgctaaggctgatgccaaggtcatgaaggatgcaaagacgaagaaggtagtagagtcaaagaagaaggctgttcagagactggaggaacagttgatgaagctggaagttcaagccacagaccgagaggaaaataaacagattgccctgggaacctccaaactcaattatctggaccctaggatcacagtggcttggtgcaagaagtggggtgtcccaattgagaagatttacaacaaaacccagcgggagaagtttgcctgggccattgacatggctgatgaagactatgagttttagccagtctcaagaggcagagttctgtgaagaggaacagtgtggtttgggaaagatggataaactgagcctcacttgccctcgtgcctgggggagagaggcagcaagtcttaacaaaccaacatctttgcgaaaagataaacctggagatattataagggagagctgagccagttgtcctatggacaacttatttaaaaatatttcagatatcaaaattctagctgtatgatttgttttgaattttgtttttattttcaagagggcaagtggatgggaatttgtcagcgttctaccaggcaaattcactgtttcactgaaatgtttggattctcttagctactgtatgcaaagtccgattatattggtgcgtttttacagttagggttttgcaataacttytwtwttttaatagaaataaattcctaaactcccttccctctctcccatttcaggaatttaaaattaagtagaacaaaaaacccagcgcacctgttagagtcgtcactctctattgtcatggggatcaattttcattaaacttgaagcagtcgtggctttggcagtgttttggttcagacacctgttcacagaaaaagcatgatgggaaaatatttcctgacttgagtgttcctttttaaatgtgaatttttatttctttttaattattttaaaatatttaaacctttttcttgatcttaaagatcgtgtagattggggttggggagggatgaagggcgagtgaatctaaggataatgaaataatcagtgactgaaaccattttcccatcatcctttgttctgagcattcgctgtaccctttaagatatccatctttttytttttaaccctaatctttcacttgaaagattttattgtataaaaagtttcacaggtcaataaacttagaggaaaatgagtatttggtccaaaaaaaggaaaaataatcaagattttagggcttttattttttyttttgtaattgtgtaaaaaatggaaaaaaacataaaaagcattgttagtttagtgtgtgtgcagagtccatttcccac

SEQ ID NO: 6540 - DNA, 3443 bp, Homo sapiens
caaatgcgaacttaggctgttacacaactgctggggtctgttctcgccgcccgccmggcagtcaggcagcgtcgccgccgtggtagcagcctcagccgtttctggagtctcgggcccacagtcaccgccgcttacctgcgcctcctcgagcctccggagtcccmgtccgcccgcacaggccggttcgccgtctgcgtctcccccacgccgcctcgcctgccgccgcgctcgtccctccgggccgacatgagtggggaccacctccacaacgattcccagatcgaagcggatttccgattgaatgattctcataaacacaaagataaacacaaagatcgagaacaccggcacaaagaacacaagaaggagaaggaccgggaaaagtccaarcatagcaacagtgaacataaagattctgaaaagaaacacaaagagaaggagaagaccaaacacaaagatggaagctcagaaaagcataaagacaaacataaagacagagacaaggaaaaacgaaaagaggaaaaggttcgagcctctggggatgcaaaaataaagaaggagaaggaaaatggcttctctagtccaccacaaattaaagatgaacctgaagatgatggctattttgttcctcctaaagaggatataaagccattaaagagacctcgagatgaggatgatgctgattataaacctaagaaaattaaaacagaagataccaagaaggagaagaaaagaaaactagaagaagaagaggatggtaaattgaaaaaacccaagaataaagataaagataaaaaagttcctgagccagataacaagaaaaagaagccgaagaaagaagaggaacagaagtggaaatggtgggaagaagagcgctatcctgaaggcatcaagtggaaattcctagaacataaaggtccagtatttgccccaccatatgagcctcttccagagaatgtcaagttttattatgatggtaaagtcatgaagctgagccccaaagcagaggaagtagctacgttctttgcaaaaatgctcgaccatgaatatactaccaaggaaatatttaggaaaaatttctttaaagactggagaaaggaaatgactaatgaagagaagaatattatcaccaacctaagcaaatgtgattttacccagatgagccagtatttcaaagcccagacggaagctcggaaacagatgagcaaggaagagaaactgaaaatcaaagaggagaatgaaaaattactgaaagaatatggattctgtattatggataaccacaaagagaggattgctaacttcaagatagagcctcctggacttttccgtggccgcggcaaccaccccaagatgggcatgctgaagagacgaatcatgcccgaggatataatcatcaactgtagcaaagatgccaaggttccttctcctcctccaggacataagtggaaagaagtccggcatgataacaaggttacttggctggtttcctggacagagaacatccaaggttccattaaatacatcatgcttaaccctagttcacgaatcaagggtgagaaggactggcagaaatacgagactgctcggcggctgaaaaaatgtgtggacaagatccggaaccagtatcgagaagactggaagtccaaagagatgaaagtccggcagagagctgtagccctgtacttcatcgacaagcttgctctgagagcaggcaatgaaaaggaggaaggagaaacagcggacactgtgggctgctgctcacttcgtgtggagcacatcaatctacrcccagagttggatggtcaggaatatgtggtagagtttgacttcctcgggaaggactccatcagatactataacaaggtccctgttgagaaacgagtttttaagaacctacaactatttatggagaacaagcagcccgaggatgatctttttgatagactcaatactggtattctgaataagcatcttcaggatctcatggagggcttgacagccaaggtattccgtacrtacaatgcctccatcacgctacagcagcagctaaaagaactgacagccccggatgagaacatcccagcgaagatcctttcttataaccgtgccaatcgagctgttgcaattctttgtaaccatcagagggcaccaccaaaaacttttgagaagtctatgatgaacttgcaaactaagctggaagttcaagccacagaccgagaggaaaataaacagattgccctgggaacctccaaactcaattatctggaccctaggatcacagtggcttggtgcaagaagtggggtgtcccaattgagaagatttacaacaaaacccagcgggagaagtttgcctgggccattgacatggctgatgaagactatgagttttagccagtctcaagaggcagagttctgtgaagaggaacagtgtggtttgggaaagatggataaactgagcctcacttgccctcgtgcctgggggagagaggcagcaagtcttaacaaaccaacatctttgcgaaaagataaacctggagatattataagggagagctgagccagttgtcctatggacaacttatttaaaaatatttcagatatcaaaattctagctgtatgatttgttttgaattttgtttttattttcaagagggcaagtggatgggaatttgtcagcgttctaccaggcaaattcactgtttcactgaaatgtttggattctcttagctactgtatgcaaagtccgattatattggtgcgtttttacagttagggttttgcaataacttytwtwttttaatagaaataaattcctaaactcccttccctctctcccatttcaggaatttaaaattaagtagaacaaaaaacccagcgcacctgttagagtcgtcactctctattgtcatggggatcaattttcattaaacttgaagcagtcgtggctttggcagtgttttggttcagacacctgttcacagaaaaagcatgatgggaaaatatttcctgacttgagtgttcctttttaaatgtgaatttttatttctttttaattattttaaaatatttaaacctttttcttgatcttaaagatcgtgtagattggggttggggagggatgaagggcgagtgaatctaaggataatgaaataatcagtgactgaaaccattttcccatcatcctttgttctgagcattcgctgtaccctttaagatatccatctttttytttttaaccctaatctttcacttgaaagattttattgtataaaaagtttcacaggtcaataaacttagaggaaaatgagtatttggtccaaaaaaaggaaaaataatcaagattttagggcttttattttttyttttgtaattgtgtaaaaaatggaaaaaaacataaaaagcattgttagtttagtgtgtgtgcagagtccatttcccac

SEQ ID NO: 6541 - DNA, 3748 bp, Homo sapiens
caaatgcgaacttaggctgttacacaactgctggggtctgttctcgccgcccgccmggcagtcaggcagcgtcgccgccgtggtagcagcctcagccgtttctggagtctcgggcccacagtcaccgccgcttacctgcgcctcctcgagcctccggagtcccmgtccgcccgcacaggccggttcgccgtctgcgtctcccccacgccgcctcgcctgccgccgcgctcgtccctccgggccgacatgagtggggaccacctccacaacgattcccagatcgaagcggatttccgattgaatgattctcataaacacaaagataaacacaaagatcgagaacaccggcacaaagaacacaagaaggagaaggaccgggaaaagtccaarcatagcaacagtgaacataaagattctgaaaagaaacacaaagagaaggagaagaccaaacacaaagatggaagctcagaaaagcataaagacaaacataaagacagagacaaggaaaaacgaaaagaggaaaaggtacagagttttctagtaggggaggaaggaacgtggatgcacttttcaattttttttctctttagtccaccacaaattaaagatgaacctgaagatgatggctattttgttcctcctaaagaggatataaagccattaaagagacctcgagatgaggatgatgctgattataaacctaagaaaattaaaacagaagataccaagaaggagaagaaaagaaaactagaagaagaagaggatggtaaattgaaaaaacccaagaataaagataaagataaaaaagttcctgagccagataacaagaaaaagaagccgaagaaagaagaggaacagaagtggaaatggtgggaagaagagcgctatcctgaaggcatcaagtggaaattcctagaacataaaggtccagtatttgccccaccatatgagcctcttccagagaatgtcaagttttattatgatggtaaagtcatgaagctgagccccaaagcagaggaagtagctacgttctttgcaaaaatgctcgaccatgaatatactaccaaggaaatatttaggaaaaatttctttaaagactggagaaaggaaatgactaatgaagagaagaatattatcaccaacctaagcaaatgtgattttacccagatgagccagtatttcaaagcccagacggaagctcggaaacagatgagcaaggaagagaaactgaaaatcaaagaggagaatgaaaaattactgaaagaatatggattctgtattatggataaccacaaagagaggattgctaacttcaagatagagcctcctggacttttccgtggccgcggcaaccaccccaagatgggcatgctgaagagacgaatcatgcccgaggatataatcatcaactgtagcaaagatgccaaggttccttctcctcctccaggacataagtggaaagaagtccggcatgataacaaggttacttggctggtttcctggacagagaacatccaaggttccattaaatacatcatgcttaaccctagttcacgaatcaagggtgagaaggactggcagaaatacgagactgctcggcggctgaaaaaatgtgtggacaagatccggaaccagtatcgagaagactggaagtccaaagagatgaaagtccggcagagagctgtagccctgtacttcatcgacaagcttgctctgagagcaggcaatgaaaaggaggaaggagaaacagcggacactgtgggctgctgctcacttcgtgtggagcacatcaatctacrcccagagttggatggtcaggaatatgtggtagagtttgacttcctcgggaaggactccatcagatactataacaaggtccctgttgagaaacgagtttttaagaacctacaactatttatggagaacaagcagcccgaggatgatctttttgatagactcaatactggtattctgaataagcatcttcaggatctcatggagggcttgacagccaaggtattccgtacrtacaatgcctccatcacgctacagcagcagctaaaagaactgacagccccggatgagaacatcccagcgaagatcctttcttataaccgtgccaatcgagctgttgcaattctttgtaaccatcagagggcaccaccaaaaacttttgagaagtctatgatgaacttgcaaactaagattgatgccaagaaggaacagctagcagatgcccggagagacctgaaaagtgctaaggctgatgccaaggtcatgaaggatgcaaagacgaagaaggtagtagagtcaaagaagaaggctgttcagagactggaggaacagttgatgaagctggaagttcaagccacagaccgagaggaaaataaacagattgccctgggaacctccaaactcaattatctggaccctaggatcacagtggcttggtgcaagaagtggggtgtcccaattgagaagatttacaacaaaacccagcgggagaagtttgcctgggccattgacatggctgatgaagactatgagttttagccagtctcaagaggcagagttctgtgaagaggaacagtgtggtttgggaaagatggataaactgagcctcacttgccctcgtgcctgggggagagaggcagcaagtcttaacaaaccaacatctttgcgaaaagataaacctggagatattataagggagagctgagccagttgtcctatggacaacttatttaaaaatatttcagatatcaaaattctagctgtatgatttgttttgaattttgtttttattttcaagagggcaagtggatgggaatttgtcagcgttctaccaggcaaattcactgtttcactgaaatgtttggattctcttagctactgtatgcaaagtccgattatattggtgcgtttttacagttagggttttgcaataacttytwtwttttaatagaaataaattcctaaactcccttccctctctcccatttcaggaatttaaaattaagtagaacaaaaaacccagcgcacctgttagagtcgtcactctctattgtcatggggatcaattttcattaaacttgaagcagtcgtggctttggcagtgttttggttcagacacctgttcacagaaaaagcatgatgggaaaatatttcctgacttgagtgttcctttttaaatgtgaatttttatttctttttaattattttaaaatatttaaacctttttcttgatcttaaagatcgtgtagattggggttggggagggatgaagggcgagtgaatctaaggataatgaaataatcagtgactgaaaccattttcccatcatcctttgttctgagcattcgctgtaccctttaagatatccatctttttytttttaaccctaatctttcacttgaaagattttattgtataaaaagtttcacaggtcaataaacttagaggaaaatgagtatttggtccaaaaaaaggaaaaataatcaagattttagggcttttattttttyttttgtaattgtgtaaaaaatggaaaaaaacataaaaagcagaattttaatgtgaagacattttttgctataatcattagttttaraggcattgttagtttagtgtgtgtgcagagtccatttcccacatctttcctcaagtatcttctatttttatcatgaattcccttttaatcaactgtaggttatttaaaataaattcctacaacttaatggaaacttaa

SEQ ID NO: 6542 - DNA, 2265 bp, Homo sapiens
agctgggttggggtcgggctccgggaatggtgggcggcggtcgccggagccggtgccatctgtgggggctttgggccaggggtctccggacagcatgagcgtgggcttcatcggcgctggccagctggcttttgccctggccaagggcttcacagcagcaggcgtcttggctgcccacaagataatggctagctccccagacatggacctggccacagtttctgctctcaggaagatgggggtgaagttgacaccccacaacaaggagacggtgcagcacagtgatgtgctcttcctggctgtgaagccacacatcatccccttcatcctggatgaaataggcgccgacattgaggacagacacattgtggtrtcctgcgcggccggcgtcaccatcagctccattgagaagaagctgtcagcgtttcggccagcccccagrgtcatccgctgcatgaccaacactccagtcgtggtgcgggagggggccaccgtgtatgccacaggcacgcacgcccaggtggaggacgggaggctcatggagcagctgctgagcagcgtgggcttctgcacggaggtggaagaggacctgattgatgccgtcacggggctcagtggcagyggccccgcctacgcattcacagccctggatgccctggctgatgggggygtgaagatgggacttccaaggcgcctggcagtccgcctcggggcccaggccctcctgggggctgccaagatgctgctgcactcagaacagcacccaggccagctcaaggacaacgtcagctctcctggtggggccaccatccatgccttgcatgtgctggagagtgggggcttccgctccctgctcatcaacgctgtggaggcctcctgcatccgcacacgggagctgcagtccatggctgaccaggagcaggtgtcaccagccgccatcaagaagaccatcctggacarggtgaagctggactcccctgcagggacygctctgtcrccttctggccacaccaagctgctcccccgcagcctggccccagcgggcaaggattgacacgtcctgcctgaccaccatcctgccaccaccttctcttctcttgtcactagggggactagggggtycccaaagtggcccactttctgwggctctgatcagcgcaggggccagccagggacatagccagggaggggccacatcacttcccactggaaatctctgtggtctgcaagtgcttcccagcccagaacaggggtggattccccaacctcaacctcctttcttctctgctcccaaaccatgtcaggaccaccttcctctagagctcrggagcccggagggtcttcacccactcctactccagtatcagctggcacgggctccttcctgagagcaaaggtcaaggaccccctctgtgaaggctcagcagaggtgggatcccacgccccctcccggcccctccctgccctccattcagggagaaacctctccttcccgtgtgagaagggccagagggtccaggcatcccaagtccagcgtgaagggccacagcccctcttggctgccaagcacgcagatcccatggacatttggggaaagggctccttgggctgctggtgaacttctgtggccaccacctcctgctcctgacctccctgggagggtgctatcagttctgtcctggccctttcagttttataagttggtttccagcccccagtgtcctgacttctgtctgccacatgaggagggaggccctgcctgtgtgggagggtggttactgtgggtggaatagtggaggccttcaactgattagacaaggcccgcccacatcttggagggcatctgccttactgattaaaatgtcaatgtaatctaatgcaaaagtctacagattcaaatgttagtctcatgcaacccctccccacccctgccagaaacagaataatgtttgaccaaacactcaggcaccctgtagcccagtcaagtggacacatacaatcacccattccaggaggcccacaggattggaggagctgctgagggttgggttacaagggccaggggtgctctggttccttcaaccaacacatagttactgagtatggagacagcaagatgaggcccccttccctccagaggcagtgcacactgtgtgaggggagctgggctgggtagcagcagggtgtcagggtgtgcaggggggtcccaggtgcgccaggagtcagggtatgcagggggctccagggtgtgcaggggttaggaga

SEQ ID NO: 6543 - DNA, 2320 bp, Homo sapiens
gaatggtgggcggcggtcgccgggtggggcgcgacggtagcccagttctgggcggggtgggaacccagacgggggacccctaggcgccgggccctccctctccccgtacttttcccccttcccagtcatttcttctgcggaacctccacccctccagtgggtgcgggaccctaggcagcaggccaggcaccgccgctctgactgggggccccgaagcagttaacgggccggacagcaaagtggaaagttagaccagctgggaccaggggaggtgggcacccggctgcgggaggagcggccaggctggcactgcccccctaacttgctctcgatcctgccggtctcgtcccgcagagccggtgccatctgtgggggctttgggccaggggtctccggacagcatgagcgtgggcttcatcggcgctggccagctggcttttgccctggccaagggcttcacagcagcaggtaggcgtcttggctgcccacaagataatggctagctccccagacatggacctggccacagtttctgctctcagggtagatgggggtgaagttgacaccccacaacaaggagacggtgcagcacagtgatgtgctcttcctrgctgtgaagccacacatcatccccttcatcctggatgaaataggcgccgacattgaggacagacacattgtggtgtcctgcgcggccggcgtcaccatcagctccattgagaagaagctgtcagcgtttcggccagcccccagggtcatccgctgcatgaccaacactccagtcgtggtgcgggagggggccaccgtgtatgccacaggcacgcacgcccaggtggaggacgggaggctcatggagcagctgctgagcagcgtgggcttctgcacggaggtggaagaggacctgattgatgccgtcacggggctcagtggcagcggcccrgcctacggagctgcagtccatggctgaycaggagcargtgtcaccagccgccatcaagaagaccatcctggacaaggtgaagctggactcccctgcagggaccgctctgtcgccttctggccacaccaagctgctcccccgcagcctggccccagcgggcayggattgacacgtcctgcctgawcaccatcctgccaccaccttctcttctcttgtcactagggggactagggggtccccaaagtggcccactttctgtggctctgatcagcgcaggggccagccagggacatagccagggaggggccacatcacttcccactggaaatctctgtggtctgcaagtgcttcccagcccagaacagrggtggattccccaacctcaacctcctttcttctctgctcccaaaccatgtcaggaccaccttcctctagagctcgggagcccggagggtcttcacccactcctactccagtatcagctggcacgggctccttcctgagagcaaaggtcaaggaccccctctgtgaaggctcagcagaggtgggatcccacgccccctcccggcccctccctgccctccattcagggagaaacctctccttcccgtgtgagaagggccagagggtccaggcatcccaagtccagcgtgaagggccacagcccctcttggctgccaagcacgcagatcccatggacatttggggaaagggctccttgggctgctggtgaacttctgtggccaccacctcctgctcctgacctccctgggagggtgctatcagttctgtcctggccctttcagttttataagttggtttccagcccccagtgtcctgacttctgtctgccacatgaggagggaggccctgcctgtgtgggagggtggttactgtgggtggaatagtggaggccttcaactgattagacaaggcccgcccacatcttggagggcatctgccttactgattaaaatgtcaatgtaatctaatgcaaaagtctacagattcaaatgttagtctcatgcaacccctccccacccctgccagaaacagaataatgtttgaccaaacactcaggcaccctgtagcccagtcaagtggacacatacaatcacccattccaggaggcccacaggattggaggagctgctgagggttgggttacaagggccaggggtgctctggttccttcaaccaacacatagttactgagtatggagacagcaagatgaggcccccttccctccagaggcagtgcacactgtgtgaggggagctgggctgggtagcagcagggtgtcagggtgtgcaggggggtcccaggtgcgccaggagtcagggtatgcagggggctccagggtgtgcaggggttaggaga

SEQ ID NO: 6544 - DNA, 1824 bp, Homo sapiens
ctgggtgcgggtgccgcgtggcggccgcagcgctgaggggtggagccggtgccatctgtgggggctttgggccaggggtctccggacagcatgagcgtgggcttcatcggcgctggccagctggcttttgccctggccaagggcttcacagcagcaggcgtcttggctgcccacaagataatggctagctccccagacatggacctggccacagtttctgctctcaggaagatgggggtgaagttgacaccccacaacaaggagacggtgcagcacagtgatgtgctcttcctggctgtgaagccacacatcatccccttcatcctggatgaaataggcgccgacattgaggacagacacattgtggtrtcctgcgcggccggcgtcaccatcagctccattgagaagaagctgtcagcgtttcggccagcccccagrgtcatccgctgcatgaccaacactccagtcgtggtgcgggagggggccaccgtgtatgccacaggcacgcacgcccaggtggaggacgggaggctcatggagcagctgctgagcagcgtgggcttctgcacggaggtggaagaggacctgattgatgccgtcacggggctcagtggcagyggccccgcctacgcattcacagccctggatgccctggctgatgggggygtgaagatgggacttccaaggcgcctggcagtccgcctcggggcccaggccctcctggtcaggggctgccaagatgctgctgcactcagaacagcacccaggccagctcaaggacaacgtcagctctcctggtggggccaccatccatgccttgcatgtgctggagagtgggggcttccgctccctgctcatcaacgctgtggaggcctcctgcatccgcacacgggagctgcagtccatggctgaccaggagcaggtgtcaccagccgccatcaagaagaccatcctggacarggtgaagctggactcccctgcagggacygctctgtcrccttctggccacaccaagctgctcccccgcagcctggccccagcgggcaaggattgacacgtcctgcctgaccaccatcctgccaccaccttctcttctcttgtcactagggggactagggggtycccaaagtggcccactttctgwggctctgatcagcgcaggggccagccagggacatagccagggaggggccacatcacttcccactggaaatctctgtggtctgcaagtgcttcccagcccagaacaggggtggattccccaacctcaacctcctttcttctctgctcccaaaccatgtcaggaccaccttcctctagagctcrggagcccggagggtcttcacccactcctactccagtatcagctggcacgggctccttcctgagagcaaaggtcaaggaccccctctgtgaaggctcagcagaggtgggatcccagaagggccagagggtccaggcatcccaagtccagcgtgaagggccacagcccctcttggctgccaagcacgcagatcccatggacatttggggaaagggctccttgggctgctggtgaacttctgtggccaccacctcctgctcctgacctccctgggagggtgctatcagttctgtcctggccctttcagttttataagttggtttccagcccccagtgtcctgacttctgtctgccacatgaggagggaggccctgcctgtgtgggagggtggttactgtgggtggaatagtggaggccttcaactgattagacaaggcccgcccacatcttggagggcatctgccttactgattaaaatgtcaatgtaatctaatgcaaaa

SEQ ID NO: 6545 - DNA, 2097 bp, Homo sapiens
ctgggtgcgggtgccgcgtggcggccgcagcgctgaggggtggagccggtgccatctgtgggggctttgggccaggggtctccggacagcatgagcgtgggcttcatcggcgctggccagctggcttttgccctggccaagggcttcacagcagcaggcgtcttggctgcccacaagataatggctagctccccagacatggacctggccacagtttctgctctcaggaagatgggggtgaagttgacaccccacaacaaggagacggtgcagcacagtgatgtgctcttcctggctgtgaagccacacatcatccccttcatcctggatgaaataggcgccgacattgaggacagacacattgtggtrtcctgcgcggccggcgtcaccatcagctccattgagaagaagctgtcagcgtttcggccagcccccagrgtcatccgctgcatgaccaacactccagtcgtggtgcgggagggggccaccgtgtatgccacaggcacgcacgcccaggtggaggacgggaggctcatggagcagctgctgagcagcgtgggcttctgcacggaggtggaagaggacctgattgatgccgtcacggggctcagtggcagyggccccgcctacgcattcacagccctggatgccctggctgatgggggygtgaagatgggacttccaaggcgcctggcagtccgcctcggggcccaggccctcctgggagctgcagtccatggctgaccaggagcaggtgtcaccagccgccatcaagaagaccatcctggacarggtgaagctggactcccctgcagggacygctctgtcrccttctggccacaccaagctgctcccccgcagcctggccccagcgggcaaggattgacacgtcctgcctgaccaccatcctgccaccaccttctcttctcttgtcactagggggactagggggtycccaaagtggcccactttctgwggctctgatcagcgcaggggccagccagggacatagccagggaggggccacatcacttcccactggaaatctctgtggtctgcaagtgcttcccagcccagaacaggggtggattccccaacctcaacctcctttcttctctgctcccaaaccatgtcaggaccaccttcctctagagctcrggagcccggagggtcttcacccactcctactccagtatcagctggcacgggctccttcctgagagcaaaggtcaaggaccccctctgtgaaggctcagcagaggtgggatcccacgccccctcccggcccctccctgccctccattcagggagaaacctctccttcccgtgtgagaagggccagagggtccaggcatcccaagtccagcgtgaagggccacagcccctcttggctgccaagcacgcagatcccatggacatttggggaaagggctccttgggctgctggtgaacttctgtggccaccacctcctgctcctgacctccctgggagggtgctatcagttctgtcctggccctttcagttttataagttggtttccagcccccagtgtcctgacttctgtctgccacatgaggagggaggccctgcctgtgtgggagggtggttactgtgggtggaatagtggaggccttcaactgattagacaaggcccgcccacatcttggagggcatctgccttactgattaaaatgtcaatgtaatctaatgcaaaagtctacagattcaaatgttagtctcatgcaacccctccccacccctgccagaaacagaataatgtttgaccaaacactcaggcaccctgtagcccagtcaagtggacacatacaatcacccattccaggaggcccacaggattggaggagctgctgagggttgggttacaagggccaggggtgctctggttccttcaaccaacacatagttactgagtatggagacagcaagatgaggcccccttccctccagaggcagtgcacactgtgtgaggggagctgggctgggtagcagcagggtgtcagggtgtgcaggggggtcccaggtgcgccaggagtcagggtatgcagggggctccagggtgtgcaggggttaggaga

SEQ ID NO: 6546 - DNA, 2218 bp, Homo sapiens
agccggtgccatctgtgggggctttgggccaggggtctccggacagcatgagcgtgggcttcatcggcgctggccagctggcttttgccctggccaagggcttcacagcagcaggcgtcttggctgcccacaagataatggctagctccccagacatggacctggccacagtttctgctctcaggaagatgggggtgaagttgacaccccacaacaaggagacggtgcagcacagtgatgtgctcttcctggctgtgaagccacacatcatccccttcatcctggatgaaataggcgccgacattgaggacagacacattgtggtrtcctgcgcggccggcgtcaccatcagctccattgagaagaagctgtcagcgtttcggccagcccccagrgtcatccgctgcatgaccaacactccagtcgtggtgcgggagggggccaccgtgtatgccacaggcacgcacgcccaggtggaggacgggaggctcatggagcagctgctgagcagcgtgggcttctgcacggaggtggaagaggacctgattgatgccgtcacggggctcagtggcagyggccccgcctacgcattcacagccctggatgccctggctgatgggggygtgaagatgggacttccaaggcgcctggcagtccgcctcggggcccaggccctcctgggggctgccaagatgctgctgcactcagaacagcacccaggccagctcaaggacaacgtcagctctcctggtggggccaccatccatgccttgcatgtgctggagagtgggggcttccgctccctgctcatcaacgctgtggaggcctcctgcatccgcacacgggagctgcagtccatggctgaccaggagcaggtgtcaccagccgccatcaagaagaccatcctggacarggtgaagctggactcccctgcagggacygctctgtcrccttctggccacaccaagctgctcccccgcagcctggccccagcgggcaaggattgacacgtcctgcctgaccaccatcctgccaccaccttctcttctcttgtcactagggggactagggggtycccaaagtggcccactttctgwggctctgatcagcgcaggggccagccagggacatagccagggaggggccacatcacttcccactggaaatctctgtggtctgcaagtgcttcccagcccagaacaggggtggattccccaacctcaacctcctttcttctctgctcccaaaccatgtcaggaccaccttcctctagagctcrggagcccggagggtcttcacccactcctactccagtatcagctggcacgggctccttcctgagagcaaaggtcaaggaccccctctgtgaaggctcagcagaggtgggatcccacgccccctcccggcccctccctgccctccattcagggagaaacctctccttcccgtgtgagaagggccagagggtccaggcatcccaagtccagcgtgaagggccacagcccctcttggctgccaagcacgcagatcccatggacatttggggaaagggctccttgggctgctggtgaacttctgtggccaccacctcctgctcctgacctccctgggagggtgctatcagttctgtcctggccctttcagttttataagttggtttccagcccccagtgtcctgacttctgtctgccacatgaggagggaggccctgcctgtgtgggagggtggttactgtgggtggaatagtggaggccttcaactgattagacaaggcccgcccacatcttggagggcatctgccttactgattaaaatgtcaatgtaatctaatgcaaaagtctacagattcaaatgttagtctcatgcaacccctccccacccctgccagaaacagaataatgtttgaccaaacactcaggcaccctgtagcccagtcaagtggacacatacaatcacccattccaggaggcccacaggattggaggagctgctgagggttgggttacaagggccaggggtgctctggttccttcaaccaacacatagttactgagtatggagacagcaagatgaggcccccttccctccagaggcagtgcacactgtgtgaggggagctgggctgggtagcagcagggtgtcagggtgtgcaggggggtcccaggtgcgccaggagtcagggtatgcagggggctccagggtgtgcaggggttaggaga

SEQ ID NO: 6547 - DNA, 1820 bp, Homo sapiens
ctgggtgcgggtgccgcgtggcggccgcagcgctgaggggtggagccggtgccatctgtgggggctttgggccaggggtctccggacagcatgagcgtgggcttcatcggcgctggccagctggcttttgccctggccaagggcttcacagcagcaggcgtcttggctgcccacaagataatggctagctccccagacatggacctggccacagtttctgctctcaggaagatgggggtgaagttgacaccccacaacaaggagacggtgcagcacagtgatgtgctcttcctggctgtgaagccacacatcatccccttcatcctggatgaaataggcgccgacattgaggacagacacattgtggtrtcctgcgcggccggcgtcaccatcagctccattgagaagaagctgtcagcgtttcggccagcccccagrgtcatccgctgcatgaccaacactccagtcgtggtgcgggagggggccaccgtgtatgccacaggcacgcacgcccaggtggaggacgggaggctcatggagcagctgctgagcagcgtgggcttctgcacggaggtggaagaggacctgattgatgccgtcacggggctcagtggcagyggccccgcctacgcattcacagccctggatgccctggctgatgggggygtgaagatgggacttccaaggcgcctggcagtccgcctcggggcccaggccctcctgggggctgccaagatgctgctgcactcagaacagcacccaggccagctcaaggacaacgtcagctctcctggtggggccaccatccatgccttgcatgtgctggagagtgggggcttccgctccctgctcatcaacgctgtggaggcctcctgcatccgcacacgggagctgcagtccatggctgaccaggagcaggtgtcaccagccgccatcaagaagaccatcctggacarggtgaagctggactcccctgcagggacygctctgtcrccttctggccacaccaagctgctcccccgcagcctggccccagcgggcaaggattgacacgtcctgcctgaccaccatcctgccaccaccttctcttctcttgtcactagggggactagggggtycccaaagtggcccactttctgwggctctgatcagcgcaggggccagccagggacatagccagggaggggccacatcacttcccactggaaatctctgtggtctgcaagtgcttcccagcccagaacaggggtggattccccaacctcaacctcctttcttctctgctcccaaaccatgtcaggaccaccttcctctagagctcrggagcccggagggtcttcacccactcctactccagtatcagctggcacgggctccttcctgagagcaaaggtcaaggaccccctctgtgaaggctcagcagaggtgggatcccagaagggccagagggtccaggcatcccaagtccagcgtgaagggccacagcccctcttggctgccaagcacgcagatcccatggacatttggggaaagggctccttgggctgctggtgaacttctgtggccaccacctcctgctcctgacctccctgggagggtgctatcagttctgtcctggccctttcagttttataagttggtttccagcccccagtgtcctgacttctgtctgccacatgaggagggaggccctgcctgtgtgggagggtggttactgtgggtggaatagtggaggccttcaactgattagacaaggcccgcccacatcttggagggcatctgccttactgattaaaatgtcaatgtaatctaatgcaaaa

SEQ ID NO: 6548 - DNA, 2168 bp, Homo sapiens
ctgggtgcgggtgccgcgtggcggccgcagcgctgaggggtggagccggtgccatctgtgggggctttgggccaggggtctccggacagcatgagcgtgggcttcatcggcgctggccagctggcttttgccctggccaagggcttcacagcagcaggcgtcttggctgcccacaagataatggctagctccccagacatggacctggccacagtttctgctctcaggaagatgggggtgaagttgacaccccacaacaaggagacggtgcagcacagtgatgtgctcttcctggctgtgaagccacacatcatccccttcatcctggatgaaataggcgccgacattgaggacagacacattgtggtrtcctgcgcggccggcgtcaccatcagctccattgagaagaagctgtcagcgtttcggccagcccccagrgtcatccgctgcatgaccaacactccagtcgtggtgcgggagggggccaccgtgtatgccacaggcacgcacgcccaggtggaggacgggaggctcatggagcagctgctgagcagcgtgggcttctgcacggaggtggaagaggacctgattgatgccgtcacggggctcagtggcagyggccccgcctacggggctgccaagatgctgctgcactcagaacagcacccaggccagctcaaggacaacgtcagctctcctggtggggccaccatccatgccttgcatgtgctggagagtgggggcttccgctccctgctcatcaacgctgtggaggcctcctgcatccgcacacgggagctgcagtccatggctgaccaggagcaggtgtcaccagccgccatcaagaagaccatcctggacarggtgaagctggactcccctgcagggacygctctgtcrccttctggccacaccaagctgctcccccgcagcctggccccagcgggcaaggattgacacgtcctgcctgaccaccatcctgccaccaccttctcttctcttgtcactagggggactagggggtycccaaagtggcccactttctgwggctctgatcagcgcaggggccagccagggacatagccagggaggggccacatcacttcccactggaaatctctgtggtctgcaagtgcttcccagcccagaacaggggtggattccccaacctcaacctcctttcttctctgctcccaaaccatgtcaggaccaccttcctctagagctcrggagcccggagggtcttcacccactcctactccagtatcagctggcacgggctccttcctgagagcaaaggtcaaggaccccctctgtgaaggctcagcagaggtgggatcccacgccccctcccggcccctccctgccctccattcagggagaaacctctccttcccgtgtgagaagggccagagggtccaggcatcccaagtccagcgtgaagggccacagcccctcttggctgccaagcacgcagatcccatggacatttggggaaagggctccttgggctgctggtgaacttctgtggccaccacctcctgctcctgacctccctgggagggtgctatcagttctgtcctggccctttcagttttataagttggtttccagcccccagtgtcctgacttctgtctgccacatgaggagggaggccctgcctgtgtgggagggtggttactgtgggtggaatagtggaggccttcaactgattagacaaggcccgcccacatcttggagggcatctgccttactgattaaaatgtcaatgtaatctaatgcaaaagtctacagattcaaatgttagtctcatgcaacccctccccacccctgccagaaacagaataatgtttgaccaaacactcaggcaccctgtagcccagtcaagtggacacatacaatcacccattccaggaggcccacaggattggaggagctgctgagggttgggttacaagggccaggggtgctctggttccttcaaccaacacatagttactgagtatggagacagcaagatgaggcccccttccctccagaggcagtgcacactgtgtgaggggagctgggctgggtagcagcagggtgtcagggtgtgcaggggggtcccaggtgcgccaggagtcagggtatgcagggggctccagggtgtgcaggggttaggaga

SEQ ID NO: 6549 - DNA, 2261 bp, Homo sapiens
ctgggtgcgggtgccgcgtggcggccgcagcgctgaggggtggagccggtgccatctgtgggggctttgggccaggggtctccggacagcatgagcgtgggcttcatcggcgctggccagctggcttttgccctggccaagggcttcacagcagcaggcgtcttggctgcccacaagataatggctagctccccagacatggacctggccacagtttctgctctcaggaagatgggggtgaagttgacaccccacaacaaggagacggtgcagcacagtgatgtgctcttcctggctgtgaagccacacatcatccccttcatcctggatgaaataggcgccgacattgaggacagacacattgtggtrtcctgcgcggccggcgtcaccatcagctccattgagaagaagctgtcagcgtttcggccagcccccagrgtcatccgctgcatgaccaacactccagtcgtggtgcgggagggggccaccgtgtatgccacaggcacgcacgcccaggtggaggacgggaggctcatggagcagctgctgagcagcgtgggcttctgcacggaggtggaagaggacctgattgatgccgtcacggggctcagtggcagyggccccgcctacgcattcacagccctggatgccctggctgatgggggygtgaagatgggacttccaaggcgcctggcagtccgcctcggggcccaggccctcctgggggctgccaagatgctgctgcactcagaacagcacccaggccagctcaaggacaacgtcagctctcctggtggggccaccatccatgccttgcatgtgctggagagtgggggcttccgctccctgctcatcaacgctgtggaggcctcctgcatccgcacacgggagctgcagtccatggctgaccaggagcaggtgtcaccagccgccatcaagaagaccatcctggacarggtgaagctggactcccctgcagggacygctctgtcrccttctggccacaccaagctgctcccccgcagcctggccccagcgggcaaggattgacacgtcctgcctgaccaccatcctgccaccaccttctcttctcttgtcactagggggactagggggtycccaaagtggcccactttctgwggctctgatcagcgcaggggccagccagggacatagccagggaggggccacatcacttcccactggaaatctctgtggtctgcaagtgcttcccagcccagaacaggggtggattccccaacctcaacctcctttcttctctgctcccaaaccatgtcaggaccaccttcctctagagctcrggagcccggagggtcttcacccactcctactccagtatcagctggcacgggctccttcctgagagcaaaggtcaaggaccccctctgtgaaggctcagcagaggtgggatcccacgccccctcccggcccctccctgccctccattcagggagaaacctctccttcccgtgtgagaagggccagagggtccaggcatcccaagtccagcgtgaagggccacagcccctcttggctgccaagcacgcagatcccatggacatttggggaaagggctccttgggctgctggtgaacttctgtggccaccacctcctgctcctgacctccctgggagggtgctatcagttctgtcctggccctttcagttttataagttggtttccagcccccagtgtcctgacttctgtctgccacatgaggagggaggccctgcctgtgtgggagggtggttactgtgggtggaatagtggaggccttcaactgattagacaaggcccgcccacatcttggagggcatctgccttactgattaaaatgtcaatgtaatctaatgcaaaagtctacagattcaaatgttagtctcatgcaacccctccccacccctgccagaaacagaataatgtttgaccaaacactcaggcaccctgtagcccagtcaagtggacacatacaatcacccattccaggaggcccacaggattggaggagctgctgagggttgggttacaagggccaggggtgctctggttccttcaaccaacacatagttactgagtatggagacagcaagatgaggcccccttccctccagaggcagtgcacactgtgtgaggggagctgggctgggtagcagcagggtgtcagggtgtgcaggggggtcccaggtgcgccaggagtcagggtatgcagggggctccagggtgtgcaggggttaggaga

SEQ ID NO: 6550 - DNA, 2168 bp, Homo sapiens
ttgccccaaggtcatagctcctaacccagcttgccagccccaggccggggacaccagagactgagcccttcgcgctggagaccccggcgcgggtggggcgggagggctccggggccaagagacaggtcacaatggggacaggggacgaaaggcgccgggggtccgggtcccgagcagtccccgccgccgccagactccgcagccgggagggggatggggtgcgcgtagaggctccgcggcccgggttggacggaggagcccaggagccaccgcagccgccgcacgcccagagctccgagcttcgctgccagcccaggacaccggggccctgccgtgggccgaggggagccgggcggcgggagaggagccccggagccccggagccccggagccccgccgggcgccagccgagagggcgttttccccgcccccggagactcgcccgcccggcccgccccgccccgagcgcggggagttcacctccgcccgtcaccacctccccttgtcgcctaggtccacccgagccccctcccccgggccgcccccgagcacgaagttggcgggagcctataaaagctggtgccggcgcgacccgcggacacacagtgcaggcgcccaagccgccgccgccagatcggtgccgattcctgccctgccccgaccgccagcgcgaccatgtcccatcactgggggtacggcaaacacaacggacctgagcactggcataaggacttccccattgccaagggagagcgccagtcccctgttgacatcgacactcatacagccaagtakgacccttccctgaagcccctgtctgtttcctatgatcaagcaacttccctgaggatcctcaacaatggtcatgctttcaacgtggagtttgatgactctcaggacaaagcagtgctcaagggaggacccctggatggcacttacagattgattcmgtttcactttcactggggttcacttgatggacaaggttcagagcatactgtggataaaaagaaatatgctgcagaacttcacttggttcactggaacaccaaatatggggattttgggaaagctgtgcagcaacctgatggactggccgttctaggtatttttttgaaggttggcagcgctaaaccgggccttcagaaagttgttgatgtgctggattccattaaaacaaagggcaagagtgctgacttcactaacttcgatcctcgtggcctccttcctgaatccytggattactggacctacccaggctcactgaccacccctcctcttctggaatgtgtgacctggattgtgctcaaggaacccatcagcgtcagcagcgagcaggtgttgaaattccgtaaacttaacttcaatggggagggtgaacccgaagaactgatggtggacaactggcgcccagctcagccactgaagaacaggcaaatcaaagcttccttcaaataagatggtcccatagtctgtatccaaataatgaatcttcgggtgtttccctttagctaagcacagatctaccttggtgatttggaccctggttgctttgtgtctagttttctagacccttcatctcttacttgatagacttactaataaaatgtgaagactagaccaattgtcatgcttgacacaactgctgtggctggttggtgctttgtttatggtagtagtttttctgtaacacagaatataggataagaaataagaataaagtaccttgactttgttcacagcatgtagggtgatgagcactcacaattgttgactaaaatgctgcttttaaaacataggaaagtagaatggttgagtgcaaatccatagcacaagataaattgagctagttaaggcaaatcaggtaaaatagtcatgattctatgtaatgtaaaccagaaaaaataaatgttcatgatttcaagatgttatattaaagraaaactttaaaaattattatatatttatagcaaagttatcttaaatatgaattctgttgtaatttaatgacttttgaattacagagatataaatgaagtattatctgtaaaaattgttataattagagttgtgatacagagtatatttccattcagacaatatatcataacttaataaatatwgtattttagatatattmtctaataaaattcagaattctattctgg

SEQ ID NO: 6551 - DNA, 1761 bp, Homo sapiens
ttaaaatcacagataaaataagttcctatggtgaggaatggaggcctccagctgacagagagcaaagaactgaggcctgcgacaactataggcgtgatcctgggaaccgattctcaacctcatctgagccttgagacgactgctgctctggccgacagcctgacggcaacctcctgagacagctctgagaggagattttccaggttcaagtcccgagacgaggtttcaccgtgctggccaagctggtctccacctcaggtgatctgccccgctaagcctccgcragtgctgggattacaggctagtgcaaatcttcaggggccgtccrggactacagagctgtttcaccctaccttggcttcaatctcttcccccatgctcgaaggtgcggagctgtacttcaacgtggaccatggctacctggagggcctggttcgaggatgcaaggccagcctcctgacccagcaagactatatcaacctggtccagtgtgagaccctagaagacctgaaaattcatctccagactactgattatggtaactttttggctaatcacacaaatcctcttactgtttccaaaattgacactgagatgaggaaaagactatgtggagaatttgagtatttccggaatcattccctggagcccctcagcacatttctcacctatatgacgtgcagttatatgatagacaatgtgattctgctgatgaatggtgcattgcagaaaaaatctgtgaaagaaattctggggaagtgccaccccttgggccgtttcacagaaatggaagctgtcaacattgcagagacaccttcagatctctttaatgccattctgatcgaaacgccattagctccattcttccaagactgcatgtctgaaaatgctctagatgaactgaatattgaattgctacgcaataaactatacaagtcttaccttgaggcattctataaattctgtaagaatcatggtgatgtcacagcagaagttatgtgtcccattcttgagtttgaggccgacagacgtgcttttatcatcactcttaactcctttggcactgaattgagcaaagaagaccgagagaccctctatccaaccttcggcaaactctatcctgaggggttgcggctgttggctcaagcagaagactttgaccagatgaagaacgtagcggatcattacrgagtatacaaacctttatttgaagctgtaggtggcagtgggggaaagacattggaggacgtgttttacragcgtgaggtacaaatgaatgtgctggcattcaacagacagttccactacggtgtgttttatgcatatgtaaagctgaaggaacaggaaattagaaatattgtgtggatagcagaatgtatttcacagaggcatcgaactaaaatcaacagttacattccaattttataacccaagtaaggttctcaaatgtagaaaattataaatgttaaaaggaagttattgaagaaaataaaagaaattatgttatattatctagactacacaaaagtaagccacactatatcttcatgagttgcaaatccatggaaacacagtaaaccagccctgaaacaaagcatttccttgttttcagtggtattagatcttgtttccacatgtctgtctcattcttcactgggccttacaggttagttttaattaactctatggtatttttcttattcttgtttgatcatgttaaaaattggacctaataaaagtattttattcttgcttttccat

SEQ ID NO: 6552 - DNA, 1080 bp, Homo sapiens
ctttgtccggccccccgccgcgacccgaggcgggggccccacatgaccgaaggggtacttcctggactctacctcggaaacttcattgatgccaaagacctggatcagctgggccgaaataagatcacacacatcatctctatccatgagtcaccccagcctctgctgcaggatatcacctaccttcgcatcccrgtcgctgatacccctgaggtacccatcaaaaagcacttcaaagaatgtatcaacttcatccactgctgccgccttaatggggggaactgccttgtgcactgctttgcaggcatctctcgcagcaccacgattgtgacagcgtatgtgatgactgtgacggggctaggctggcgggacgtgcttgaagccatcaaggccaccaggcccatcgccaaccccaacccaggctttaggcagcagcttgaagagtttggctgggccagttcccagaagcttcgccggcagctggaggagcgcttcggcgagagccccttccgcgacgaggaggagttgcgcgcgctgctgccgctgtgcaagcgctgccggcagggctccgcgacctcggcctcctccgccgggccgcactcagcagcctccgagggaaccstgcagcgcctggtgccgcgcacgccccgggaagcccaccggccgctgccgctgctggcgcgcgtcaagcagactttctcttgcctcccccggtgtctgtcccgcaagggcggcaagtgaggatgcagtccagccgtggctcccyacttccgactggctcccttcgggggctgtctgcgccttccacgccccccaggacgggcccagaggctgggggagccccgcggcggcctgaaccctgcctcccgcgcccgccctgctcgtccgcgtctgcagtcagcgtccccaacctgtgcgtctctgtgtccgggccggcctgctgcagccacctggtgccttagtccttgggctgggggagggggcccacccttaaaggcggcgggaggggagggagggagagtggagggtttgacgggcctggagggtattaaagagacacagaagaagctgcctgtccga

SEQ ID NO: 6553 - DNA, 1050 bp, Homo sapiens
gtacttcctggactctacctcggaaacttcattggacatcccgccagccagattggctcaagcatcctgtttctttcagatgccaaagacctggatcagctgggccgaaataagatcacacacatcatctctatccatgagtcaccccagcctctgctgcaggatatcacctaccttcgcatcccrgtcgctgatacccctgaggtacccatcaaaaagcacttcaaagaatgtatcaacttcatccactgctgccgccttaatggggggaactgccttgtgcactgcaccacgattgtgacagcgtatgtgatgactgtgacggggctaggctggcgggacgtgcttgaagccatcaaggccaccaggcccatcgccaaccccaacccaggctttaggcagcagcttgaagagtttggctgggccagttcccagaagcttcgccggcagctggaggagcgcttcggcgagagccccttccgcgacgaggaggagttgcgcgcgctgctgccgctgtgcaagcgctgccggcagggctccgcgacctcggcctcctccgccgggccgcactcagcagcctccgagggaaccstgcagcgcctggtgccgcgcacgccccgggaagcccaccggccgctgccgctgctggcgcgcgtcaagcagactttctcttgcctcccccggtgtctgtcccgcaagggcggcaagtgaggatgcagtccagccgtggctcccyacttccgactggctcccttcgggggctgtctgcgccttccacgccccccaggacgggcccagaggctgggggagccccgcggcggcctgaaccctgcctcccgcgcccgccctgctcgtccgcgtctgcagtcagcgtccccaacctgtgcgtctctgtgtccgggccggcctgctgcagccacctggtgccttagtccttgggctgggggagggggcccacccttaaaggcggcgggaggggagggagggagagtggagggtttgacgggcctggagggtattaaagagacacagaagaagctgcctgtccga

SEQ ID NO: 6554 - DNA, 1798 bp, Homo sapiens
atggacgagtgaatgagtgaacaggagggtgggagaatggatgggaaaggaggaaggctggttggtagggtgtctctgcacgggtggagaggatgtatcggaaggaattacccacttatcccgttccaagcagactctgaagagcagagagccctcggcgatcaaagtccagccccgtcacgtttctgctagaagccgaggcgggagaagttgggtgctttcccccggggcccgcagggacgtccaggcagagccggaagggggacgggagtttgtgggccggccggggggctctaggcgacatccccccatccgcccgcgcctgccggtgccagggtggggtaaggcccccgcccccacctccggaggtggcggccccacgcggccccaacaaactgccgttgtcccgcgggccgtgggcccggcacactggggctttgtccggccccccgccgcgacccgaggcgggggccccacatgaccgaaggggtaggaggagcctgcggcggcggcggtggcagcggcggctccaccaccatttccctcccgggccgggggtcggcgggcggtggcggtggctgggcagggctgggcagggccgcggacgccaggccccccgttccccgccaggctgcaggcgtcgggcctgggccgtcagggcagctgtgaccggatcgcttcccgggcggcgagctgggggtgcacccggaccgccgcccccgggatcatgggcaatggcatgaccaaggtacttcctggactctacctcggaaacttcattggacatcccgccagccagattggctcaagcatcctgtttctttcagatgccaaagacctggatcagctgggccgaaataagatcacacacatcatctctatccatgagtcaccccagcctctgctgcaggatatcacctaccttcgcatcccrgtcgctgatacccctgaggtacccatcaaaaagcacttcaaagaatgtatcaacttcatccactgctgccgccttaatggggggaactgccttgtgcactgcaccacgattgtgacagcgtatgtgatgactgtgacggggctaggctggcgggacgtgcttgaagccatcaaggccaccaggcccatcgccaaccccaacccaggctttaggcagcagcttgaagagtttggctgggccagttcccagaagcttcgccggcagctggaggagcgcttcggcgagagccccttccgcgacgaggaggagttgcgcgcgctgctgccgctgtgcaagcgctgccggcagggctccgcgacctcggcctcctccgccgggccgcactcagcagcctccgagggaaccstgcagcgcctggtgccgcgcacgccccgggaagcccaccggccgctgccgctgctggcgcgcgtcaagcagactttctcttgcctcccccggtgtctgtcccgcaagggcggcaagtgaggatgcagtccagccgtggctcccyacttccgactggctcccttcgggggctgtctgcgccttccacgccccccaggacgggcccagaggctgggggagccccgcggcggcctgaaccctgcctcccgcgcccgccctgctcgtccgcgtctgcagtcagcgtccccaacctgtgcgtctctgtgtccgggccggcctgctgcagccacctggtgccttagtccttgggctgggggagggggcccacccttaaaggcggcgggaggggagggagggagagtggagggtttgacgggcctggagggtattaaagagacacagaagaagctgcctgtccga

SEQ ID NO: 6555 - DNA, 3442 bp, Homo sapiens
ttatcacttgggagattccaaagattttatgccaggagatggtaggaagaccaaataaatatttcacaatatcacatccctaatgtaggtcctattatcaccattctcattttgcaggtgaggagactgaagcatgagattaagaaatcaagaccgccttccccctgtagggscggccggcgagtcccagtgagagcggagggtgccagaggtagggggccgagaaacaaagttccyggggctccctccggggccgcggtcggggctgcgcgtttgaccgcccccctcctcgcgaaggcaatggcttccaaactcctgcgcgcggtcatcctcgggccgcccggctcgggcaagggcaccgtgtgccagaggatcgcccagaactttggtctccagcatctctccagcggccacttcttgcgggagaacatcaaggccagcaccgaagttggtgagrtggcaaagcagtatatagagaaaagtcttttggttccagaccatgtgatcacacgcctaatgatgtcygagttggagaataggcgtggmcagcactggctccttgatggttttcctaggacattaggacaagccgargccctggacaaaatctatcgtctcagccgccgttggattcaccctcctagcggaagggtatataacctggacttcaatccacctcatgtacatggtattgatgaygtcactggtgaaccrttagtccagcaggaggatgataaacccgaagcagttgctgccaggctaagacagtacaaagacgcggcaaagccagtcattgaattatacaagagccraggagtgctccaccaattttccggaacrgagacgaacaaaatctggccctacgtttacacacttttctcaaacaagatcacacctattcagtccaaagaagcatattgaccctgcccaawggaagaaccaggaagatgtggtcattcattcaatagtgtgtgtagtattggtgctgtgtccaaattagaagctagctgaggtagcttgcagcatcttttctagttgaaatggtgaactgataggaaaacaaatgagtagaaagagttcatgaagaggccctcctctgcctttcaaaagggtggtcacctacacatgtttaaggtgtctctgcacatgtctcaagcccatcacaagaaagcaagtacagtgtggatttcaaatggtgtgtaacttcagctccagctggtttttgacagctgttgctgtggtaatattttttacatgtgatggtgatagtctctggttctccccatccccacaaaggctgttgaaccacagcaccaggaagcctgagaatgaatcctgagggctctagcccaggctttgtcccaggctttctggtgtgtgccctcctggtaacagtgaaattgaagctacttactcatagtggttgtttctctggtcttgagtgactgtgtccacagttcatttttttccggtaggaataactccttttctacatccacactccatagagtctctccttttcagayatcctgggatgaaagaatttggcttttttttttttttttttttgacatctgttttcactcttaggcttttaaacaatagttattgctcttatccctctcagattctaataactgagagtgatggggctatattgaatctctgtatgcactgagaactgagctatgaagaggatcttattaaactgctggtctgactttatggattgacactgttcmtttcttttattgtgaaaaaaaaaaaaaaccctgaaagtcttgggaaccccctaaagtcttttgggaatcctcaaaaagcatgggaagttaagtatttagctacataaatgttgtaagatcatatcttatgtatagaagtaataagaccatttggaattactggactaattgaatagttaaggtttctattcgggacaataaaatgtattttgaaagtgctgctaactattgatgctgacagtgtttcactcctatgagtgacccaaacatattataaatatgtggtaaagggaatggagcctgtggggttgagcagaatgttgtactagctgtgcctggactgagtataacagctttatgattatgagaaaacaaattctttatttttttttctgttccaaagattcatcctatggggtggccataaagtctagaattagatactaatattttgtcattcattataacatatcaataaaccatttgttaaaagatttgcctggtttccagacttggtggccaccttgaataattcttgctgtcttctgggaaggatgatgaaatttattcctgctgccttaaaaatatgtatcccttcttcacccatcatgactgtccccagtgagtgtcctttactattcttgggagtgactcctgtctaacttttcatactggcgagaagaaaagargcctattttaacactttagtggtgttgaaacacattacttactttctgaagatgtcccagtgaatcctctgtcaattcactgccatatgtaatctatatgataaggaatgcatcttccaagtactgcccaaacycttgccagctcctctcccattgtcccttcatgtgaatatttcttggctaccttagtggaaatatagatcagtcttctccccatccatcctctcaaacataatgagattgtttactttttagatttatgcagtgaaaatgcccagtcaggtctgaatcgtcartgcattatattgacyctgagcactttagaatttagagttgcaattgaatgccagctgtggagatggggtgcatatcagatatataaataaagctcaggtttgctagggaaccaggtatagagaaaaataagtctgatatgaggaaaattgcacaatttagagtagttatgccrtagagaaaatttccacaaactaggaaatgtagagagttattctatagaatactcaaaagaggaaagtatgtgatttttggaaacaggaaaatcttcaaacttctttcttcacttccctttgtgtttagctgaccctccaatgtgatcattgcctttggagtttgggagaggtaygggaagtggcctgatgcctgcttccatacttcactcctccatccatccttccctccctyttcccctccagctaaatggacaattctagccaacattgagtcactcaataagtctcaacagtgggtgtgtttgctgagattgtccagcagttgagcagtttggtctcacctccctcgctagttgagaccaaaaagagacaaataactttttcatggtctttgaaacataatgcttatttcgtggtcaatggctttaaaaaaatctgtttcttgttttcttcaacaaactcactagttttcccttaaatgatattgtaaaaattaaagtaatcttgaaaatgttttgacaaaagtaaaattaaagggaca

SEQ ID NO: 6556 - DNA, 3489 bp, Homo sapiens
ttatcacttgggagattccaaagattttatgccaggagatggtaggaagaccaaataaatatttcacaatatcacatccctaatgtaggtcctattatcaccattctcattttgcaggtgaggagactgaagcatgagattaagaaatcaagaccgccttccccctgtagggscggccggcgagtcccagtgagagcggagggtgccagaggtagggggccgagaaacaaagttccyggggctccctccggggccgcggtcggggctgcgcgtttgaccgcccccctcctcgcgaaggcaatggcttccaaactcctgcgcgcggtcatcctcgggccgcccggctcgggcaagggcaccgtgtgccagaggatcgcccagaactttggtctccagcatctctccagcggccacttcttgcgggagaacatcaaggccagcaccgaagttggtgagrtggcaaagcagtatatagagaaaagtcttttggttccagaccatgtgatcacacgcctaatgatgtcygagttggagaataggcgtggmcagcactggctccttgatggttttcctaggacattaggacaagccgargccctggacaaaatctgtgaagtggatctagtgatcagtttgaatattccatttgaaacacttaaagatcgtctcagccgccgttggattcaccctcctagcggaagggtatataacctggacttcaatccacctcatgtacatggtattgatgaygtcactggtgaaccrttagtccagcaggaggatgataaacccgaagcagttgctgccaggctaagacagtacaaagacgcggcaaagccagtcattgaattatacaagagccraggagtgctccaccaattttccggaacrgagacgaacaaaatctggccctacgtttacacacttttctcaaacaagatcacacctattcagtccaaagaagcatattgaccctgcccaawggaagaaccaggaagatgtggtcattcattcaatagtgtgtgtagtattggtgctgtgtccaaattagaagctagctgaggtagcttgcagcatcttttctagttgaaatggtgaactgataggaaaacaaatgagtagaaagagttcatgaagaggccctcctctgcctttcaaaagggtggtcacctacacatgtttaaggtgtctctgcacatgtctcaagcccatcacaagaaagcaagtacagtgtggatttcaaatggtgtgtaacttcagctccagctggtttttgacagctgttgctgtggtaatattttttacatgtgatggtgatagtctctggttctccccatccccacaaaggctgttgaaccacagcaccaggaagcctgagaatgaatcctgagggctctagcccaggctttgtcccaggctttctggtgtgtgccctcctggtaacagtgaaattgaagctacttactcatagtggttgtttctctggtcttgagtgactgtgtccacagttcatttttttccggtaggaataactccttttctacatccacactccatagagtctctccttttcagayatcctgggatgaaagaatttggcttttttttttttttttttttgacatctgttttcactcttaggcttttaaacaatagttattgctcttatccctctcagattctaataactgagagtgatggggctatattgaatctctgtatgcactgagaactgagctatgaagaggatcttattaaactgctggtctgactttatggattgacactgttcmtttcttttattgtgaaaaaaaaaaaaaaccctgaaagtcttgggaaccccctaaagtcttttgggaatcctcaaaaagcatgggaagttaagtatttagctacataaatgttgtaagatcatatcttatgtatagaagtaataagaccatttggaattactggactaattgaatagttaaggtttctattcgggacaataaaatgtattttgaaagtgctgctaactattgatgctgacagtgtttcactcctatgagtgacccaaacatattataaatatgtggtaaagggaatggagcctgtggggttgagcagaatgttgtactagctgtgcctggactgagtataacagctttatgattatgagaaaacaaattctttatttttttttctgttccaaagattcatcctatggggtggccataaagtctagaattagatactaatattttgtcattcattataacatatcaataaaccatttgttaaaagatttgcctggtttccagacttggtggccaccttgaataattcttgctgtcttctgggaaggatgatgaaatttattcctgctgccttaaaaatatgtatcccttcttcacccatcatgactgtccccagtgagtgtcctttactattcttgggagtgactcctgtctaacttttcatactggcgagaagaaaagargcctattttaacactttagtggtgttgaaacacattacttactttctgaagatgtcccagtgaatcctctgtcaattcactgccatatgtaatctatatgataaggaatgcatcttccaagtactgcccaaacycttgccagctcctctcccattgtcccttcatgtgaatatttcttggctaccttagtggaaatatagatcagtcttctccccatccatcctctcaaacataatgagattgtttactttttagatttatgcagtgaaaatgcccagtcaggtctgaatcgtcartgcattatattgacyctgagcactttagaatttagagttgcaattgaatgccagctgtggagatggggtgcatatcagatatataaataaagctcaggtttgctagggaaccaggtatagagaaaaataagtctgatatgaggaaaattgcacaatttagagtagttatgccrtagagaaaatttccacaaactaggaaatgtagagagttattctatagaatactcaaaagaggaaagtatgtgatttttggaaacaggaaaatcttcaaacttctttcttcacttccctttgtgtttagctgaccctccaatgtgatcattgcctttggagtttgggagaggtaygggaagtggcctgatgcctgcttccatacttcactcctccatccatccttccctccctyttcccctccagctaaatggacaattctagccaacattgagtcactcaataagtctcaacagtgggtgtgtttgctgagattgtccagcagttgagcagtttggtctcacctccctcgctagttgagaccaaaaagagacaaataactttttcatggtctttgaaacataatgcttatttcgtggtcaatggctttaaaaaaatctgtttcttgttttcttcaacaaactcactagttttcccttaaatgatattgtaaaaattaaagtaatcttgaaaatgttttgacaaaagtaaaattaaagg

SEQ ID NO: 6557 - DNA, 2686 bp, Homo sapiens
gtcgcgggatacttgaactgcaagaacagccgccgctccrgcgggctgctcgctgcatctctgggcgtctttggctcgccacgctgggcagtgcctgcytgcgcctttcgcaacctcctcggccctgcgtggtctygagctgggtgagcgagcgggcgggctggtaggcyggcctgggctgcgaccggcggctacgactattctttggccgggtcggtgcgagtggtcggctgggcagagtgcacgctgcttggcgccgcaggctgatcccgccgtccactcccgggagcagtgatgttgggcaactctgcgccggggcctgcgacccgcgaggcgggctcggcgctgctagcattgcagcagacggcgctccaagaggaccaggagaatatcaacccggaaaaggcagcgcccgtccaacaaccgcggacccgggccgcgctggcggtactgaagtccgggaacccgcggggtctagcgcagcagcagaggccgaagacgagacgggttgcaccccttaaggatcttcctgtaaatgatgagcatgtcaccgttcctccttggaaagcaaacagtaaacagcctgcgttcaccattcatgtggatgaagcagaaaaagaagctcagragaagccagctgaatctcaaaaaatagagcgtgaagatgccctggcttttaattcagccattagtttacctggacccagaaaaccattggtccctcttgattatccaatggatggtagttttgagtcaccacatactatggacatgtcaattrtattagaagatgaaaagccagtgagtgttaatgaagtaccagactaccatgaggatattcacacataccttagggaaatggaggttaaatgtaaacctaaagtgggttacatgaagaaacagccagacatcactaacagtatgagagctatcctcgtggactggttagttgaagtaggagaagaatataaactacaraatgagaccctgcatttggctgtgaactacattgataggttcctgtcttccatgtcagtgctgagaggaaaacttcagcttgtgggcactgctgctatgctgttagcctcaaagtttgaagaaatataccccccagaagtagcagagtttgtgtacattacagatgatacctacaccaagaaacaagttctgagaatggagcatctagttttgaaagtccttacttttgacttagctgctccaacagtaaatcagtttcttacccaatactttctgcatcagcagcctgcaaactgcaaagttgaaagtttagcaatgtttttgggagaattaagtttgatagatgctgacccatacctcaagtatttgccatcagttattgctggagctgcctttcatttagcactctacacagtcacgggacaaagctggcctgaatcattaatacgaaagactggatataccctggaaagtcttaagccttgtctcatggaccttcaccagacctacctcaaagcaccacagcatgcacaacagtcaataagagaaaagtacaaaaattcaaagtatcatggtgtttctctcctcaacccaccagagacactaaatctgtaacaatgaaagactgcctttgttttctragatgtaaatcactcaaagtatatggtgtacagtttttaacttaggttttaattttacaatcatttctgaatacagaagttgtggccaagtacaaattatggtatctattactttttaaatggttttaatttgtatatcttttgtatytgtatctgtcttagatatttggctaattttaagtggttttgttaaagtattaatgatgccagctgtcaggataataaattgatttggaaaactttgcaagtcaaatttaacttcttcaggattttgcttagtaaagaagtttacttggtttactatataatgggaagtgaaaagccttcctctaaaattaaagtaggtttaggaaaacagaccctcaaattctgacattcattttcctaagcaactggatcaatttgctgacttgggcataatctaatctaagcatatctgaatacagtattcagagatagatacagtagagattccccagactttttcgctctttgtaaaacctgtttgtttaggttttgcgaggtaaactcaacagaggttgggagtggaagagggtgggaagcttatatgcaaattaacagacgagaaatgctccagaaggtttattattttaaagcacattaaaaacaaaaaactatttttaaaatcctgctagattttataatggatttgtgaataaaaaatacccagggttctcagaatggaataaatatcccttttaatagttatatatacagatatacaactgttagctttaattggcagctctcttcttttttcttcttttcactggctttttasttggtgctttttcttgttttgcactggtggtctgtgttctgtgaataaagcaaagtaagaatttactaagagtatgttaagttttggattaytgaaataagaggcatttcttagttttccagtaggatctaaaatgtgtcagctatgagtaagactggcatccaagaagtttatattatagatttaggtcctaatttttataaatcacaaggtaaaaaaatcacagaacagatggatctctaatgaaaaagggatgtctttttgt

SEQ ID NO: 6558 - DNA, 1540 bp, Homo sapiens
tgatgacgtaattttcctgcgcctcggggcgagcagcggcgcgcaaggaaagatcgggttccrtttttcccgcggattctggtgcctgtggggccggtgacccaacaccatgaaggaaacgccactctcaaactgcgaacgccgcttcctactccgtgccatcgaagagaagaagcggctggatggcagacaaacctatgattataggaacatcaggatctcatttggaacagattacggatgctgcattgtggaacttggaaaaacaagagttcttggacaggtttcctgtgaacttgtgtctccaaaactcaatcgggcaacagaaggtattcttttttttaaccttgaactctctcagatggccgctccagctttcgaacctggcaggcagtcagatctcttggtgaagttgaatcgactcatggaaagatgtctaagaaattcgaagtgtatagacactgagtctctctgtgttgttgctggtgaaaaggtttggcaaatacgtgtagacctacatttattaaatcatgatggaaatattattgatgctgccagcattgctgcaatcgtggccttatgtcatttccgaagacctgatgtctctgtccaaggagatgaagtaacactgtatacacctgaagagcgtgatcctgtaccattaagtatccaccacatgcccatttgtgtcagttttgcctttttccagcaaggaacatatttattggtggatcccaatgaacgagaagaacgtgtgatggatggcttgctggtgattgccatgaacaaacatcgagagatttgtactatccagtccagtggtgggataatgctactaaaagatcaagttctgagatgcagtaaaatcgctggtgtgaaagtagcagaaattacagagctaatattgaaagctttggagaatgaccaaaaagtaaggaaagaaggtggaaagtttggttttgcagagtctrtagcaaatcaaaggatcacagcatttaaaatggaaaaggcccctattgatacctcggatgtagaagaaaaagcagaagaaatcattgctgaagcagaacctccttcagaagttgtttctacacctgtgctatggactcctggaactgcccaaattggagagggagtagaaaactcctggggtgatcttgaagactctgagaaggaagatgatgaaggcggtggtgatcaagctrtcattcttgatggtataaaaatggacactggagtagaagtctctgatattggaagccaagagctggggtttcaccatgttggccagactggactcgagttcctgacctcagatgctcccataatactctcagatagtgaagaagaagaaatgatcattttggaaccagacaagaatccaaagaaaataagaacacagaccaccagtgcaaaacaagaaaaagcaccaastaaaaagccagtgaaaagaagaaaaaagaagagagctgccaattaaagctaacagttgtatatctgtatatataactattaaaagggatatttattccattctgag

SEQ ID NO: 6559 - DNA, 1596 bp, Homo sapiens
tgatgacgtaattttcctgcgcctcggggcgagcagcggcgcgcaaggaaagatcgggttccrtttttcccgcggattctggtgcctgtggggccggtgacccaacaccatgaaggaaacgccactctcaaactgcgaacgccgcttcctactccgtgccatcgaagagaagaagcggctggatggcagacaaacctatgattataggaacatcaggatctcatttggaacagattacggatgctgcattgtggaacttggaaaaacaagagttcttggacaggtttcctgtgaacttgtgtctccaaaactcaatcgggcaacagaaggtattcttttttttaaccttgaactctctcagatggccgctccagctttcgaacctggcaggcagtcagatctcttggtgaagttgaatcgactcatggaaagatgtctaagaaattcgaagtgtatagacactgagtctctctgtgttgttgctggtgaaaaggtttggcaaatacgtgtagacctacatttattaaatcatgatggaaatattattgatgctgccagcattgctgcaatcgtggccttatgtcatttccgaagacctgatgtctctgtccaaggagatgaagtaacactgtatacacctgaagagcgtgatcctgtaccattaagtatccaccacatgcccatttgtgtcagttttgcctttttccagcaaggaacatatttattggtggatcccaatgaacgagaagaacgtgtgatggatggcttgctggtgattgccatgaacaaacatcgagagatttgtactatccagtccagtggtgggataatgctactaaaagatcaagttctgagatgcagtaaaatcgctggtgtgaaagtagcagaaattacagagctaatattgaaagctttggagaatgaccaaaaagtaaggaaagaaggtggaaagtttggttttgcagagtctrtagcaaatcaaaggatcacagcatttaaaatggaaaaggcccctattgatacctcggatgtagaagaaaaagcagaagaaatcattgctgaagcagaacctccttcagaagttgtttctacacctgtgctatggactcctggaactgcccaaattggagagggagtagaaaactcctggggtgatcttgaagactctgagaaggaagatgatgaaggcggtggtgatcaagctrtcattcttgatggtataaaaatggacactggagtagaagtctctgatattggaagccaagatgctcccataatactctcagatagtgaagaagaagaaatgatcattttggaaccagacaagaatccaaagaaaataagaacacagaccaccagtgcaaaacaagaaaaagcaccaastaaaaagccagtgaaaagaagaaaaaagaagagagctgccaattaaagctaacagttgtatatctgtatatataactattaaaagggatatttattccattctgagaaccctgggtattttttattcacaaatccattataaaatctagcaggattttaaaaatagttttttgtttttaatgtgctttaaaataataaaccttctggagcatt

SEQ ID NO: 6560 - DNA, 1458 bp, Homo sapiens
tgatgacgtaattttcctgcgcctcggggcgagcagcggcgcgcaaggaaagatcgggttccrtttttcccgcggattctggtgcctgtggggccggtgacccaacaccatgaaggaaacgccactctcaaactgcgaacgccgcttcctactccgtgccatcgaagagaagaagcggctggatggcagacaaacctatgattataggaacatcaggatctcatttggaacagattacggatgctgcattgtggaacttggaaaaacaagagttcttggacaggtttcctgtgaacttgtgtctccaaaactcaatcgggcaacagaaggtattcttttttttaaccttgaactctctcagatggccgctccagctttcgaacctggcaggcagtcagatctcttggtgaagttgaatcgactcatggaaagatgtctaagaaattcgaagtgtatagacactgagtctctctgtgttgttgctggtgaaaagtatacacctgaagagcgtgatcctgtaccattaagtatccaccacatgcccatttgtgtcagttttgcctttttccagcaaggaacatatttattggtggatcccaatgaacgagaagaacgtgtgatggatggcttgctggtgattgccatgaacaaacatcgagagatttgtactatccagtccagtggtgggataatgctactaaaagatcaagttctgagatgcagtaaaatcgctggtgtgaaagtagcagaaattacagagctaatattgaaagctttggagaatgaccaaaaagtaaggaaagaaggtggaaagtttggttttgcagagtctrtagcaaatcaaaggatcacagcatttaaaatggaaaaggcccctattgatacctcggatgtagaagaaaaagcagaagaaatcattgctgaagcagaacctccttcagaagttgtttctacacctgtgctatggactcctggaactgcccaaattggagagggagtagaaaactcctggggtgatcttgaagactctgagaaggaagatgatgaaggcggtggtgatcaagctrtcattcttgatggtataaaaatggacactggagtagaagtctctgatattggaagccaagatgctcccataatactctcagatagtgaagaagaagaaatgatcattttggaaccagacaagaatccaaagaaaataagaacacagaccaccagtgcaaaacaagaaaaagcaccaastaaaaagccagtgaaaagaagaaaaaagaagagagctgccaattaaagctaacagttgtatatctgtatatataactattaaaagggatatttattccattctgagaaccctgggtattttttattcacaaatccattataaaatctagcaggattttaaaaatagttttttgtttttaatgtgctttaaaataataaaccttctggagcatt

SEQ ID NO: 6561 - DNA, 1517 bp, Homo sapiens
cgaccggcacgttcaccccatccctcaggctttatttattttttttcgacaggttcttttcaaggctccagtcaccgcagcagttgtccatgctgtagtttccactttcctgtatgggcgggctggttaggattccactttcccccaagtgcttagcccagggccagacaaaaagtagttgcttaagaaatacttgttgaaggaataaattaatgaatgaatttgtgcttacagcggctggatggcagacaaacctatgattataggaacatcaggatctcatttggaacagattacggatgctgcattgtggaacttggaaaaacaagagttcttggacaggtttcctgtgaacttgtgtctccaaaactcaatcgggcaacagaaggtattcttttttttaaccttgaactctctcagatggccgctccagctttcgaacctggcaggcagtcagatctcttggtgaagttgaatcgactcatggaaagatgtctaagaaattcgaagtgtatagacactgagtctctctgtgttgttgctggtgaaaagtatacacctgaagagcgtgatcctgtaccattaagtatccaccacatgcccatttgtgtcagttttgcctttttccagcaaggaacatatttattggtggatcccaatgaacgagaagaacgtgtgatggatggcttgctggtgattgccatgaacaaacatcgagagatttgtactatccagtccagtggtgggataatgctactaaaagatcaagttctgagatgcagtaaaatcgctggtgtgaaagtagcagaaattacagagctaatattgaaagctttggagaatgaccaaaaagtaaggaaagaaggtggaaagtttggttttgcagagtctrtagcaaatcaaaggatcacagcatttaaaatggaaaaggcccctattgatacctcggatgtagaagaaaaagcagaagaaatcattgctgaagcagaacctccttcagaagttgtttctacacctgtgctatggactcctggaactgcccaaattggagagggagtagaaaactcctggggtgatcttgaagactctgagaaggaagatgatgaaggcggtggtgatcaagctrtcattcttgatggtataaaaatggacactggagtagaagtctctgatattggaagccaagatgctcccataatactctcagatagtgaagaagaagaaatgatcattttggaaccagacaagaatccaaagaaaataagaacacagaccaccagtgcaaaacaagaaaaagcaccaastaaaaagccagtgaaaagaagaaaaaagaagagagctgccaattaaagctaacagttgtatatctgtatatataactattaaaagggatatttattccattctgagaaccctgggtattttttattcacaaatccattataaaatctagcaggattttaaaaatagttttttgtttttaatgtgctttaaaataataaaccttctggagcatt

SEQ ID NO: 6562 - DNA, 1655 bp, Homo sapiens
cgaccggcacgttcaccccatccctcaggctttatttattttttttcgacaggttcttttcaaggctccagtcaccgcagcagttgtccatgctgtagtttccactttcctgtatgggcgggctggttaggattccactttcccccaagtgcttagcccagggccagacaaaaagtagttgcttaagaaatacttgttgaaggaataaattaatgaatgaatttgtgcttacagcggctggatggcagacaaacctatgattataggaacatcaggatctcatttggaacagattacggatgctgcattgtggaacttggaaaaacaagagttcttggacaggtttcctgtgaacttgtgtctccaaaactcaatcgggcaacagaaggtattcttttttttaaccttgaactctctcagatggccgctccagctttcgaacctggcaggcagtcagatctcttggtgaagttgaatcgactcatggaaagatgtctaagaaattcgaagtgtatagacactgagtctctctgtgttgttgctggtgaaaaggtttggcaaatacgtgtagacctacatttattaaatcatgatggaaatattattgatgctgccagcattgctgcaatcgtggccttatgtcatttccgaagacctgatgtctctgtccaaggagatgaagtaacactgtatacacctgaagagcgtgatcctgtaccattaagtatccaccacatgcccatttgtgtcagttttgcctttttccagcaaggaacatatttattggtggatcccaatgaacgagaagaacgtgtgatggatggcttgctggtgattgccatgaacaaacatcgagagatttgtactatccagtccagtggtgggataatgctactaaaagatcaagttctgagatgcagtaaaatcgctggtgtgaaagtagcagaaattacagagctaatattgaaagctttggagaatgaccaaaaagtaaggaaagaaggtggaaagtttggttttgcagagtctrtagcaaatcaaaggatcacagcatttaaaatggaaaaggcccctattgatacctcggatgtagaagaaaaagcagaagaaatcattgctgaagcagaacctccttcagaagttgtttctacacctgtgctatggactcctggaactgcccaaattggagagggagtagaaaactcctggggtgatcttgaagactctgagaaggaagatgatgaaggcggtggtgatcaagctrtcattcttgatggtataaaaatggacactggagtagaagtctctgatattggaagccaagatgctcccataatactctcagatagtgaagaagaagaaatgatcattttggaaccagacaagaatccaaagaaaataagaacacagaccaccagtgcaaaacaagaaaaagcaccaastaaaaagccagtgaaaagaagaaaaaagaagagagctgccaattaaagctaacagttgtatatctgtatatataactattaaaagggatatttattccattctgagaaccctgggtattttttattcacaaatccattataaaatctagcaggattttaaaaatagttttttgtttttaatgtgctttaaaataataaaccttctggagcatt

SEQ ID NO: 6563 - DNA, 2307 bp, Homo sapiens
gcggctggctgcgcgcgcggaggcagcggcgggggcgaccggagctggggcagagtggggagcgagggagggggaggagagagagggaggcggagggcagtgagagacgcatttccagttctcaactacgagccacgagtttgcagatggggctgctcggcggcgcctgtggctgagggagagcagcggcggcggggagcgaccgggagcggcggcagcggcggcgcggaggcggctgaggtgcgagccgcaatgcagcaagtcttggaaaaccttacggagctgccctcgtctactggagcagaagaaatagacctaattttcctcaagggaattatggagaatcctattgtaaaatcacttgctaaggctcatgagaggctagaagattccaaactagaagctgtcagtgacaataacttggaattagtcaatgaaattcttgaagacatcactcctctaataaatgtggatgaaaatgtggcagaattggttggtatactcaaagaacctcacttccagtcactgttggaggcccatgatattgtggcatcaaagtgttatgattcacctccatcaagcccagaaatgaataattcttctatcaataatcagttattaccagtagatgccattcgtattcttggtattcacaaaagagctggggaaccactgggtgtgacatttagggttgaaaataatgatctggtaattgcccgaatcctccatgggggaatgatagatcgacaaggtctacttcatgtgggagatataattaaagaagtcaatggccatgaggttggaaataatccaaaggaattacaagaattactgaaaaatattagtggragtgtcaccctaaaaatcttaccaagttatagagataccattactcctcaacagagtttcatcaatatggagaggcatccagcacacatcccatcaggtgaagtgtcattttgattataatccatacaatgacaacctaataccttgcaaagaagcaggattgaagttttccaaaggagarattcttcagattgtaaatagagaagatccaaattggtggcaggctagccatgtaaaagagggaggaagcgctggtctcattccaagccagttcctggaagagaagagaaargcatttgttagaagagactgggacaattcaggacctttttgtggaactataagtagcaaaaaaaagaaaaagatgatgtatctcacaaccagaaatgcagaatttgatcgtcatgaaatccagatatatgaggaggtagccaaaatgcctcccttccagagaaaaacattagtattgataggagctcaaggtgtaggccgaagaagcttgaaaaacaggttcatagtattgaatcccactagatttggaactacggtgccatttacttcacggaaaccaagggaagatgaaaaagatggccaggcatataagtttgtgtcacgatctgagatggaagcagatattaaagctggaaagtatttggaacatggggaatatgaaggaaatctctatggaaccaaaattgattctattcttgaggttgtccaaactggacggacttgcattctggatgtcaacccacaagcactgaaagtattgaggacatcagagtttatgccctatgtggtatttattgcggctccggagctagagacgttacgtgccatgcacaaggctgtggtggatgcaggaatcactaccaagcttctgaccgactctgacttgaagaaaacagtggatgaaagtgcacggattcagagagcatacaaccactattttgatttgatcatcataaatgataatctagacaaagcctttgaaaaactgcaaactgccatagagaaactgagaatggaaccacagtgggtcccaatcagctgggtttactgatgattcagtaaggttaacaatgaaaattaaactyttaaaaagtgactgcaacaaataaaccttctactgagaaaatacatcacagatagaagattatctgctaagtccaggcatttttatggtgtagattgaaataatagtacacttctgaatttttatataaaatgtggttggaaggtgtactaatatataatttatcttaatttttctaactttgtatggataatctttctattcatatcacataaagaaatgcgttgaagcattttgtatatgttttgatttagtacccttgcctttttcatcaaaggaattttcaaatcattcactctaacattggtctcatattttcactgtgataatgaatattacttgaaatagttttgtaaagctgt

SEQ ID NO: 6564 - DNA, 2085 bp, Homo sapiens
ggagggggaggagagagagggaggcggagggcagtgagagacgcatttccagttctcaactacgagccacgagtttgcagatggggctgctcggcggcgcctgtggctgagggagagcagcggcggcggggagcgaccgggagcggcggcagcggcggcgcggaggcggctgaggtgcgagccggctcatgagaggctagaagattccaaactagaagctgtcagtgacaataacttggaattagtcaatgaaattcttgaagacatcactcctctaataaatgtggatgaaaatgtggcagaattggttggtatactcaaagaacctcacttccagtcactgttggaggcccatgatattgtggcatcaaagtgttatgattcacctccatcaagcccagaaatgaataattcttctatcaataatcagttattaccagtagatgccattcgtattcttggtattcacaaaagagctggggaaccactgggtgtgacatttagggttgaaaataatgatctggtaattgcccgaatcctccatgggggaatgatagatcgacaaggtctacttcatgtgggagatataattaaagaagtcaatggccatgaggttggaaataatccaaaggaattacaagaattactgaaaaatattagtggragtgtcaccctaaaaatcttaccaagttatagagataccattactcctcaacaggtatttgtgaagtgtcattttgattataatccatacaatgacaacctaataccttgcaaagaagcaggattgaagttttccaaaggagarattcttcagattgtaaatagagaagatccaaattggtggcaggctagccatgtaaaagagggaggaagcgctggtctcattccaagccagttcctggaagagaagagaaargcatttgttagaagagactgggacaattcaggacctttttgtggaactataagtagcaaaaaaaagaaaaagatgatgtatctcacaaccagaaatgcagaatttgatcgtcatgaaatccagatatatgaggaggtagccaaaatgcctcccttccagagaaaaacattagtattgataggagctcaaggtgtaggccgaagaagcttgaaaaacaggttcatagtattgaatcccactagatttggaactacggtgccatttacttcacggaaaccaagggaagatgaaaaagatggccaggcatataagtttgtgtcacgatctgagatggaagcagatattaaagctggaaagtatttggaacatggggaatatgaaggaaatctctatggaaccaaaattgattctattcttgaggttgtccaaactggacggacttgcattctggatgtcaacccacaagcactgaaagtattgaggacatcagagtttatgccctatgtggtatttattgcggctccggagctagagacgttacgtgccatgcacaaggctgtggtggatgcaggaatcactaccaagcttctgaccgactctgacttgaagaaaacagtggatgaaagtgcacggattcagagagcatacaaccactattttgatttgatcatcataaatgataatctagacaaagcctttgaaaaactgcaaactgccatagagaaactgagaatggaaccacagtgggtcccaatcagctgggtttactgatgattcagtaaggttaacaatgaaaattaaactyttaaaaagtgactgcaacaaataaaccttctactgagaaaatacatcacagatagaagattatctgctaagtccaggcatttttatggtgtagattgaaataatagtacacttctgaatttttatataaaatgtggttggaaggtgtactaatatataatttatcttaatttttctaactttgtatggataatctttctattcatatcacataaagaaatgcgttgaagcattttgtatatgttttgatttagtacccttgcctttttcatcaaaggaattttcaaatcattcactctaacattggtctcatattttcactgtgataatgaatattacttgaaatagttttgtaaagctgt

SEQ ID NO: 6565 - DNA, 2270 bp, Homo sapiens
gcggctggctgcgcgcgcggaggcagcggcgggggcgaccggagctggggcagagtggggagcgagggagggggaggagagagagggaggcggagggcagtgagagacgcatttccagttctcaactacgagccacgagtttgcagatggggctgctcggcggcgcctgtggctgagggagagcagcggcggcggggagcgaccgggagcggcggcagcggcggcgcggaggcggctgaggtgcgagccgcaatgcagcaagtcttggaaaaccttacggagctgccctcgtctactggagcagaagaaatagacctaattttcctcaagggaattatggagaatcctattgtaaaatcacttgctaaggctcatgagaggctagaagattccaaactagaagctgtcagtgacaataacttggaattagtcaatgaaattcttgaagacatcactcctctaataaatgtggatgaaaatgtggcagaattggttggtatactcaaagaacctcacttccagtcactgttggaggcccatgatattgtggcatcaaagtgttatgattcacctccatcaagcccagaaatgaataattcttctatcaataatcagttattaccagtagatgccattcgtattcttggtattcacaaaagagctggggaaccactgggtgtgacatttagggttgaaaataatgatctggtaattgcccgaatcctccatgggggaatgatagatcgacaaggtctacttcatgtgggagatataattaaagaagtcaatggccatgaggttggaaataatccaaaggaattacaagaattactgaaaaatattagtggragtgtcaccctaaaaatcttaccaagttatagagataccattactcctcaacaggtatttgtgaagtgtcattttgattataatccatacaatgacaacctaataccttgcaaagaagcaggattgaagttttccaaaggagarattcttcagattgtaaatagagaagatccaaattggtggcaggctagccatgtaaaagagggaggaagcgctggtctcattccaagccagttcctggaagagaagagaaargcatttgttagaagagactgggacaattcaggacctttttgtggaactataagtagcaaaaaaaagaaaaagatgatgtatctcacaaccagaaatgcagaatttgatcgtcatgaaatccagatatatgaggaggtagccaaaatgcctcccttccagagaaaaacattagtattgataggagctcaaggtgtaggccgaagaagcttgaaaaacaggttcatagtattgaatcccactagatttggaactacggtgccatttacttcacggaaaccaagggaagatgaaaaagatggccaggcatataagtttgtgtcacgatctgagatggaagcagatattaaagctggaaagtatttggaacatggggaatatgaaggaaatctctatggaaccaaaattgattctattcttgaggttgtccaaactggacggacttgcattctggatgtcaacccacaagcactgaaagtattgaggacatcagagtttatgccctatgtggtatttattgcggctccggagctagagacgttacgtgccatgcacaaggctgtggtggatgcaggaatcactaccaagcttctgaccgactctgacttgaagaaaacagtggatgaaagtgcacggattcagagagcatacaaccactattttgatttgatcatcataaatgataatctagacaaagcctttgaaaaactgcaaactgccatagagaaactgagaatggaaccacagtgggtcccaatcagctgggtttactgatgattcagtaaggttaacaatgaaaattaaactyttaaaaagtgactgcaacaaataaaccttctactgagaaaatacatcacagatagaagattatctgctaagtccaggcatttttatggtgtagattgaaataatagtacacttctgaatttttatataaaatgtggttggaaggtgtactaatatataatttatcttaatttttctaactttgtatggataatctttctattcatatcacataaagaaatgcgttgaagcattttgtatatgttttgatttagtacccttgcctttttcatcaaaggaattttcaaatcattcactctaacattggtctcatattttcactgtgataatgaatattacttgaaatagttttgtaaagctgt

SEQ ID NO: 6566 - DNA, 2368 bp, Homo sapiens
aacgcccgcctgcaaggtcctctgcgccctggcagccaggagtcgccgccacgacmgccgggtctcagtgggtgcctgcgccttctccccgcccgcctgccccgggccatccagaaacttgctctacccgccgcgggtgctcggcagtgctgcccatggcccagccyaggagcctatttagggcgccggacgggctggacagaggcgcggctcagtaattgaaggcctgaaacgcccatgtgccactgactaggaggcttccctgctgcggcacttcatgacccagcggcgcgcggcccagtgaagccaccgtggtgtccagcatggccgcgctgctcctgggcgcggtgctgctggtggcccagccccagctagtgccttcccgccccgccgagctaggccagcaggagcttctgcggaaagcggggaccctccaggatgacgtccgcgatggcgtggccccaaacggctctgcccagcagttgccgcagaccatcatcatcggcgtgcgcaagggcggcacgcgcgcactgctggagatgctcagcctgcaccccgacgtggcggccgcggagaacgaggtccacttcttcgactgggaggagcattacagccacggcttgggctggtacctcagccagatgcccttctcctggccacaccagctcacagtggagaagacccccgcgtatttcacgtcgcccaaagtgcctgagcgagtctacagcatgaacccgtccatccggctgctgctcatcctgcgagacccgtcggagcgcgtgctatctgactacacccaagtgttctacaaccacatgcagaagcacaagccctacccgtccatcgaggagttcctggtgcgcgayggcaggctcaatgtggactacaaggccctcaaccgcagcctctaccacgtgcacatgcagaactggctgcgcttyttcccgctgcgccacatccacattgtggacggcgaccgcctcatcagggaccccttccctgagatccaaaaggtcgagaggttcctaaagctgtcgccgcagatcaatgcttcgaacttctactttaacaaaaccaagggcttttactgcctgcgggacagcggccgggaccgctgcttacatgagtccaaaggccgggcgcacccccaagtcgatcccaaactactcaataaactgcacgaatattttcatgagccaaataagargttcttcgagcttgttggcagaacatttgactggcactgatttgcaataagctaagctcagaaactttcctactgtaagttctggtgtacatctgaggggaaaaagaattttaaaaaagcatttaaggtataatttatttgtaaaatccataaagtacttctgtacagtattagattcacaattgccatatatactagttatatttttctacttgttaaatggagggcattttgtattgtttttcatggttgttaacattgtgtaatatgtctctatatgaaggaactaaactatttcactgaaaaaaaaaaaaagattttttctggagacgctatgtttttttgaatataattaacttgcccccaactcaaaatagctgtctgtgttgcaatcattgcaaaatctaaattcttttgttacttaaaaaaacatgtttttcatggctattacaatcctctctctcccctctcctttctgcattgctctttttaatttttaatgtctcattgtgatcatcagatttatttttacttggattgtaagatttatctcctcggcgattccttgtcatttttggaggtcacagttttactcattcccatgtgtaaacttcaagtaaacaaagcaatattcaggatggagaagcagttagtgactggctagaggtctcttgggatccatcttgacctcaaagaatatttgcacatgcttctgatctcagcagttataataaagaggattaaacccttggccttcagaatgatcttggacctggatactttgccccaggtggcagctggcctccagaaagccaattagaatagaaaagagaaactgcgaaatctatgcgtgtcttcatcctgtcggttctgtgaaaggctgactaaaagggtagtagtcttttgcttagtctgaaagtctgcttacttcctgaaagacacattggcattatagacatatattccatatgcactgagacataaatatgtgtatgtttcaaaatcaactctaaatttggagtcctgaatgtgaaagaaaaagtaagttcccaagtgttgaagttaaaaagagaaaagggcagagttgaaggtagcacctaagagaaccactgtacctgcccccagaggagtggctggagttcagttttacttctgcccctg

SEQ ID NO: 6567 - DNA, 2159 bp, Homo sapiens
ccctagtaattgaaggcctgaaacgcccatgtgccactgactaggaggcttccctgctgcggcacttcatgacccagcggcgcgcggcccagtgaagccaccgtggtgtccagcatggccgcgctgctcctgggcgcggtgctgctggtggcccagccccagctagtgccttcccgccccgccgagctaggccagcaggagcttctgcggaaagcggggaccctccaggatgacgtccgcgatggcgtggccccaaacggctctgcccagcagttgccgcagaccatcatcatcggcgtgcgcaagggcggcacgcgcgcactgctggagatgctcagcctgcaccccgacgtggcggccgcggagaacgaggtccacttcttcgactgggaggagcattacagccacggcttgggctggtacctcagccagatgcccttctcctggccacaccagctcacagtggagaagacccccgcgtatttcacgtcgcccaaagtgcctgagcgagtctacagcatgaacccgtccatccggctgctgctcatcctgcgagacccgtcggagcgcgtgctatctgactacacccaagtgttctacaaccacatgcagaagcacaagccctacccgtccatcgaggagttcctggtgcgcgayggcaggctcaatgtggactacaaggccctcaaccgcagcctctaccacgtgcacatgcagaactggctgcgcttyttcccgctgcgccacatccacattgtggacggcgaccgcctcatcagggaccccttccctgagatccaaaaggtcgagaggttcctaaagctgtcgccgcagatcaatgcttcgaacttctactttaacaaaaccaagggcttttactgcctgcgggacagcggccgggaccgctgcttacatgagtccaaaggccgggcgcacccccaagtcgatcccaaactactcaataaactgcacgaatattttcatgagccaaataagargttcttcgagcttgttggcagaacatttgactggcactgatttgcaataagctaagctcagaaactttcctactgtaagttctggtgtacatctgaggggaaaaagaattttaaaaaagcatttaaggtataatttatttgtaaaatccataaagtacttctgtacagtattagattcacaattgccatatatactagttatatttttctacttgttaaatggagggcattttgtattgtttttcatggttgttaacattgtgtaatatgtctctatatgaaggaactaaactatttcactgaaaaaaaaaaaaagattttttctggagacgctatgtttttttgaatataattaacttgcccccaactcaaaatagctgtctgtgttgcaatcattgcaaaatctaaattcttttgttacttaaaaaaacatgtttttcatggctattacaatcctctctctcccctctcctttctgcattgctctttttaatttttaatgtctcattgtgatcatcagatttatttttacttggattgtaagatttatctcctcggcgattccttgtcatttttggaggtcacagttttactcattcccatgtgtaaacttcaagtaaacaaagcaatattcaggatggagaagcagttagtgactggctagaggtctcttgggatccatcttgacctcaaagaatatttgcacatgcttctgatctcagcagttataataaagaggattaaacccttggccttcagaatgatcttggacctggatactttgccccaggtggcagctggcctccagaaagccaattagaatagaaaagagaaactgcgaaatctatgcgtgtcttcatcctgtcggttctgtgaaaggctgactaaaagggtagtagtcttttgcttagtctgaaagtctgcttacttcctgaaagacacattggcattatagacatatattccatatgcactgagacataaatatgtgtatgtttcaaaatcaactctaaatttggagtcctgaatgtgaaagaaaaagtaagttcccaagtgttgaagttaaaaagagaaaagggcagagttgaaggtagcacctaagagaaccactgtacctgcccccagaggagtggctggagttcagttttacttctgcccctg

SEQ ID NO: 6568 - DNA, 2249 bp, Homo sapiens
gagggaaccaggaagcaaaggctggggattttcccatcctcctcacctcctgccctagcacctctgctctggaagtcccgagggaccggttgatcttaattgaaggcctgaaacgcccatgtgccactgactaggaggcttccctgctgcggcacttcatgacccagcggcgcgcggcccagtgaagccaccgtggtgtccagcatggccgcgctgctcctgggcgcggtgctgctggtggcccagccccagctagtgccttcccgccccgccgagctaggccagcaggagcttctgcggaaagcggggaccctccaggatgacgtccgcgatggcgtggccccaaacggctctgcccagcagttgccgcagaccatcatcatcggcgtgcgcaagggcggcacgcgcgcactgctggagatgctcagcctgcaccccgacgtggcggccgcggagaacgaggtccacttcttcgactgggaggagcattacagccacggcttgggctggtacctcagccagatgcccttctcctggccacaccagctcacagtggagaagacccccgcgtatttcacgtcgcccaaagtgcctgagcgagtctacagcatgaacccgtccatccggctgctgctcatcctgcgagacccgtcggagcgcgtgctatctgactacacccaagtgttctacaaccacatgcagaagcacaagccctacccgtccatcgaggagttcctggtgcgcgayggcaggctcaatgtggactacaaggccctcaaccgcagcctctaccacgtgcacatgcagaactggctgcgcttyttcccgctgcgccacatccacattgtggacggcgaccgcctcatcagggaccccttccctgagatccaaaaggtcgagaggttcctaaagctgtcgccgcagatcaatgcttcgaacttctactttaacaaaaccaagggcttttactgcctgcgggacagcggccgggaccgctgcttacatgagtccaaaggccgggcgcacccccaagtcgatcccaaactactcaataaactgcacgaatattttcatgagccaaataagargttcttcgagcttgttggcagaacatttgactggcactgatttgcaataagctaagctcagaaactttcctactgtaagttctggtgtacatctgaggggaaaaagaattttaaaaaagcatttaaggtataatttatttgtaaaatccataaagtacttctgtacagtattagattcacaattgccatatatactagttatatttttctacttgttaaatggagggcattttgtattgtttttcatggttgttaacattgtgtaatatgtctctatatgaaggaactaaactatttcactgaaaaaaaaaaaaagattttttctggagacgctatgtttttttgaatataattaacttgcccccaactcaaaatagctgtctgtgttgcaatcattgcaaaatctaaattcttttgttacttaaaaaaacatgtttttcatggctattacaatcctctctctcccctctcctttctgcattgctctttttaatttttaatgtctcattgtgatcatcagatttatttttacttggattgtaagatttatctcctcggcgattccttgtcatttttggaggtcacagttttactcattcccatgtgtaaacttcaagtaaacaaagcaatattcaggatggagaagcagttagtgactggctagaggtctcttgggatccatcttgacctcaaagaatatttgcacatgcttctgatctcagcagttataataaagaggattaaacccttggccttcagaatgatcttggacctggatactttgccccaggtggcagctggcctccagaaagccaattagaatagaaaagagaaactgcgaaatctatgcgtgtcttcatcctgtcggttctgtgaaaggctgactaaaagggtagtagtcttttgcttagtctgaaagtctgcttacttcctgaaagacacattggcattatagacatatattccatatgcactgagacataaatatgtgtatgtttcaaaatcaactctaaatttggagtcctgaatgtgaaagaaaaagtaagttcccaagtgttgaagttaaaaagagaaaagggcagagttgaaggtagcacctaagagaaccactgtacctgcccccagaggagtggctggagttcagttttacttctgcccctg

SEQ ID NO: 6569 - DNA, 2257 bp, Homo sapiens
ttctggcccaggccgccgctccggtcccagtccggctgcagagcgaattggagaggatggcacctcctgcttcccggggggcggaaggagcgccagcgcctaagtaattgaaggcctgaaacgcccatgtgccactgactaggaggcttccctgctgcggcacttcatgacccagcggcgcgcggcccagtgaagccaccgtggtgtccagcatggccgcgctgctcctgggcgcggtgctgctggtggcccagccccagctagtgccttcccgccccgccgagctaggccagcaggagcttctgcggaaagcggggaccctccaggatgacgtccgcgatggcgtggccccaaacggctctgcccagcagttgccgcagaccatcatcatcggcgtgcgcaagggcggcacgcgcgcactgctggagatgctcagcctgcaccccgacgtggcggccgcggagaacgaggtccacttcttcgactgggaggagcattacagccacggcttgggctggtacctcagccagatgcccttctcctggccacaccagctcacagtggagaagacccccgcgtatttcacgtcgcccaaagtgcctgagcgagtctacagcatgaacccgtccatccggctgctgctcatcctgcgagacccgtcggagcgcgtgctatctgactacacccaagtgttctacaaccacatgcagaagcacaagccctacccgtccatcgaggagttcctggtgcgcgayggcaggctcaatgtggactacaaggccctcaaccgcagcctctaccacgtgcacatgcagaactggctgcgcttyttcccgctgcgccacatccacattgtggacggcgaccgcctcatcagggaccccttccctgagatccaaaaggtcgagaggttcctaaagctgtcgccgcagatcaatgcttcgaacttctactttaacaaaaccaagggcttttactgcctgcgggacagcggccgggaccgctgcttacatgagtccaaaggccgggcgcacccccaagtcgatcccaaactactcaataaactgcacgaatattttcatgagccaaataagargttcttcgagcttgttggcagaacatttgactggcactgatttgcaataagctaagctcagaaactttcctactgtaagttctggtgtacatctgaggggaaaaagaattttaaaaaagcatttaaggtataatttatttgtaaaatccataaagtacttctgtacagtattagattcacaattgccatatatactagttatatttttctacttgttaaatggagggcattttgtattgtttttcatggttgttaacattgtgtaatatgtctctatatgaaggaactaaactatttcactgaaaaaaaaaaaaagattttttctggagacgctatgtttttttgaatataattaacttgcccccaactcaaaatagctgtctgtgttgcaatcattgcaaaatctaaattcttttgttacttaaaaaaacatgtttttcatggctattacaatcctctctctcccctctcctttctgcattgctctttttaatttttaatgtctcattgtgatcatcagatttatttttacttggattgtaagatttatctcctcggcgattccttgtcatttttggaggtcacagttttactcattcccatgtgtaaacttcaagtaaacaaagcaatattcaggatggagaagcagttagtgactggctagaggtctcttgggatccatcttgacctcaaagaatatttgcacatgcttctgatctcagcagttataataaagaggattaaacccttggccttcagaatgatcttggacctggatactttgccccaggtggcagctggcctccagaaagccaattagaatagaaaagagaaactgcgaaatctatgcgtgtcttcatcctgtcggttctgtgaaaggctgactaaaagggtagtagtcttttgcttagtctgaaagtctgcttacttcctgaaagacacattggcattatagacatatattccatatgcactgagacataaatatgtgtatgtttcaaaatcaactctaaatttggagtcctgaatgtgaaagaaaaagtaagttcccaagtgttgaagttaaaaagagaaaagggcagagttgaaggtagcacctaagagaaccactgtacctgcccccagaggagtggctggagttcagttttacttctgcccctg

SEQ ID NO: 6570 - DNA, 2593 bp, Homo sapiens
agaaactcccggtgtggcagctgagatggcccaggaaagaactatattaccttcaaaaagagaggtacatgcgatgtttgaggtggcatgaagctcagtggtgttatattggaatgagtgagtgaccatcctggagccttcctgaaagaggattggaacatcagttaacatctgaccactgccagcccaccccctcccacccacgtcgattgcatctctgggctccagggataaagcaggtcttggggtgcaccatgatttcaccattcttagtactggccattggcacctgccttactaactccttagtgccagagaaagagaaagaccccaagtactggcgagaccaagcgcaagagacactgaaatatgycctggagcttyagaagctcaacaccaacgtggctaagaatgtcatcatgttcctgggagatgggwtggktgtctccacagtgayggctgcccgcatcctcaagrgtcrgctccaccacaaccctggggaggagaccaggctggagatggacaagttccccttcgtggccctctccaagaygtacaacaccaatgcccaggtccctgacagygccggcaccgscaccrcctacctgtgtrgggtgaaggccartgagggcaccrtgrgggtaagcgyagccamtgagcrttcccggtgcaacaccacccaggggaacgaggtcacctccatcctgcrctgggccaaggacgctgggaaatctgtggkcattgtgaccaccacgagagtgaaccrtgccacccccagcrccrcctacrcccactyggctgacygggactggtactcagacaacrrgatgccccctgaggccttgagccagggctrtaaggacatcgcctaccagctcatgcatracwtcagggacattgacgtgatcatggkgggtggcyrgraatacatgtaccccaagaataaaactgatgtggrgtatgagagtgacgagaaagccaggggcacgagkctggacgkcctggacctcgttgacacctggaagagcttcaaaccgagayacaagcactcccacttcatctrgaaccgcacggaactcctgacccttgacccccacaatgtggactacctattgggtytcttcdagccagggkmcrtgcagtacgagctgaacaggaacaacgtgacggwcccgtcactctccgagatggtggtggtggccatccagatcctgcggaagaaccccaaasgcykcttcttgctggtggaaggagrcagaattgaccacrggcaccatgaaggaaaagccaagcagrccctgcatgaggcggtggasatggaccgggccatcgggcaggcaggcagcttgacctcctcggaagacactctgaccgtggtcactgyggwccattcccrcrtcttcacatttggtggatacacccccyrtggcaactctatctttggtctgkcccccatgctgagtgacacagacaagaagcccttcactgccatcmtgtatggcartgggcctggctacaaggyggtgggcggtgaacgagagaatgtctccatggtggacyatgctcacaacaactaccaggcgcagtctgctgtgcccctgcgccacgagacccacggcrgggaggacrtggccrtcttctccaagggccccatggcgcacctgctgcacrgcgtccacrrgcagawctacgtcccccacgtgatggcgtatgcagcctscwtcrgggccaacctcggccactgtgctcctgccagctcggcaggcagccttgctgcaggccccctgctgctcgckctggccctctaccccctgagcgycctgttctgagggcccagggcccgggcacccacaagcccgtgacagatgccaacttcccacacggcagccccccyctcaaggggcagggaggtgggggcctcctcagcctctgcaactgcaagaaaggggacccargaaaccaaagtctgccgcccacctcgctcccctctggaatcttccccaagggccaaacccacttctggcctccagcctttgctccctccccgctgccctttggccamcagggtagatttctcttgggcaggcagagagtacagactgcagacattctcaaagcctcttatttttctagcgaacgtatttctccagacccagaggccctgaagcctccgtggaacattctggatctgaccctcccagtctcatctcctgaccytcccactcccatctccttacctctggaaccccccaggccctacartgctcatgtccctgtccccaggcccagccctccttcaggggagttgaggtctttctcctcaggacaaggccttgctcactcactcactccaagaccaccagggtcccaggaagccggtgcctgggtggccatcctacccagcgtggcccaggccgggaagagccacctggcagggctcacactcctgggctctgaacacacacgccagctcctctctgaagcgactctcctgtttggaacggcaaaaaaaaatttttttttctctttttggtggtggttaaaagggaacacaaaacatttaaataaaactttccaaatatttccgaggaca

SEQ ID NO: 6571 - DNA, 2630 bp, Homo sapiens
gggacacgtgggcagagacggataaagacagagacccagagaaagccagatatgttgacagacacagagacagacgccagagaggaaggcagacaaagagacgggtggagacaaagactcccaccaagagacgcagaaggaagatgccgacggtaaagacaaaacaggagacgcgcgcaaggagcaggattggaacatcagttaacatctgaccactgccagcccaccccctcccacccacgtcgattgcatctctgggctccagggataaagcaggtcttggggtgcaccatgatttcaccattcttagtactggccattggcacctgccttactaactccttagtgccagagaaagagaaagaccccaagtactggcgagaccaagcgcaagagacactgaaatatgycctggagcttyagaagctcaacaccaacgtggctaagaatgtcatcatgttcctgggagatgggwtggktgtctccacagtgayggctgcccgcatcctcaagrgtcrgctccaccacaaccctggggaggagaccaggctggagatggacaagttccccttcgtggccctctccaagaygtacaacaccaatgcccaggtccctgacagygccggcaccgscaccrcctacctgtgtrgggtgaaggccartgagggcaccrtgrgggtaagcgyagccamtgagcrttcccggtgcaacaccacccaggggaacgaggtcacctccatcctgcrctgggccaaggacgctgggaaatctgtggkcattgtgaccaccacgagagtgaaccrtgccacccccagcrccrcctacrcccactyggctgacygggactggtactcagacaacrrgatgccccctgaggccttgagccagggctrtaaggacatcgcctaccagctcatgcatracwtcagggacattgacgtgatcatggkgggtggcyrgraatacatgtaccccaagaataaaactgatgtggrgtatgagagtgacgagaaagccaggggcacgagkctggacgkcctggacctcgttgacacctggaagagcttcaaaccgagayacaagcactcccacttcatctrgaaccgcacggaactcctgacccttgacccccacaatgtggactacctattgggtytcttcdagccagggkmcrtgcagtacgagctgaacaggaacaacgtgacggwcccgtcactctccgagatggtggtggtggccatccagatcctgcggaagaaccccaaasgcykcttcttgctggtggaaggagrcagaattgaccacrggcaccatgaaggaaaagccaagcagrccctgcatgaggcggtggasatggaccgggccatcgggcaggcaggcagcttgacctcctcggaagacactctgaccgtggtcactgyggwccattcccrcrtcttcacatttggtggatacacccccyrtggcaactctatctttggtctgkcccccatgctgagtgacacagacaagaagcccttcactgccatcmtgtatggcartgggcctggctacaaggyggtgggcggtgaacgagagaatgtctccatggtggacyatgctcacaacaactaccaggcgcagtctgctgtgcccctgcgccacgagacccacggcrgggaggacrtggccrtcttctccaagggccccatggcgcacctgctgcacrgcgtccacrrgcagawctacgtcccccacgtgatggcgtatgcagcctscwtcrgggccaacctcggccactgtgctcctgccagctcggcaggcagccttgctgcaggccccctgctgctcgckctggccctctaccccctgagcgycctgttctgagggcccagggcccgggcacccacaagcccgtgacagatgccaacttcccacacggcagccccccyctcaaggggcagggaggtgggggcctcctcagcctctgcaactgcaagaaaggggacccargaaaccaaagtctgccgcccacctcgctcccctctggaatcttccccaagggccaaacccacttctggcctccagcctttgctccctccccgctgccctttggccamcagggtagatttctcttgggcaggcagagagtacagactgcagacattctcaaagcctcttatttttctagcgaacgtatttctccagacccagaggccctgaagcctccgtggaacattctggatctgaccctcccagtctcatctcctgaccytcccactcccatctccttacctctggaaccccccaggccctacartgctcatgtccctgtccccaggcccagccctccttcaggggagttgaggtctttctcctcaggacaaggccttgctcactcactcactccaagaccaccagggtcccaggaagccggtgcctgggtggccatcctacccagcgtggcccaggccgggaagagccacctggcagggctcacactcctgggctctgaacacacacgccagctcctctctgaagcgactctcctgtttggaacggcaaaaaaaaatttttttttctctttttggtggtggttaaaagggaacacaaaacatttaaataaaactttccaaatatttccgaggaca

SEQ ID NO: 6572 - DNA, 2585 bp, Homo sapiens
tcgggccccgcggccgcctttataaggcggcgggggtggtggcccgggccgcgttgcgctcccgccactccgcgcccgctatcctggctccgtgctcccacgcgcttgtgcctggacggaccctcgccagtgctctgcgcaggattggaacatcagttaacatctgaccactgccagcccaccccctcccacccacgtcgattgcatctctgggctccagggataaagcaggtcttggggtgcaccatgatttcaccattcttagtactggccattggcacctgccttactaactccttagtgccagagaaagagaaagaccccaagtactggcgagaccaagcgcaagagacactgaaatatgycctggagcttyagaagctcaacaccaacgtggctaagaatgtcatcatgttcctgggagatgggwtggktgtctccacagtgayggctgcccgcatcctcaagrgtcrgctccaccacaaccctggggaggagaccaggctggagatggacaagttccccttcgtggccctctccaagaygtacaacaccaatgcccaggtccctgacagygccggcaccgscaccrcctacctgtgtrgggtgaaggccartgagggcaccrtgrgggtaagcgyagccamtgagcrttcccggtgcaacaccacccaggggaacgaggtcacctccatcctgcrctgggccaaggacgctgggaaatctgtggkcattgtgaccaccacgagagtgaaccrtgccacccccagcrccrcctacrcccactyggctgacygggactggtactcagacaacrrgatgccccctgaggccttgagccagggctrtaaggacatcgcctaccagctcatgcatracwtcagggacattgacgtgatcatggkgggtggcyrgraatacatgtaccccaagaataaaactgatgtggrgtatgagagtgacgagaaagccaggggcacgagkctggacgkcctggacctcgttgacacctggaagagcttcaaaccgagayacaagcactcccacttcatctrgaaccgcacggaactcctgacccttgacccccacaatgtggactacctattgggtytcttcdagccagggkmcrtgcagtacgagctgaacaggaacaacgtgacggwcccgtcactctccgagatggtggtggtggccatccagatcctgcggaagaaccccaaasgcykcttcttgctggtggaaggagrcagaattgaccacrggcaccatgaaggaaaagccaagcagrccctgcatgaggcggtggasatggaccgggccatcgggcaggcaggcagcttgacctcctcggaagacactctgaccgtggtcactgyggwccattcccrcrtcttcacatttggtggatacacccccyrtggcaactctatctttggtctgkcccccatgctgagtgacacagacaagaagcccttcactgccatcmtgtatggcartgggcctggctacaaggyggtgggcggtgaacgagagaatgtctccatggtggacyatgctcacaacaactaccaggcgcagtctgctgtgcccctgcgccacgagacccacggcrgggaggacrtggccrtcttctccaagggccccatggcgcacctgctgcacrgcgtccacrrgcagawctacgtcccccacgtgatggcgtatgcagcctscwtcrgggccaacctcggccactgtgctcctgccagctcggcaggcagccttgctgcaggccccctgctgctcgckctggccctctaccccctgagcgycctgttctgagggcccagggcccgggcacccacaagcccgtgacagatgccaacttcccacacggcagccccccyctcaaggggcagggaggtgggggcctcctcagcctctgcaactgcaagaaaggggacccargaaaccaaagtctgccgcccacctcgctcccctctggaatcttccccaagggccaaacccacttctggcctccagcctttgctccctccccgctgccctttggccamcagggtagatttctcttgggcaggcagagagtacagactgcagacattctcaaagcctcttatttttctagcgaacgtatttctccagacccagaggccctgaagcctccgtggaacattctggatctgaccctcccagtctcatctcctgaccytcccactcccatctccttacctctggaaccccccaggccctacartgctcatgtccctgtccccaggcccagccctccttcaggggagttgaggtctttctcctcaggacaaggccttgctcactcactcactccaagaccaccagggtcccaggaagccggtgcctgggtggccatcctacccagcgtggcccaggccgggaagagccacctggcagggctcacactcctgggctctgaacacacacgccagctcctctctgaagcgactctcctgtttggaacggcaaaaaaaaatttttttttctctttttggtggtggttaaaagggaacacaaaacatttaaataaaactttccaaatatttccgaggaca

SEQ ID NO: 6573 - DNA, 2441 bp, Homo sapiens
tgcagggcgtggtggctgctcccaggggccctctttgccccaagatggccctcctgtcccccatcctggatgtggtcctcacggtggccctcagcctcctcctcctggggctgatcctgggcctcctttgtttcttcacttgccgcctggccaggccgctcagagaaagagaaagaccccaagtactggcgagaccaagcgcaagagacactgaaatatgycctggagcttyagaagctcaacaccaacgtggctaagaatgtcatcatgttcctgggagatgggwtggktgtctccacagtgayggctgcccgcatcctcaagrgtcrgctccaccacaaccctggggaggagaccaggctggagatggacaagttccccttcgtggccctctccaagaygtacaacaccaatgcccaggtccctgacagygccggcaccgscaccrcctacctgtgtrgggtgaaggccartgagggcaccrtgrgggtaagcgyagccamtgagcrttcccggtgcaacaccacccaggggaacgaggtcacctccatcctgcrctgggccaaggacgctgggaaatctgtggkcattgtgaccaccacgagagtgaaccrtgccacccccagcrccrcctacrcccactyggctgacygggactggtactcagacaacrrgatgccccctgaggccttgagccagggctrtaaggacatcgcctaccagctcatgcatracwtcagggacattgacgtgatcatggkgggtggcyrgraatacatgtaccccaagaataaaactgatgtggrgtatgagagtgacgagaaagccaggggcacgagkctggacgkcctggacctcgttgacacctggaagagcttcaaaccgagayacaagcactcccacttcatctrgaaccgcacggaactcctgacccttgacccccacaatgtggactacctattgggtytcttcdagccagggkmcrtgcagtacgagctgaacaggaacaacgtgacggwcccgtcactctccgagatggtggtggtggccatccagatcctgcggaagaaccccaaasgcykcttcttgctggtggaaggagrcagaattgaccacrggcaccatgaaggaaaagccaagcagrccctgcatgaggcggtggasatggaccgggccatcgggcaggcaggcagcttgacctcctcggaagacactctgaccgtggtcactgyggwccattcccrcrtcttcacatttggtggatacacccccyrtggcaactctatctttggtctgkcccccatgctgagtgacacagacaagaagcccttcactgccatcmtgtatggcartgggcctggctacaaggyggtgggcggtgaacgagagaatgtctccatggtggacyatgctcacaacaactaccaggcgcagtctgctgtgcccctgcgccacgagacccacggcrgggaggacrtggccrtcttctccaagggccccatggcgcacctgctgcacrgcgtccacrrgcagawctacgtcccccacgtgatggcgtatgcagcctscwtcrgggccaacctcggccactgtgctcctgccagctcggcaggcagccttgctgcaggccccctgctgctcgckctggccctctaccccctgagcgycctgttctgagggcccagggcccgggcacccacaagcccgtgacagatgccaacttcccacacggcagccccccyctcaaggggcagggaggtgggggcctcctcagcctctgcaactgcaagaaaggggacccargaaaccaaagtctgccgcccacctcgctcccctctggaatcttccccaagggccaaacccacttctggcctccagcctttgctccctccccgctgccctttggccamcagggtagatttctcttgggcaggcagagagtacagactgcagacattctcaaagcctcttatttttctagcgaacgtatttctccagacccagaggccctgaagcctccgtggaacattctggatctgaccctcccagtctcatctcctgaccytcccactcccatctccttacctctggaaccccccaggccctacartgctcatgtccctgtccccaggcccagccctccttcaggggagttgaggtctttctcctcaggacaaggccttgctcactcactcactccaagaccaccagggtcccaggaagccggtgcctgggtggccatcctacccagcgtggcccaggccgggaagagccacctggcagggctcacactcctgggctctgaacacacacgccagctcctctctgaagcgactctcctgtttggaacggcaaaaaaaaatttttttttctctttttggtggtggttaaaagggaacacaaaacatttaaataaaactttccaaatatttccgaggaca

SEQ ID NO: 6574 - DNA, 1305 bp, Homo sapiens
accagggcacttccggcggcgctctccgcgccttatcgccaaagctgcggctctggacgcccakccgcggcgtatcccgatcacttccgggtagtgctccacgggcacgagccgcgattgggctaccgtagatggggtacttccggtgtgcasgtgctgggtccttcggcmggaggaggaagatggagcccagcaccgcggcccgggcttgggccctcttttggttgctgctgcccttgcttggcgcrgtttgcgccagcggaccccgcaccttagtgctgctggacaacctcaacgtgcgggagactcattcgcttttcttccggagcctgaaggaccggggctttgagctcacattcaagaccgctgatgaccccagcctgtmtctcataaagtatggggaattcctctatgacaatctcatcattttctccccttcggtagaagattttggaggcaacatcaacgtggagaccatcagtgcctttattgacggyggaggcagtgtgctggtagctgccagctccgacattggtgaccctcttcgagagctgggcagtgagtgcgggattgagtttgacgaggagaaaacggctgtcattgaccatcacaactatgacatctcagaccttggccagcatacgctcatcgtggctgacactgagaacctgctgaaggccccaaccatcgttgggaaatcatctctaaatcccatcccctctccgcacagcgtggagacggggcarggaggggggttattaggattggtggttttgttttgctttgtttaaagccgtgggaaaatggcacaactttacctctgtgggagatgcaacactgagagccaaggggtgggagttgggataatttttatataaaagaagtttttccactttgaattgctaaaagtggcatttttcctatgtgcagtcactcctctcatttctaaaatagggacgtggccaggcacggtggctcatgcctgtaatcccagcactttgggaggccgaggcaggcggctcacgaggtcaggagatcgagactatcctggctaacacggtaaaaccctgtctctactaaaagtacaaaaaattagctgggcgtggtggtgggcacctgtagtcccagctactcgggaggctgaggcaggagaaaggcatgaatccargaggcagagcttgcagtgagctgagatcacgccattgcactccagcctgggcaacagtgttaagactctgtctcaaatataaataaataaataaataaataaataaataaataaaaataaagcgagatgttgccctc

SEQ ID NO: 6575 - DNA, 2101 bp, Homo sapiens
accagggcacttccggcggcgctctccgcgccttatcgccaaagctgcggctctggacgcccakccgcggcgtatcccgatcacttccgggtagtgctccacgggcacgagccgcgattgggctaccgtagatggggtacttccggtgtgcasgtgctgggtccttcggcmggaggaggaagatggagcccagcaccgcggcccgggcttgggccctcttttggttgctgctgcccttgcttggcgcrgtttgcgccagcggaccccgcaccttagtgctgctggacaacctcaacgtgcgggagactcattcgcttttcttccggagcctgaaggaccggggctttgagctcacattcaagaccgctgatgaccccagcctgtmtctcataaagtatggggaattcctctatgacaatctcatcattttctccccttcggtagaagattttggaggcaacatcaacgtggagaccatcagtgcctttattgacggyggaggcagtgtgctggtagctgccagctccgacattggtgaccctcttcgagagctgggcagtgagtgcgggattgagtttgacgaggagaaaacggctgtcattgaccatcacaactatgacatctcagaccttggccagcatacgctcatcgtggctgacactgagaacctgctgaaggccccaaccatcgttgggaaatcatctctaaatcccatcctctttcgaggtgttgggatggtggccgatcctgataaccctttggtgctggacatcctgacgggctcttccacctcttactccttcttcccggacaagcctatcacccagtatccacatgcggtggggaagaacaccctcctcattgctgggctccaggccaggaacaatgcccgygtcatcttcagcggctccctcgacttcttcagcgactcmttcttcaactcagcagtgcagaaggcggcgcccggctcccagaggtattcccagacaggcaactatgaactagctgtggcyctctcccgctgggtgttcaaggaggagggtgtcctccgtgtggggcctgtgtcccatcatcgggtgggcgagacagccccacccaatgcctacactgtcactgacctagtggagtatagcatcgtgatccagcagctctcaaatggcaaatgggtcccctttgatggcgatgacattcagctggagtttgtccgcattgatccttttgtgaggaccttcctgaagaagaaaggtggcaaatacagtgttcagttcaagttgcccgacgtgtatggtgtattccagtttaaagtggattacaaccggctaggctacacacacctgtactcttccactcaggtatccgtgcggccactccagcacacgcagtatgagcgcttcatcccctcggcctacccctactacgccagcgccttytccatgatgctggggctcttcatcttcagcatcgtcttcttgcacatgaaggagaaggagaagtccgactgaggggctagagccctctccgcacagcgtggagacggggcarggaggggggttattaggattggtggttttgttttgctttgtttaaagccgtgggaaaatggcacaactttacctctgtgggagatgcaacactgagagccaaggggtgggagttgggataatttttatataaaagaagtttttccactttgaattgctaaaagtggcatttttcctatgtgcagtcactcctctcatttctaaaatagggacgtggccaggcacggtggctcatgcctgtaatcccagcactttgggaggccgaggcaggcggctcacgaggtcaggagatcgagactatcctggctaacacggtaaaaccctgtctctactaaaagtacaaaaaattagctgggcgtggtggtgggcacctgtagtcccagctactcgggaggctgaggcaggagaaaggcatgaatccargaggcagagcttgcagtgagctgagatcacgccattgcactccagcctgggcaacagtgttaagactctgtctcaaatataaataaataaataaataaataaataaataaataaaaataaagcgagatgttgccctc

SEQ ID NO: 6576 - DNA, 1330 bp, Homo sapiens
accagggcacttccggcggcgctctccgcgccttatcgccaaagctgcggctctggacgcccakccgcggcgtatcccgatcacttccgggtagtgctccacgggcacgagccgcgattgggctaccgtagatggggtacttccggtgtgcasgtgctgggtccttcggcmggaggaggaagatggagcccagcaccgcggcccgggcttgggccctcttttggttgctgctgcccttgcttggcgcrgtttgcgccagcggaccccgcaccttagtgctgctggacaacctcaacgtgcgggagactcattcgcttttcttccggagcctgaaggaccggggctttgagctcacattcaagaccgctgatgaccccagcctgtmtctcataaagtatggggaattcctctatgacaatctcctggagtttgtccgcattgatccttttgtgaggaccttcctgaagaagaaaggtggcaaatacagtgttcagttcaagttgcccgacgtgtatggtgtattccagtttaaagtggattacaaccggctaggctacacacacctgtactcttccactcaggtatccgtgcggccactccagcacacgcagtatgagcgcttcatcccctcggcctacccctactacgccagcgccttytccatgatgctggggctcttcatcttcagcatcgtcttcttgcacatgaaggagaaggagaagtccgactgaggggctagagccctctccgcacagcgtggagacggggcarggaggggggttattaggattggtggttttgttttgctttgtttaaagccgtgggaaaatggcacaactttacctctgtgggagatgcaacactgagagccaaggggtgggagttgggataatttttatataaaagaagtttttccactttgaattgctaaaagtggcatttttcctatgtgcagtcactcctctcatttctaaaatagggacgtggccaggcacggtggctcatgcctgtaatcccagcactttgggaggccgaggcaggcggctcacgaggtcaggagatcgagactatcctggctaacacggtaaaaccctgtctctactaaaagtacaaaaaattagctgggcgtggtggtgggcacctgtagtcccagctactcgggaggctgaggcaggagaaaggcatgaatccargaggcagagcttgcagtgagctgagatcacgccattgcactccagcctgggcaacagtgttaagactctgtctcaaatataaataaataaataaataaataaataaataaataaaaataaagcgagatgttgccctc

SEQ ID NO: 6577 - DNA, 3295 bp, Homo sapiens
accagggcacttccggcggcgctctccgcgccttatcgccaaagctgcggctctggacgcccakccgcggcgtatcccgatcacttccgggtagtgctccacgggcacgagccgcgattgggctaccgtagatggggtacttccggtgtgcasgtgctgggtccttcggcmggaggaggaagatggagcccagcaccgcggcccgggcttgggccctcttttggttgctgctgcccttgcttggcgcrgtttgcgccagcggaccccgcaccttagtgctgctggacaacctcaacgtgcgggagactcattcgcttttcttccggagcctgaaggaccggggctttgagctcacattcaagaccgctgatgaccccagcctgtmtctcataaagtatggggaattcctctatgacaatctcatcattttctccccttcggtagaagattttggaggcaacatcaacgtggagaccatcagtgcctttattgacggyggaggcagtgtgctggtagctgccagctccgacattggtgaccctcttcgagagctgggcagtgagtgcgggattgagtttgacgaggagaaaacggctgtcattgaccatcacaactatgacatctcagaccttggccagcatacgctcatcgtggctgacactgagaacctgctgaaggccccaaccatcgttgggaaatcatctctaaatcccatcctctttcgaggtgttgggatggtggccgatcctgataaccctttggtgctggacatcctgacgggctcttccacctcttactccttcttcccggacaagcctatcacccagtatccacatgcggtggggaagaacaccctcctcattgctgggctccaggccaggaacaatgcccgygtcatcttcagcggctccctcgacttcttcagcgactcmttcttcaactcagcagtgcagaaggcggcgcccggctcccagaggtattcccagacaggcaactatgaactagctgtggcyctctcccgctgggtgttcaaggaggagggtgtcctccgtgtggggcctgtgtcccatcatcgggtgggcgagacagccccacccaatgcctacactgtcactgacctagtggagtatagcatcgtgatccagcagctctcaaatggcaaatgggtcccctttgatggcgatgacattcagctggagtttgtccgcattgatccttttgtgaggaccttcctgaagaagaaaggtggcaaatacagtgttcagttcaagttgcccgacgtgtatggtgtattccagtttaaagtggattacaaccggctaggctacacacacctgtactcttccactcaggtatccgtgcggccactccagcacacgcagtatgagcgcttcatcccctcggcctacccctactacgccagcgccttytccatgatgctggggctcttcatcttcagcatcgtcttcttgcacatgaaggagaaggagaagtccgactgaggggctagagccctctccgcacagcgtggagacggggcarggaggggggttattaggattggtggttttgttttgctttgtttaaagccgtgggaaaatggcacaactttacctctgtgggagatgcaacactgagagccaaggggtgggagttgggataatttttatataaaagaagtttttccactttgaattgctaaaagtggcatttttcctatgtgcagtcactcctctcatttctaaaatagggacgtggccaggcacggtggctcatgcctgtaatcccagcactttgggaggccgaggcaggcggctcacgaggtcaggagatcgagactatcctggtarcacggtraaaccctgtctctactaaaagtacaaaaaattagctgggcgtggtggtgggcacctgtagtcccrgctactcgggaggctgaggcaggagaaaggcatgaatccargaggcagagcttgcagtgagctgagatcacgccattgcactccagcctgggcaacagtgttaagactctgtctcaaatataaataaataaataaataaataaaaataaagcgagatgttgccctcaaacttcacctggccccggtcctggtttgctaatggctgtgggtgggggttrctgtgggtgatgactgactggatacaaaatcctaagtaagtggcttcatgaaattttgcctaggactggactgtctttcttttaactgtgaaatgatgatggttctccctaacgtctcctcaaaggatacaagaaagttgttgttgctagtagaccgaggggtgggaatyactgaaatggaaaatctagatgacagtgctggggaagagaaaactagaacagctcagttgaagacaacctttactgcatgttgacgctgatttaggcaatagcttcctaaaaatcatgtataaagttagttagttagacatgaaatctcttccccaatgttgatacctgcccacaaaatattctcaccttcagagtataagratcattcttaaagccaaatattcagttcaaggcacatacgtcatctgcagttgtaaatttgcatttaatatttcacaattcctgtaagagaggctagtcaggagggamaccctcaagtttaaatccccacacttacttacttactgctcatccgtcactttcgctaagtgagattaataattcagtagctggtccagaacgcacagcttgggaacgcagaggcccaggcctcatgtaatttcccactcccgtaactsaacgtgctgacccatgttgatgtctgccttcatccaggtggcaaatcagacatgctacgctgcccccttcaaacgagttcctcgtgttaggggcaaaggtcacagccaaactctgccactgacagccagtgccttggcctggatccwctmtgtggatgcaggcctacccctcctcagtccagcctcatctactagaccagcttggccattcacttttcrgatgtctgtgagcasaggactgcagactgaactctcactcaagttcttccatttgccaagcccgaggccttttccggctaaccagccctctctgcgctgtsttgtctcctgactcccaccctcaccattcacagaccatcacgacacagaggatgycawgttcttttagtaattcaccagctccatgcagggacatcacagggctgccctccatgagcagaggaggagggctgcctggcagagcgtttcacactccaggttagccagaaagagcatcttcatttttgtttccacacaacacttctct

SEQ ID NO: 6578 - DNA, 997 bp, Homo sapiens
accagggcacttccggcggcgctctccgcgccttatcgccaaagctgcggctctggacgcccakccgcggcgtatcccgatcacttccgggtagtgctccacgggcacgagccgcgattgggctaccgtagatggggtacttccggtgtgcasgtgctgggtccttcggcmggaggaggaagatggagcccagcaccgcggcccgggcttgggccctcttttggttgctgctgcccttgcttggcgcrgtttgcgccagcggaccccgcaccttagtgctgctggacaacctcaacgtgcgggagactcattcgcttttcttccggagcctgaaggaccggggctttgagctcacattcaagaccgctgatgaccccagcctgtmtctcataaagtatggggaattcctctatgacattcagctggagtttgtccgcattgatccttttgtgaggaccttcctgaagaagaaaggtggcaaatacagtgttcagttcaagttgcccgacgtgtatggtgtattccagtttaaagtggattacaaccggctaggctacacacacctgtactcttccactcaggtatccgtgcggccactccagcacacgcagtatgagcgcttcatcccctcggcctacccctactacgccagcgccttytccatgatgctggggctcttcatcttcagcatcgtcttcttgcacatgaaggagaaggagaagtccgactgaggggctagagccctctccgcacagcgtggagacggggcarggaggggggttattaggattggtggttttgttttgctttgtttaaagccgtgggaaaatggcacaactttacctctgtgggagatgcaacactgagagccaaggggtgggagttgggataatttttatataaaagaagtttttccactttgaattgctaaaatgagctgagatcacgccattgcactccagcctgggcaacagtgttaagactctgtctcaaatat

SEQ ID NO: 6579 - DNA, 2659 bp, Homo sapiens
cgcagaggcaccgccccaagtttgttgtgaccggcgggggacgccggtggtggcggcagcggcggctgcgggggcaccgggccgcggcgccaccatggcggtgcgacaggcgctgggccgcggcctgcagctgggtcgagcgctgctgctgcgcttcacgggcaagcccggccgggcctacggcttggggcggccgggcccggcggcgggctgtgtccgcggggagcgtccaggctgggccgcaggaccgggcgcggagcctcgcagggtcgggctcgggctccctaaccgtctccgcttcttccgccagtcggtggccgggctggcggcgcggttgcagcggcagttcgtggtgcgggcctggggctgcgcgggcccttgcggccgggcagtctttctggccttcgggctagggctgggcctcatcgaggaaaaacaggcggagagccggcgggcggtctcggcctgtcaggagatccaggcaatttttacccagaaaagcaagccggggcctgacccgttggacacgagacgcttgcagggctttcggctggaggagtatctgatagggcagtccattggtaagggctgcagtgctgctgtgtatgaagccaccatgcctacattgccccagaacctggaggtgacaaagagcaccgggttgcttccagggagaggcccaggtaccagtgcaccaggagaagggcaggagcgagctccgggggcccctgccttccccttggccatcaagatgatgtggaacatctcggcaggttcctccagcgaagccatcttgaacacaatgagccaggagctggtcccagcgagccgagtggccttggctggggagtatggagcagtcacttacagaaaatccaagagaggtcccaagcaactagcccctcaccccaacatcatccgggttctcygcgccttcacctcttccgtgccgctgctgccaggggccctggtcgactaccctgatgtgctgccctcacgcctccaccctgaaggcctgggccatggccggacgctgttcctcgttatgaagaactatccctgtaccctgcgccagtacctttgtgtgaacacacccagcccccgcctcgccrccatgatgctgctgcagctgctggaaggcgtggaccatctggttcaacagggcatcgcgcacagagacctgaaatccgacaacatccttgtggagctggacccagacggctgcccctggctggtgatcgcagattttggctgctgcctggctgatgagagcatcggcctgcagttgcccttcagcagctggtacgtggatcggggcggaaacggctgtctgatggccccagaggtgtccacggcccgtcctggccccagggcagtgattgactacagcaaggctgatgcctgggcagtgggagccatcgcctatgaaatcttcgggcttgtcaatcccttctacggccagggcaaggcccaccttgaaagccgcagctaccaagaggctcagctacctgcactgcccgagtcagtgcctccagacgtgagacagttggtgagggcactgctccagcgagaggccagcaagagaccatctgcccragtagccgcaaatgtgcttcatctaagcctctggggtgaacatattctagccctgaagamtctgaagttagacaagatggttggctggctcctccaacaatcggccgccactttgttgkccaacaggctcacagagaagtgttgtgtggaaacaaaaatgaagatgctctttctggctaacctggagtgtgaaacgctctgccaggcagccctcctcctctgctcatggagggcagccctgtgatgtccctgcatggagctggtgaattactaaaagaacwtgrcatcctctgtgtcgtgatggtctgtgaatggtgagggtgggagtcaggagacaasacagcgcagagagggctggttagccggaaaaggcctcgggcttggcaaatggaagaacttgagtgagagttcagtctgcagtcctstgctcacagacatcygaaaagtgaatggccaagctggtctagtagatgaggctggactgaggaggggtaggcctgcatccacakagwggatccaggccaaggcactggctgtcagtggcagagtttggctgtgacctttgcccctaacacgaggaactcgtttgaagggggcagcgtagcatgtctgatttgccacctggatgaaggcagacatcaacatgggtcagcacgttsagttacgggagtgggaaattacatgaggcctgggcctctgcgttcccaagctgtgcgttctggaccagctactgaattattaatctcacttagcgaaagtgacggatgagcagtaagtaagtaagtgtggggatttaaacttgagggtktccctcctgactagcctctcttacaggaattgtgaaatattaaatgcaaatttacaactgcagatgacgtatgtgccttgaactgaatatttggctttaagaatgatycttatactctgaaggtgagaatattttgtgggcaggtatcaacattggggaagagatttcatgtctaactaactaactttatacatgatttttaggaagctattgcctaaatcagcgtcaacatgcagtaaaggttgtcttcaactg

SEQ ID NO: 6580 - DNA, 5631 bp, Homo sapiens
cggatacggcagaagttttggggccagacacaagacttccaagtttgaatgggcagcgcaaaacccagacaagttttccggtagtgccgccaacccctgtcaggcacagaagacacagcgagaaccgtgagccgttacgaaagcctaaaacactgagctcgcgtcctgccaagcagcaggcgcacaaacctacacctccgagcgctccctggaggtcccgcccactcttctctcccgagccggctagagatctggaagagggcgggccaaggccggccttccttgacctcagtgacccgtctggccccgcccaccctcgtcgacgtgattcccgccgtgagccccgcggaagagcagaacgtttrggagtgtgcagctcctgggcccggctcaggcccgtcgcggaggcgcggcgcaggggagcgctcgggtgggagtctcgctcctccaccagtttattgcgacgtagcatycaggcctaggcctccccgtccatccccgccggactcgggcctctggcagcagcgggtgacgcagacggaacatcatgtcgtccgcggccgagcctccgccacccccgcctcccgagagcgcgccttccaagcccgcagcctcgatcgccagcggcgggagcaacagcagcaacaaaggcggccccgaaggcgtcgcggcgcaggcggttgcgtctgcggccagcgctggtcccgcagacgccgagatggaggaaatatttgatgatgcgtcacctggaaagcaaaaggaaatccaagaaccagatcctacctatgaagaaaaaatgcaaactgaccgggcaaatagattcgagtayttattaaagcagacagaactttttgcacatttcattcaacctgctgctcagaagactccaacttcacctttgaagatgaaaccagggcgcccacgaataaaaaaagatgagaagcagaacttaytatccgttggcgattaccgacaccgtagaacagagcaagaggaggatgaagagctattaacagaaagctccaaagcaaccaatgtttgcactcgatttgaagactctccatcgtatgtaaaatggggtaaactgagagattatcaggtccgaggattaaactggctcatttctttgtatgagaatggcatcaatggtatccttgcagatgaaatgggcctaggaaagactcttcaaacaatttctcttcttgggtacatgaaacattatagaaacattcctgggcctcatatggttttggttcctaagtctacattacacaactggatgagtgaattcaagagatgggtaccaacacttagatctgtttgtttgataggagataaagaacaaagagctgcttttgtcagagacgttttattaccgggagaatgggatgtatgtgtaacatcttatgaaatgcttattaaagagaagtctgtgttcaaaaaatttaattggagatacttagtaatagatgaagctcacaggatcaaaaatgaaaaatctaagttgtcagaaatagtgagggaattcaagactacaaatagactattattaactggaacacctcttcagaacaacttgcatgagctgtggtcacttcttaactttctgttgccagatgtgtttaattcagcagatgactttgattcctggtttgatacaaacaactgccttggggatcaaaaactagttgagaggcttcatatggttttgcgtccattcctccttcgtcgaattaaggctgatgttgaaaagagtttgcctccaaagaaggaagtaaaaatctatgtgggcctcagcaaaatgcaaagggaatggtatactcggatattaatgaaggatatagatatactcaactcagcaggcaagatggacaaaatgaggttattgaacatcctaatgcagttgagaaaatgttgtaatcatccatatctctttgatggagcagaacctggtccaccttatacaacagatatgcatctagtaaccaacagtggcaaaatggtggttttagacaagctgctccctaagttaaaagaacaaggttcacgagtactaatcttcagtcaaatgacaagggtattggacattttggaagattattgcatgtggagaaattatgagtactgcaggttggatggtcagacaccccatgatgagagacaagactccatcaatgcatacaatgaaccaaacagcacaaagtttgttttcatgttaagcacgcgtgctggtggtcttggcatcaatcttgcgactgctgatgtagtaattttgtatgattctgattggaatccccaagtagatcttcaggctatggaccgagcacatagaattgggcagactaagacagtcagagtgttccgctttataactgataacactgtagaagaaagaatagtagaacgtgctgagatgaaactcagactggattcaatagtcattcaacaagggaggcttgtggatcagaatctgaacaaaattgggaaagatgaaatgcttcaaatgattagacatggagcaacacatgtgtttgcttcaaaggaaagtgagatcactgatgaagatatcgatggtattttggaaagaggtgcaaagaagactgcagagatgaatgaaaagctctccaagatgggcgaaagttcacttagaaactttacaatggatacagagtcaagtgtttataacttcgaaggagaagactatagagaaaaacaaaagattgcattcacagagtggattgaaccacctaaacgagaaagaaaagccaactatgccgttgatgcatatttcagggaagctcttcgtgttagtgaacctaaagcacccaaggctcctcgacctccaaaacaacccaatgttcaggatttccagttctttcctccacgtttatttgaattactggaaaaagaaattctgttttacagaaaaactattgggtacaaggtacctcgaaatcctgagctgcctaacgcagcacaggcacaaaaagaagaacagcttaaaattgatgaagctgaatcccttaatgatgaagagttagaggaaaaagagaagcttctaacacagggatttaccaattggaataagagagattttaaccagtttatcaaagctaatgagaagtggggtcgtgatgatattgaaaatatagcaagagaagtagaaggcaaaactccagaagaagtcattgaatattcagctgtgttttgggaaaggtgcaacgagctccaggacatagagaagattatggctcagattgaaaggggagaggcgagaattcaaagaagaataagcatcaagaaagcacttgacacaaagattggacggtacaaagcaccttttcatcagctgagaatatcatatggtactaacaaaggaaaaaactatactgaagaagaagatcgttttctgatttgtatgcttcacaaacttggatttgacaaagaaaatgtttatgatgaattgcgacagtgtattcgcaactctcctcagttcagatttgactggtttcttaagtccagaactgcaatggagctccagaggagatgtaataccttaattactttgattgaaagagaaaacatggaactagaagaaaaggagaaggcagagaaaaagaaacgaggaccaaagccttcaacacagaaacgtaaaatggatggcgcacctgatggtcgaggaagaaaaaagragctgaaactatgaatatgtttttgtttcataatcactaactttaaaccagtagttctttaatttacgggtcttcataaratgtactgtacaatgctcaattgttatgtcatttaaagacatcaggttcatctgtttactgagctagaaacatagtatgtagtttcacttttttaaatgcaacagctgtgctgaaatttttttatcattaacacttgaagtaataaaataggcttcatttattactaagtgtttcatttgatttatttttctattgtagttccatttgtgaagattgtgactttttgtttattagctataatttctacacttgtaaggcttamaaacaagttaaaaagaaaattgcaaataacatttgtccctttcagtcttcacctagttgtgtaattattttaattcactttgcctttgcagaaatttgggtattttctttgtagtgctattgagtctcatctggaaagattatataaattgcattctccttgcttatgtgggtagaatgggaraagaaggcaagacaaagtatacttaaattctatgcatatttctgttatgctttctgttttttttagttgattctgaaatgaatatgccctattcttttgaaagaatggccttttagttgtatagccaaagacatttagtattttccggttccttaaggtattactgtaccattttgtaaaaggaatattattattattatttttaattatttggtaaatattttgtcatatgaccttctgaagcagccacaacttagataatgtcagaactaaggtgattttttttttttaattttgaaagcccagccaaaatgaggtgtgaatttgtcatactgttacattgaaattggtaacaaaatatatcccctcccatttggacttttagggtaaatgaaaattttattgtattttaaagtagtttctaagtgttagcaagactgactataattccagtttctgttttctatggacagacctgataaactggagaccctaaagcaggaatacccaaattatagtgtcaggattttagctgtaccagaggcctttatgtgctacacataatttgtataaaattttatatgtgcagattgggtacataaacagttctccatttttctaagggaatgcaataaatgtagcatcgtgaataaatataacttttataatccgtaaagtggtcttttctttccatttctttaattgttttctcaatttttattcactttttcctttaggacacatttcccttaattggatatctttcccttaaatttctattagtagttgttttcatctgcccacatgtaattgaagatttaaaaaaaaaattctgatacctgcagtattactaatactgcttaatttcttgaaatgtggaattgctgctgttaatgtcaagcaaaacgcagtatttatggcaaattgtaaagtaatttgaatttagtgctacctcaaaattaactttttaaatactatgttagattcttaacagttaaaggtctaatacatgcatgaggaatggttacttatgaaaggaaaaagaatttgtaagagttatcacctcagtttggaagaaattgaaaaaatgtaaggctgaagaaaacttacggaggtcacaaaagtgatgttttcaagaggaagagaaactgggagggagatacacagtggaaatgcaaaatgaatcaagtatagtggtagccctgagagcttagggactcaaatggaaactgtgtgaagggaaactcacttgaaaaaaaagcatgaaccagctaggccctgccaccactgtgtttggccaagttcacaaatctgttttaacctgtcgcttccctgtcacttctctggctttcctctcctgctaagcttttgtttcctggcagtaattaaaatcttctgtcagtgccacagcty

SEQ ID NO: 6581 - DNA, 5290 bp, Homo sapiens
ccccgcggaagagcagaacgtttrggagtgtgcagctcctgggcccggctcaggcccgtcgcggaggcgcggcgcaggggagcgctcgggtgggagtctcgctcctccaccagtttattgcgacgtagcatycaggcctaggcctccccgtccatccccgccggactcgggcctctggcagcagcgggtgacgcagacggaacatcatgtcgtccgcggccgagcctccgccacccccgcctcccgagagcgcgccttccaagcccgcagcctcgatcgccagcggcgggagcaacagcagcaacaaaggcggccccgaaggcgtcgcggcgcaggcggttgcgtctgcggccagcgctggtcccgcagacgccgagatggaggaaatatttgatgatgcgtcacctggaaagcaaaaggaaatccaagaaccagatcctacctatgaagaaaaaatgcaaactgaccgggcaaatagattcgagtayttattaaagcagacagaactttttgcacatttcattcaacctgctgctcagaagactccaacttcacctttgaagatgaaaccagggcgcccacgaataaaaaaagatgagaagcagaacttaytatccgttggcgattaccgacaccgtagaacagagcaagaggaggatgaagagctattaacagaaagctccaaagcaaccaatgtttgcactcgatttgaagactctccatcgtatgtaaaatggggtaaactgagagattatcaggtccgaggattaaactggctcatttctttgtatgagaatggcatcaatggtatccttgcagatgaaatgggcctaggaaagactcttcaaacaatttctcttcttgggtacatgaaacattatagaaacattcctgggcctcatatggttttggttcctaagtctacattacacaactggatgagtgaattcaagagatgggtaccaacacttagatctgtttgtttgataggagataaagaacaaagagctgcttttgtcagagacgttttattaccgggagaatgggatgtatgtgtaacatcttatgaaatgcttattaaagagaagtctgtgttcaaaaaatttaattggagatacttagtaatagatgaagctcacaggatcaaaaatgaaaaatctaagttgtcagaaatagtgagggaattcaagactacaaatagactattattaactggaacacctcttcagaacaacttgcatgagctgtggtcacttcttaactttctgttgccagatgtgtttaattcagcagatgactttgattcctggtttgatacaaacaactgccttggggatcaaaaactagttgagaggcttcatatggttttgcgtccattcctccttcgtcgaattaaggctgatgttgaaaagagtttgcctccaaagaaggaagtaaaaatctatgtgggcctcagcaaaatgcaaagggaatggtatactcggatattaatgaaggatatagatatactcaactcagcaggcaagatggacaaaatgaggttattgaacatcctaatgcagttgagaaaatgttgtaatcatccatatctctttgatggagcagaacctggtccaccttatacaacagatatgcatctagtaaccaacagtggcaaaatggtggttttagacaagctgctccctaagttaaaagaacaaggttcacgagtactaatcttcagtcaaatgacaagggtattggacattttggaagattattgcatgtggagaaattatgagtactgcaggttggatggtcagacaccccatgatgagagacaagactccatcaatgcatacaatgaaccaaacagcacaaagtttgttttcatgttaagcacgcgtgctggtggtcttggcatcaatcttgcgactgctgatgtagtaattttgtatgattctgattggaatccccaagtagatcttcaggctatggaccgagcacatagaattgggcagactaagacagtcagagtgttccgctttataactgataacactgtagaagaaagaatagtagaacgtgctgagatgaaactcagactggattcaatagtcattcaacaagggaggcttgtggatcagaatctgaacaaaattgggaaagatgaaatgcttcaaatgattagacatggagcaacacatgtgtttgcttcaaaggaaagtgagatcactgatgaagatatcgatggtattttggaaagaggtgcaaagaagactgcagagatgaatgaaaagctctccaagatgggcgaaagttcacttagaaactttacaatggatacagagtcaagtgtttataacttcgaaggagaagactatagagaaaaacaaaagattgcattcacagagtggattgaaccacctaaacgagaaagaaaagccaactatgccgttgatgcatatttcagggaagctcttcgtgttagtgaacctaaagcacccaaggctcctcgacctccaaaacaacccaatgttcaggatttccagttctttcctccacgtttatttgaattactggaaaaagaaattctgttttacagaaaaactattgggtacaaggtacctcgaaatcctgagctgcctaacgcagcacaggcacaaaaagaagaacagcttaaaattgatgaagctgaatcccttaatgatgaagagttagaggaaaaagagaagcttctaacacagggatttaccaattggaataagagagattttaaccagtttatcaaagctaatgagaagtggggtcgtgatgatattgaaaatatagcaagagaagtagaaggcaaaactccagaagaagtcattgaatattcagctgtgttttgggaaaggtgcaacgagctccaggacatagagaagattatggctcagattgaaaggggagaggcgagaattcaaagaagaataagcatcaagaaagcacttgacacaaagattggacggtacaaagcaccttttcatcagctgagaatatcatatggtactaacaaaggaaaaaactatactgaagaagaagatcgttttctgatttgtatgcttcacaaacttggatttgacaaagaaaatgtttatgatgaattgcgacagtgtattcgcaactctcctcagttcagatttgactggtttcttaagtccagaactgcaatggagctccagaggagatgtaataccttaattactttgattgaaagagaaaacatggaactagaagaaaaggagaaggcagagaaaaagaaacgaggaccaaagccttcaacacagaaacgtaaaatggatggcgcacctgatggtcgaggaagaaaaaagragctgaaactatgaatatgtttttgtttcataatcactaactttaaaccagtagttctttaatttacgggtcttcataaratgtactgtacaatgctcaattgttatgtcatttaaagacatcaggttcatctgtttactgagctagaaacatagtatgtagtttcacttttttaaatgcaacagctgtgctgaaatttttttatcattaacacttgaagtaataaaataggcttcatttattactaagtgtttcatttgatttatttttctattgtagttccatttgtgaagattgtgactttttgtttattagctataatttctacacttgtaaggcttamaaacaagttaaaaagaaaattgcaaataacatttgtccctttcagtcttcacctagttgtgtaattattttaattcactttgcctttgcagaaatttgggtattttctttgtagtgctattgagtctcatctggaaagattatataaattgcattctccttgcttatgtgggtagaatgggaraagaaggcaagacaaagtatacttaaattctatgcatatttctgttatgctttctgttttttttagttgattctgaaatgaatatgccctattcttttgaaagaatggccttttagttgtatagccaaagacatttagtattttccggttccttaaggtattactgtaccattttgtaaaaggaatattattattattatttttaattatttggtaaatattttgtcatatgaccttctgaagcagccacaacttagataatgtcagaactaaggtgattttttttttttaattttgaaagcccagccaaaatgaggtgtgaatttgtcatactgttacattgaaattggtaacaaaatatatcccctcccatttggacttttagggtaaatgaaaattttattgtattttaaagtagtttctaagtgttagcaagactgactataattccagtttctgttttctatggacagacctgataaactggagaccctaaagcaggaatacccaaattatagtgtcaggattttagctgtaccagaggcctttatgtgctacacataatttgtataaaattttatatgtgcagattgggtacataaacagttctccatttttctaagggaatgcaataaatgtagcatcgtgaataaatataacttttataatccgtaaagtggtcttttctttccatttctttaattgttttctcaatttttattcactttttcctttaggacacatttcccttaattggatatctttcccttaaatttctattagtagttgttttcatctgcccacatgtaattgaagatttaaaaaaaaaattctgatacctgcagtattactaatactgcttaatttcttgaaatgtggaattgctgctgttaatgtcaagcaaaacgcagtatttatggcaaattgtaaagtaatttgaatttagtgctacctcaaaattaactttttaaatactatgttagattcttaacagttaaaggtctaatacatgcatgaggaatggttacttatgaaaggaaaaagaatttgtaagagttatcacctcagtttggaagaaattgaaaaaatgtaaggctgaagaaaacttacggaggtcacaaaagtgatgttttcaagaggaagagaaactgggagggagatacacagtggaaatgcaaaatgaatcaagtatagtggtagccctgagagcttagggactcaaatggaaactgtgtgaagggaaactcacttgaaaaaaaagcatgaaccagctaggccctgccaccactgtgtttggccaagttcacaaatctgttttaacctgtcgcttccctgtcacttctctggctttcctctcctgctaagcttttgtttcctggcagtaattaaaatcttctgtcagtgccacagcta

SEQ ID NO: 6582 - DNA, 3244 bp, Homo sapiens
cgcctccacgtcttggggccgggccggaaggcagatctcaccgcctgcttccctctgcagcggtagcacaagctcagcgatggcggctccagaaggcagcggtctaggcgaggacgcccggctggaccaggagaccgcccagtggctgcgctgggacaagaattccttaactttggaggcagtgaaacgactaatagcagaaggtaataaagaagaactacgaaaatgttttggggcccgaatggagtttgggacagctggcctccgagctgctatgggacctggaatttctcgtatgaatgacttgaccatcatccagactacacagggattttgcagatacctggaaaaacaattcagtgacttaaagcagaaaggcatcgtgatcagytttgacgcccgagctcatccatccagtgggggtagcagcagaaggtttgcccgacttgctgcaaccacatttatcagtcaggggattcctgtgtacctcttttctgatataacgccaaccccctttgtgcccttcacagtatcacatttgaaactttgtgctggaatcatgataactgcatctcacaatccaaagcaggataatggttataaggtctattgggataatggagctcagatcatttctcctcacgataaagggatttctcaagctattgaagaaaatctagaaccgtggcctcaagcttgggacgattctttaattgatagcagtccacttctccacaatccgagtgcttccatcaataatgactactttgaagaccttaaaaagtactgtttccacaggagcgtgaacagggagacaaaggtgaagtttgtgcacacctctgtccatggggtgggtcatagctttgtgcagtcagctttcaaggcttttgaccttgttcctcctgaggctgttcctgaacagaaagatccggatcctgagtttccaacagtgaaatacccgaatcccgaagaggggaaaggtgtcttgactttgtcttttgctttggctgacaaaaccaaggccagaattgttttagctaacgayccggatgctgatagacttgctgtggcagaaaagcaagacagtggtgaatggagggtgttttcaggcaatgagttgggggccctcctgggctggtggctttttacatcttggaaagagaagaaccaggatcgcagtgctctcaaagacacgtacatgttgtccagcaccgtctcctccaaaatcttgcgggccattgccttaaaggaaggttttcattttgaggaaacattaactggctttaagtggatgggaaacagagccaaacagctaatagaccaggggaaaactgttttatttgcatttgaagaagctattggatacatgtgctgcccttttgttctggacaaagatggagtcagtgccgctgtcataagtgcagagttggctagcttcctagcaaccaagaatttgtctttgtctcagcaactaaaggccatttatgtggagtatggctaccatattactaaagcttcctattttatctgccatgatcaagamaccattaagaaattatttgaaaacctcagaaactacgatggaaaaaataattatccaaaagcttgtggcaaatttgaaatttctgccattagggaccttacaactggctatgatgatagccaacctgataaaaaagctgttcttcccactagtaaaagcagccaaatgatcaccttcacctttgctaatggaggcgtggccaccatgcgcaccagtgggacagagcccaaaatcaagtactatgcagagctgtgtgccccaccwgggaacagtgatcctgagcagctgaagaaggaactgaatgaactggtcagtgctattgaagaacattttttccagccacagaagtacaatctgcagccaaaagcagactaaaatartccagccttgggtatacttgcatttacctacaattaagctgggtttaacttgttaagcaatatttttaagggccaaatgattcaaaacatcacaggtatttatgtgttttacaaagacctacattcctcattgtttcatgtttgacytttaaggtgaaaaaagaaaatggccaaacccaacaaactaacattcctactaaaaagttgagcttggacatattttgaatttttgtaagtgaagatttttaaactgactaacttaaaaaaatagattgtaattgatgtgccttaatttgcataaatcataaatgtatgtcytctctgtaattgttttaatgtgtgcttgaaatatccagaaaacctatggagttagtaaattctgggctgtcatatgtaggatagccactttttaggtatatgtacatttatatttctatcaattccttagaaagtaaaataaatgaatagatcaaatgttgtgttcatgtttggggaaaatataatttgcagaaacctatgaagtagagcaaagatgctttaaaaagataagtttttttgaactaaattttttttagttctaataatgcacataggatattagtacatcgtacacgtgctaggaaaaaacagcttcagtgtctttgtttaatgtgttgaaactcatctttttaaatcttgaaaaaccaattgtttacttgaaacttgaaagtagcatatttttctgttttttggttgtttgttcatttgtattagcacaatttaatgtaattcctggtttggaggcagcaagacctatgagcaagaactatttacttgaccctcgtttttttctcttgttcttgtgtggtctgaaatctaaaactagactttattatgatagatttcctataagccaatttctaataacaaatagatttattatttaatctgtaccttctatcttctcataattcgtggtcttacagccttccaaaataactccagttgggcacccatgagctaggatcaaactttctttatatactttatatattttacattatttctgatttttaaagcaaatgattgccattatgattacactcaacctaaatagttatgaacagtttcagaacaatgaaaaattacaatactatgtgatagtattgtaactatttttctattttagtcatatgtcgcttatatcctaccagaactcttaaatctataatattcgatatattctacaaactgctttattgtagaagccatatttatgtttattttataatgttttctagtgtcaaactgtactgtggagaaaagaaatgttagatctgtg

SEQ ID NO: 6583 - DNA, 1530 bp, Homo sapiens
caatcttatattgcagagccatttggaagaagagctcaagctgttgaaacaaacaaaacgctgcatgagatgaagaccagattcctgctctttggagaaaccmatcagggctgtcagattcgaatcaatcatccggacacgttacaggagtgcggcttcaactcctccctgcctctggtgatgataatccacgggtggtcggtggacggcrtgctagaaaactggatctggcagatggtggccgcgctgaagtctcagccggcccagccagtgaacgtggggctggtggactggatcaccctggcccacgaccactacaccatcgccgtccgcaacacccgccttgtgggcaaggaggtcgcggctcttctccggtggctggaggaatctgtkcaactctctcgaagccatgttcacctaattgggtacagcctgggtgcacacgtgtcaggatttgccggcagttccatcggtggaacgcacaagattgggagaatcacagggctggatgccgcgggrcctttgtttgagggaagtgcccccagcaatcgtctttctccagatgatgccarttttgtggatgccattcatacctttacscgggagcacatgggcctgagcgtgggcatcaaacagcccataggacactatgacttctatcccaacgggggctccttccagcctggctgccacttcctagagctctacagacatattgcccagcacggcttcaatgccatcacccagaccataaaatgctcccacgagcgatcggtgcaccttttcatcgactycttgctgcacgccggcacgcagagcatggcctacccgtgtggtgacatgaacagcttcakccagggcctgtgcctgagctgcaagaagggccgctgcaacacgctgggctaccacgtccgccaggagccgcggagcaagagcaagaggctcttcctcgtaacgcgagcccagtcccccttcaaagtttatcattaccagttmaagatccagttcatcaaccaaactgagacrccaatacaaacaacttttaccatgtcactactcggaacaaaagagaaaatgcagaaaattcccatcactctgggcaaaggaattgctagtaataaaacgtattcctttcttatcaygctggatgtggatatcggcgagctgatcatgatcaagttcaagtgggaaaacagtgcagtgtgggccaatgtctgggacacggtccagaccatcatcccatggarcacagggccgcgccactcaggcctcgttctgaagacgatcagagtcaaagcaggagaaacccagcaaagaatgacattttgttcagaaaacacagatgacctactacttcgcccaacmcaggaaaaaatcttcgtgaaatgtgaaataaagtctaaaacatcaaagcgaaagatcagatgagatttaatgaagacccagtgtaaagaataaatgaatcttactccttatctggaatggctgcyttatttagaagccaaaattacataaagaatctcacacaaa

SEQ ID NO: 6584 - DNA, 1659 bp, Homo sapiens
ggtctctttggcttcagaaattaccaagaaagcctggaccccgggtgaaacggagaaatggacacaagtcccctgtgtttctccattctgttggttttatgcatctttatccaatcaagtgcccttggacaaagcctgaaaccagagccatttggaagaagagctcaagctgttgaaacaaacaaaacgctgcatgagatgaagaccagattcctgctctttggagaaaccmatcagggctgtcagattcgaatcaatcatccggacacgttacaggagtgcggcttcaactcctccctgcctctggtgatgataatccacgggtggtcggtggacggcrtgctagaaaactggatctggcagatggtggccgcgctgaagtctcagccggcccagccagtgaacgtggggctggtggactggatcaccctggcccacgaccactacaccatcgccgtccgcaacacccgccttgtgggcaaggaggtcgcggctcttctccggtggctggaggaatctgtkcaactctctcgaagccatgttcacctaattgggtacagcctgggtgcacacgtgtcaggatttgccggcagttccatcggtggaacgcacaagattgggagaatcacagggctggatgccgcgggrcctttgtttgagggaagtgcccccagcaatcgtctttctccagatgatgccarttttgtggatgccattcatacctttacscgggagcacatgggcctgagcgtgggcatcaaacagcccataggacactatgacttctatcccaacgggggctccttccagcctggctgccacttcctagagctctacagacatattgcccagcacggcttcaatgccatcacccagaccataaaatgctcccacgagcgatcggtgcaccttttcatcgactycttgctgcacgccggcacgcagagcatggcctacccgtgtggtgacatgaacagcttcakccagggcctgtgcctgagctgcaagaagggccgctgcaacacgctgggctaccacgtccgccaggagccgcggagcaagagcaagaggctcttcctcgtaacgcgagcccagtcccccttcaaagtttatcattaccagttmaagatccagttcatcaaccaaactgagacrccaatacaaacaacttttaccatgtcactactcggaacaaaagagaaaatgcagaaaattcccatcactctgggcaaaggaattgctagtaataaaacgtattcctttcttatcaygctggatgtggatatcggcgagctgatcatgatcaagttcaagtgggaaaacagtgcagtgtgggccaatgtctgggacacggtccagaccatcatcccatggarcacagggccgcgccactcaggcctcgttctgaagacgatcagagtcaaagcaggagaaacccagcaaagaatgacattttgttcagaaaacacagatgacctactacttcgcccaacmcaggaaaaaatcttcgtgaaatgtgaaataaagtctaaaacatcaaagcgaaagatcagatgagatttaatgaagacccagtgtaaagaataaatgaatcttactccttatctggaatggctgcyttatttagaagccaaaattacataaagaatctcacacaaa

SEQ ID NO: 6585 - DNA, 3446 bp, Homo sapiens
gggcgccgagtagccgggccgggccggagcgcgggcggcggcggaggcagctgcgcccgcgcctcctgccctcccaggccccgcgccccgcgcccgggccccggcgatggtgacacatgcggcggcggcgcgccagcggcaggaccatggttgagcgcgccagcaagttcgtgctggtggtggcgggcccggtgtgcttcatgctcatcttgtaccagtacgcgggcccaggactgagcctgggcgcgcccggcggcggcgcgccgcccgacgacctgkacctgttccccacrcccgaccccsactacgagaagaakyactacttcccggtccgygagctggagcgctcgctgcgcttcgacatgaagggcgacgamgtgatcgtcttcctgcacatccagaagacgggcggcaccaccttcggccgccacctcgtgcagaacgtacgcctcgaggkgccgtgygactgccggcccggccagaagaagtgcacctgctaccggcccaaccgccgcgagacttggctcttctcccgcttctccaccggctggagctgcgggctgcacgccgactggaccgagctcaccaactgcgtgcccggcgtgctggaccgccgcgactccgccgcgctgcgcacgcccaggaagttctactacatcaccctgctacgagaccccgtgtcccgctacctgagcgagtggcggcatgtgcagaggggtgccacgtggaagacgtckttgcayatgtgtgatgggcgcacgcccacgcctgaggagctgccgccctgctacgagggcacggactggtcgggctgcacgctacaggagttcatggactgyccgtacaacctggccaacaacmgccaggtgcgcatgctggccgacctgagcctggtgggctgctacaacctgtccttcatccccgagggcaagcgggcccagctgctgctcgagagcgccaagaagaacctgcggggcatggccttcttcggcctgaccgagttccagcgcaagacgcagtacctgttcgagcggacgttcaacctcaagttcatccggcccttcatgcagtacaacagcacgcgggcgggcggcgtggaggtggatgaggacaccatccggcgcatcgaggagctcaacgacctggacatgcagctgtatgactacgccaaggacctcttccagcagcgctaccagtacaagcggcagctggagcgcagggagcagcrcctgaggarccgcgaggagcgtctgctgcaccgggccaaggaggcrctgccgcgggaggaygccgacgagccgggccgcgtgcccaccgaggactacatgakccacatcattgagaagtggtagtggcggtggtggccacggggaggcctcttggggkgtgtgggggataaaacaggacagacgacaggtccacccaagactgtcaagggatgagcatcccaaacctgctccacagaggtagctgcgtcctgaaaaaaaacasagcagggatgtagtggggctgggcagggatgggggcttgagaaatcaacaggtgcagcccagtgggtcagaggaaagcgtgctcgaaggatgccatggtcagggcagggcctccagagcaggtgttgtgcctggagctgctctcctggcctccttggatttatcgcaaaaactgaaggtttgcgcaagagacgaggacagcggaaagtggacctgccaggccgggagtgtgtccctcaccaactatgcacacagcactcgctcttagctcctctgtccgggctactaggagtgagaccagcttctggcaactgccccagctccaggccatcccatagcccctcctcttctggctgcccccaatgccccgaggcctggggagcccccagctcacccatctgtagctccctcaaagtcagggcccaccccatctgaggcagagaagactygagtccagcccccaggaagcctgctcccctctctggcccatggtcctgcttcatgctttgggtcaggaggccaaagctgatgttcaggccccacccactccctacagtcctcagaccaaggaggggtttgggtagtaggcccgagctgcattgccggccttcckygggccaactggcagcccaggagtggggaggctttggccagggatgctgccacttgtgcgtgagtccgcrgctggcccttggaggtgaccatccaggcaggcctggctcagactggaagggctggggaccgagggctcccctgcctctgttctcctttctgacccactgggatttgctagcaggctgccccagccccatcaccgaaacacatactcaagagctcaaataccactgctcccaccagcgtacggattaagttcatcaggcttccatcggctggagcatgggaccatagcccctgcccaggagccgtaccctcggaccacagtggctctgtatggccaggaactgggactcgagctttcagattctcaactagccttggcaaaacagctgtaggtggcctccctgacaacagacactcagccctccccaccctggctctccttgcatttccccatgctccccaccccctggcaaaaggctggccatgctctgttcccagcagccgcgcaggtttccccactggctgcaatggccctacyaaaagccaygttgcatatccgttgtaagcacgtgccctgtgccctgtccccattccttatgccctaggaggccaagctggtgtctctaggagggcccacacrggcaccctggatcccccagagagyagattggtgtgctcaggccgcaggctgactcagagstagggcagtgggctctgcaggccacctggctggggttggtgggggtcctctctcctgccccagcttccactcagccaccacagttgccmcaccatggggtggagacgtgggtcaccacsggcttgggagcaagcgccttctgcagcacaggaagccgaagctggggtcaggtgaggtcgctacccctggaggtctggcataagggccccaccctcaggtctcctacactggccccattttacttyggggtccaaggacaggatggtcaacagggcagggtggacagcgtgccagcgccgcgcagggccacctcccwgggtggatgcatcacactaaggaagygagtgccaaggggatttagtggtgtggttctttcaaaggraggtcagggtmaatgggaatctgctcggmcactcaacatgggggtgggtgcactccttggaggaggaggaacaygttcaggggatygtgaggtcttgcacaagccacgaacagcagaactgcccmcaaaacaaggctgtgaacttttcgggaactggaactgtttaacttgaacccaggattgtttaaagctttatttatttatagcttcttyttaaaaaaaagtgttgaagaaattttttggttattcatac

SEQ ID NO: 6586 - DNA, 3166 bp, Homo sapiens
gggcgccgagtagccgggccgggccggagcgcgggcggcggcggaggcagctgcgcccgcgcctcctgccctcccaggccccgcgccccgcgcccgggccccggcgatggtgacacatgcggcggcggcgcgccagcggcaggaccatggttgagcgcgccagcaagttcgtgctggtggtggcgggcccggtgtgcttcatgctcatcttgtaccagtacgcgggcccaggactgagcctgggcgcgcccggcggcggcgcgccgcccgacgacctgkacctgttccccacrcccgaccccsactacgagaagaakyactacttcccggtccgygagctggagcgctcgctgcgcttcgacatgaagggcgacgamgtgatcgtcttcctgcacatccagaagacgggcggcaccaccttcggccgccacctcgtgcagaacgtacgcctcgaggkgccgtgygactgccggcccggccagaagaagtgcacctgctaccggcccaaccgccgcgagacttggctcttctcccgcttctccaccggctggagctgcgggctgcacgccgactggaccgagctcaccaactgcgtgcccggcgtgctggaccgccgcgactccgccgcgctgcgcacgcccaggaagttctactacatcaccctgctacgagaccccgtgtcccgctacctgagcgagtggcggcatgtgcagaggggtgccacgtggaagacgtckttgcayatgtgtgatgggcgcacgcccacgcctgaggagctgccgccctgctacgagggcacggactggtcgggctgcacgctacaggagttcatggactgyccgtacaacctggccaacaacmgccaggtgcgcatgctggccgacctgagcctggtgggctgctacaacctgtccttcatccccgagggcaagcgggcccagctgctgctcgagagcgccaagaagaacctgcggggcatggccttcttcggcctgaccgagttccagcgcaagacgcagtacctgttcgagcggacgttcaacctcaagttcatccggcccttcatgcagtacaacagcacgcgggcgggcggcgtggaggtggatgaggacaccatccggcgcatcgaggagctcaacgacctggacatgcagctgtatgactacgccaaggacctcttccagcagcgctaccagtacaagcggcagctggagcgcagggagcagcrcctgaggarccgcgaggagcgtctgctgcaccgggccaaggaggcrctgccgcgggaggaygccgacgagccgggccgcgtgcccaccgaggactacatgakccacatcattgagaagtggtagtggcggtggtggccacggggaggcctcttggggkgtgtgggggataaaacaggacagacgacaggtccacccaagactgtcaagggatgagcatcccaaacctgctccacagaggtagctgcgtcctgaaaaaaaacasagcagggatgtagtggggctgggcagggatgggggcttgagaaatcaacaggtgcagcccagtgggtcagaggaaagcgtgctcgaaggatgccatggtcagggcagggcctccagagcaggtgttgtgcctggagctgctctcctggcctccttggatttatcgcaaaaactgaaggtttgcgcaagagacgaggacagcggaaagtggacctgccaggccgggagtgtgtccctcaccaactatgcacacagcactcgctcttagctcctctgtccgggctactaggagtgagaccagcttctggcaactgccccagctccaggccatcccatagcccctcctcttctggctgcccccaatgccccgaggcctggggagcccccagctcacccatctgtagctccctcaaagtcagggcccaccccatctgaggcagagaagactygagtccagcccccaggaagcctgctcccctctctggcccattctgacccactgggatttgctagcaggctgccccagccccatcaccgaaacacatactcaagagctcaaataccactgctcccaccagcgtacggattaagttcatcaggcttccatcggctggagcatgggaccatagcccctgcccaggagccgtaccctcggaccacagtggctctgtatggccaggaactgggactcgagctttcagattctcaactagccttggcaaaacagctgtaggtggcctccctgacaacagacactcagccctccccaccctggctctccttgcatttccccatgctccccaccccctggcaaaaggctggccatgctctgttcccagcagccgcgcaggtttccccactggctgcaatggccctacyaaaagccaygttgcatatccgttgtaagcacgtgccctgtgccctgtccccattccttatgccctaggaggccaagctggtgtctctaggagggcccacacrggcaccctggatcccccagagagyagattggtgtgctcaggccgcaggctgactcagagstagggcagtgggctctgcaggccacctggctggggttggtgggggtcctctctcctgccccagcttccactcagccaccacagttgccmcaccatggggtggagacgtgggtcaccacsggcttgggagcaagcgccttctgcagcacaggaagccgaagctggggtcaggtgaggtcgctacccctggaggtctggcataagggccccaccctcaggtctcctacactggccccattttacttyggggtccaaggacaggatggtcaacagggcagggtggacagcgtgccagcgccgcgcagggccacctcccwgggtggatgcatcacactaaggaagygagtgccaaggggatttagtggtgtggttctttcaaaggraggtcagggtmaatgggaatctgctcggmcactcaacatgggggtgggtgcactccttggaggaggaggaacaygttcaggggatygtgaggtcttgcacaagccacgaacagcagaactgcccmcaaaacaaggctgtgaacttttcgggaactggaactgtttaacttgaacccaggattgtttaaagctttatttatttatagcttcttyttaaaaaaaagtgttgaagaaattttttggttattcatac

SEQ ID NO: 6587 - DNA, 3823 bp, Homo sapiens
gggcgccgagtagccgggccgggccggagcgcgggcggcggcggaggcagctgcgcccgcgcctcctgccctcccaggccccgcgccccgcgcccgggccccggcgatggtgacacatgcggcggcggcgcgccagcggcaggaccatggttgagcgcgccagcaagttcgtgctggtggtggcgggcccggtgtgcttcatgctcatcttgtaccagtacgcgggcccaggactgagcctgggcgcgcccggcggcggcgcgccgcccgacgacctgkacctgttccccacrcccgaccccsactacgagaagaakyactacttcccggtccgygagctggagcgctcgctgcgcttcgacatgaagggcgacgamgtgatcgtcttcctgcacatccagaagacgggcggcaccaccttcggccgccacctcgtgcagaacgtacgcctcgaggkgccgtgygactgccggcccggccagaagaagtgcacctgctaccggcccaaccgccgcgagacttggctcttctcccgcttctccaccggctggagctgcgggctgcacgccgactggaccgagctcaccaactgcgtgcccggcgtgctggaccgccgcgactccgccgcgctgcgcacgcccaggaagttctactacatcaccctgctacgagaccccgtgtcccgctacctgagcgagtggcggcatgtgcagaggggtgccacgtggaagacgtckttgcayatgtgtgatgggcgcacgcccacgcctgaggagctgccgccctgctacgagggcacggactggtcgggctgcacgctacaggagttcatggactgyccgtacaacctggccaacaacmgccaggtgcgcatgctggccgacctgagcctggtgggctgctacaacctgtccttcatccccgagggcaagcgggcccagctgctgctcgagagcgccaagaagaacctgcggggcatggccttcttcggcctgaccgagttccagcgcaagacgcagtacctgttcgagcggacgttcaacctcaagttcatccggcccttcatgcagtacaacagcacgcgggcgggcggcgtggaggtggatgaggacaccatccggcgcatcgaggagctcaacgacctggacatgcagctgtatgactacgccaaggacctcttccagcagcgctaccagtacaagcggcagctggagcgcagggagcagcrcctgaggarccgcgaggagcgtctgctgcaccgggccaaggaggcrctgccgcgggaggaygccgacgagccgggccgcgtgcccaccgaggactacatgakccacatcattgagaagtggtagtggcggtggtggccacggggaggcctcttggggkgtgtgggggataaaacaggacagacgacaggtccacccaagactgtcaagggatgagcatcccaaacctgctccacagaggtagctgcgtcctgaaaaaaaacasagcagggatgtagtggggctgggcagggatgggggcttgagaaatcaacaggtgcagcccagtgggtcagaggaaagcgtgctcgaaggatgccatggtcagggcagggcctccagagcaggtgttgtgcctggagctgctctcctggcctccttggatttatcgcaaaaactgaaggtttgcgcaagagacgaggacagcggaaagtggacctgccaggccgggagtgtgtccctcaccaactatgcacacagcactcgctcttagctcctctgtccgggctactaggagtgagaccagcttctggcaactgccccagctccaggccatcccatagcccctcctcttctggctgcccccaatgccccgaggcctggggagcccccagctcacccatctgtagctccctcaaagtcagggcccaccccatctgaggcagagaagactygagtccagcccccaggaagcctgctcccctctctggcccatggtcctgcttcatgctttgggtcaggaggccaaagctgatgttcaggccccacccactccctacagtcctcagaccaaggaggggtttgggtagtaggcccgagctgcattgccggccttcckygggccaactggcagcccaggagtggggaggctttggccagggatgctgccacttgtgcgtgagtccgcrgctggcccttggaggtgaccatccaggcaggcctggctcagactggaagggctggggaccgagggctcccctgcctctgttctcctttctgacccactgggatttgctagcaggctgccccagccccatcaccgaaacacatactcaagagctcaaataccactgctcccaccagcgtacggattaagttcatcaggcttccatcggctggagcatgggaccatagcccctgcccaggagccgtaccctcggaccacagtggctctgtatggccaggaactgggactcgagctttcagattctcaactagccttggcaaaacagctgtaggtggcctccctgacaacagacactcagccctccccaccctggctctccttgcatttccccatgctccccaccccctggcaaaaggctggccatgctctgttcccagcagccgcgcaggtttccccactggctgcaatggccctacyaaaagccaygttgcatatccgttgtaagcacgtgccctgtgccctgtccccattccttatgccctaggaggccaagctggtgtctctaggagggcccacacrggcaccctggatcccccagagagyagattggtgtgctcaggccgcaggctgactcagagstagggcagtgggctctgcaggccacctggctggggttggtgggggtcctctctcctgccccagcttccactcagccaccacagttgccmcaccatggggtggagacgtgggtcaccacsggcttgggagcaagcgccttctgcagcacaggaagccgaagctggggtcaggtgaggtcgctacccctggaggtctggcataagggccccaccctcaggtctcctacactggccccattttacttyggggtccaaggacaggatggtcaacagggcagggtggacagcgtgccagcgccgcgcagggccacctcccwgggtggatgcatcacactaaggaagygagtgccaaggggatttagtggtgtggttctttcaaaggraggtcagggtmaatgggaatctgctcggmcactcaacatgggggtgggtgcactccttggaggaggaggaacaygttcaggggatygtgaggtcttgcacaagccacgtggggcaccttggcttcccggcaggaggtggacacccagccagaggcctggctcaaggtgacctcaccttcaccatgggcttcctgggtgcgcgggcctgagcrcaggttgttttgtacatattggaatatgtgttaacttatgccccgcatcccaactcacacggaagcacgggtcttgtctcagtctcttcgctgcatttggaaagcagtctcctctcgggccagcgccrggctgaggtgtccagaggcggcggcagctggcagtgccctcagcccccaagtgtccagcctggcacttcccattcaggccacctgctttgggtcaacagttcctttgccagcagcatctcctaaattgtaaggactctgtccaccggggccctcccagggctgtgaggacggaaacaggcagggagtggagctaacagcttagtcaccaggacccccagacctgcaaacgtcccctcctggaaggggaagccaggaacagcagaactgcccmcaaaacaaggctgtgaac

SEQ ID NO: 6588 - DNA, 1659 bp, Homo sapiens
aaaggaggaattgtagtgctacgctaaaataatagaaaaaagttttcaaacctcagccaaccccggaagaacctttggggtattaagagtactgcagtccgaaacatagatggttctattaataacatcaatgaagatgatgaagaagatgtagtggatttggcagctaattcactcttaaacaagttaatccatcaatccttagtagaatccagtcaccgtgtggaagttttacagaaggatcccagctctccactttactcagtaaagacatttgaagagctgcggctaaaggaagagttactaaaaggaatctatgcaakgggatttaataggccatctaaaatccaagagatggctctccctatgatgctggcacatccaccccagaayctcatagcacagagccagtctggaacaggaaagacagcggcatttgtgttggcaatgttaagcagagttaatgccttggaattgttcccacagtgcctctgcctagctcctacttatgaattggctctgcaaactggccgtgtggttgagcagatgggaaaattctgtgtggatgttcaagtgatgtatgccattcgagggaatcgaattcccagaggcaccgacatcactaaacagattataattggcactcctgggactgtcctagattggtgttttaaactaaaattgattgatttgactaagattcgtgtgtttgtcctggatgaagcagatgtgatgattgacactcaaggattctcagatcatagtattcgtattcaaagagckctaccctccgaatgccaaatgctcctcttttcagcaacctttgaggactctgtgtggcactttgctgagcgaatcatccctgaccctaatgttatcaagttacgcaaagaggagctcacactgaacaacatccggcaatattacgtgctgtgtgagcacaggaaagacaaataccaagctctgtgcaacatttatggcagcatcaccattggtcaggccatcatcttctgccagactcgtcgaaacgctaagtggttgaccgtggagatgatacaggatggccaccaggtgtctttgttaagcggggagctgaccgtggagcagcgagcttccatcattcagaggtttcgggatgggaaagagaaggttctcataacaactaatgtttgygcccgagggattgatgtgaagcaggtcacaattgttgtgaactttgatctccctgtaaaacaaggagaggagccggactatgagacctacctccaccgcatagggcggacggggcgctttgggaaaaaaggccttgccttcaacatgattgaagtagatgagctgccctcgctcatgaaaatccaggaccactttaacagcagtattaagcaactcaacgctgaagacatggatgaaattgaaaagattgactattgaagaaagaactttattgtttgtgcagtatcctagtttatgtgagaatgtctcagtgggttttgaaggtaatttttttatgttgaggctttttcgacgtgaaactgtcacagatggcaaaataaatgtcacggtacttagttttaagacatgaggtctttttgaagccaaattgatgtgaagcttgtgatccttttgaataaaaaaaaggcaagattatttcttattcta

SEQ ID NO: 6589 - DNA, 1716 bp, Homo sapiens
aagcacgtgctgggggcgggagcagcaatcgcagccatggcgtcgttactgtggggaggcgacgcaggggcggcggagagcgagcggctgaacagccacttttcaaacctcagccaaccccggaagaacctttggggtattaagagtactgcagtccgaaacatagatggttctattaataacatcaatgaagatgatgaagaagatgtagtggatttggcagctaattcactcttaaacaagttaatccatcaatccttagtagaatccagtcaccgtgtggaagttttacagaaggatcccagctctccactttactcagtaaagacatttgaagagctgcggctaaaggaagagttactaaaaggaatctatgcaakgggatttaataggccatctaaaatccaagagatggctctccctatgatgctggcacatccaccccagaayctcatagcacagagccagtctggaacaggaaagacagcggcatttgtgttggcaatgttaagcagagttaatgccttggaattgttcccacagtgcctctgcctagctcctacttatgaattggctctgcaaactggccgtgtggttgagcagatgggaaaattctgtgtggatgttcaagtgatgtatgccattcgagggaatcgaattcccagaggcaccgacatcactaaacagattataattggcactcctgggactgtcctagattggtgttttaaactaaaattgattgatttgactaagattcgtgtgtttgtcctggatgaagcagatgtgatgattgacactcaaggattctcagatcatagtattcgtattcaaagagckctaccctccgaatgccaaatgctcctcttttcagcaacctttgaggactctgtgtggcactttgctgagcgaatcatccctgaccctaatgttatcaagttacgcaaagaggagctcacactgaacaacatccggcaatattacgtgctgtgtgagcacaggaaagacaaataccaagctctgtgcaacatttatggcagcatcaccattggtcaggccatcatcttctgccagactcgtcgaaacgctaagtggttgaccgtggagatgatacaggatggccaccaggtgtctttgttaagcggggagctgaccgtggagcagcgagcttccatcattcagaggtttcgggatgggaaagagaaggttctcataacaactaatgtttgygcccgagggattgatgtgaagcaggtcacaattgttgtgaactttgatctccctgtaaaacaaggagaggagccggactatgagacctacctccaccgcatagggcggacggggcgctttgggaaaaaaggccttgccttcaacatgattgaagtagatgagctgccctcgctcatgaaaatccaggaccactttaacagcagtattaagcaactcaacgctgaagacatggatgaaattgaaaagattgactattgaagaaagaactttattgtttgtgcagtatcctagtttatgtgagaatgtctcagtgggttttgaaggtaatttttttatgttgaggctttttcgacgtgaaactgtcacagatggcaaaataaatgtcacggtacttagttttaagacatgaggtctttttgaagccaaattgatgtgaagcttgtgatccttttgaataaaaaaaaggcaagattatttcttattcta

SEQ ID NO: 6590 - DNA, 2295 bp, Homo sapiens
cgcgcaggcgctggaaggctgggtggcgcgcggaaggggcggagggcagagagcggggcggggggcagagagcggggcggagggcagagagsggggcggagggcagagagcggggcgaaagggcgcggaccggagggcagagggggcagcttccgcagagtggagagcgccccccgcgccgccccgcggccmgccgctcacacagccctccaggcgggagccccccrgactccccgccgcgctttacgccccgtgtcggtttccctggaaatttccgcctccacatcacaagatgtcagaaaggcccagattctgccctgtgggcggagaaacggtagctggactagaaaacctcaggtagattctagcaccaagctcggttctcagaactacatttcccacaaacttggactacacctcccatgagggctcgggcgcctgcgcagaagacgcacagtgacagcttcctttctcggaaacgcggcgcggccggctgccggaaaacagggcagacctgtatgrttsgtttattcctggggttgtcatatcatggctkataatgacacagacagaaaccagactgagaagctcctaaaaagagtacgagaactggagcaagaggtgcaaagacttaaaaaggaacaggccaaaaataaggaggactcaaacattagagaaaattcakcaggagctggaaaaactaagcgtgcatttgatttcagtgctcatggccgaagacacgtagccctaagaatagcctatatgggctggggataccagggctttgctagtcaggaaaacacaaataataccattgaagagaaactgtttgaagctctaaccaagactcgactagtagaaagcagacagacatccaactatcaccgatgtgggagaacagataaaggagttagtgcctttggacaggtgatctcacttgaccttcgctctcagtttccaaggggcagggattccgaggactttaatgtaaaagaggaggctaatgctgctgctgaagagatccgttatacccacattctcaatcgggtactccctccagacatccgtatattggcctgggccyctgtagaaccaagcttcagtgctaggttcagctgccttgagcggacttaccgctattttttccctcgtgctgatttagatattgtaaccatggattatgcagctcagaagtatgttggcacccatgatttcaggaacttgtgtaaaatggatgtagccaacggtgtgattaattttcagaggactattctatctgctcaagtacagctagtgggccagagcccaggtgaggggagatggcaagaacctttccagttatgtcagtttgaagtgactggccaggcattcctttatcatcaagtccgatgtatgatggctatcctctttctgattggccaaggaatggagaagccagagattattgatgagctgctgaatatagagaaaaatccccaaaagcctcaatatagtatggctgtagaatttcctctagtcttatatgactgtaagtttgaaaatgtcaagtggatctatgaccaggaggctcaggagttcaatattacccacctacaacaactgtgggctaatcatgctgtcaaaactcacatgttgtatagtatgctacaaggactggacactgttccagtaccctgtggaataggaccaaagatggatggaatgacagaatggggaaatgttaagccctctgtcataaagcagaccagtgcctttgtagaaggagtgaagatgcgcacatataagcccctcatggaccgtcctaaatgccaaggactggaatcccggatccagcattttgtacgtaggggacgaattgagcacccacatttattccatgaggaagaaacaaaagccaaaagggactgtaatgacacactagaggaagasaatactaatttggagacaccaacgaagagggtctgtgttgacacagaaattaaaagcatcatttaaccatagacaatttgccaggatctaggaaccacctaatggtaggtggacagaaaaggraaaaaaaaaaaatttacttgcaagtactaggaattcagatgatcagctcttaaaagaaaaaaaaaagcaaaaagactaaagccctattaaggaagttattgctttaataagaaatttcaaatattctcttatcccggtccaaaaggattaagcgattaaagaacgtaaaatggagatgtatttacatacacctggaaacctgtgccttgtattcaaattcattaaagcctaatcctgcaagta

SEQ ID NO: 6591 - DNA, 1792 bp, Homo sapiens
acagggcagacctgtatgrttsgtttattcctggggttgtcatatcatggctkataatgacacagacagaaaccagactgagaagctcctaaaaagagtacgagaactggagcaagaggtgcaaagacttaaaaaggaacaggccaaaaataaggaggactcaaacattagagaaaattcakcaggagctggaaaaactaagcgtgcatttgatttcagtgctcatggccgaagacacgtagccctaagaatagcctatatgggctggggataccagggctttgctagtcaggaaaacacaaataataccattgaagagaaactgtttgaagctctaaccaagactcgactagtagaaagcagacagacatccaactatcaccgatgtgggagaacagataaaggagttagtgcctttggacaggtgatctcacttgaccttcgctctcagtttccaaggggcagggattccgaggactttaatgtaaaagaggaggctaatgctgctgctgaagagatccgttatacccacattctcaatcgggtactccctccagacatccgtatattggcctgggccyctgtagaaccaagcttcagtgctaggttcagctgccttgagcggacttaccgctattttttccctcgtgctgatttagatattgtaaccatggattatgcagctcagaagtatgttggcacccatgatttcaggaacttgtgtaaaatggatgtagccaacggtgtgattaattttcagaggactattctatctgctcaagtacagctagtgggccagagcccaggtgaggggagatggcaagaacctttccagttatgtcagtttgaagtgactggccaggcattcctttatcatcaagtccgatgtatgatggctatcctctttctgattggccaaggaatggagaagccagagattattgatgagctgctgaatatagagaaaaatccccaaaagcctcaatatagtatggctgtagaatttcctctagtcttatatgactgtaagtttgaaaatgtcaagtggatctatgaccaggaggctcaggagttcaatattacccacctacaacaactgtgggctaatcatgctgtcaaaactcacatgttgtatagtatgctacaaggactggacactgttccagtaccctgtggaataggaccaaagatggatggaatgacagaatggggaaatgttaagccctctgtcataaagcagaccagtgcctttgtagaaggagtgaagatgcgcacatataagcccctcatggaccgtcctaaatgccaaggactggaatcccggatccagcattttgtacgtaggggacgaattgagcacccacatttattccatgaggaagaaacaaaagccaaaagggactgtaatgacacactagaggaagasaatactaatttggagacaccaacgaagagggtctgtgttgacacagaaattaaaagcatcatttaaccatagacaatttgccaggatctaggaaccacctaatggtaggtggacagaaaaggraaaaaaaaaaaatttacttgcaagtactaggaattcagatgatcagctcttaaaagaaaaaaaaaagcaaaaagactaaagccctattaaggaagttattgctttaataagaaatttcaaatattctcttatcccggtccaaaaggattaagcgattaaagaacgtaaaatggagatgtatttacatacacctggaaacctgtgccttgtattcaaattcattaaagcctaatcctgcaagta

SEQ ID NO: 6592 - DNA, 747 bp, Homo sapiens
gccgctgccaccaggagccctgtactatcagccacggtcaaccccaccgtgttcttcaacattgccattgacagcgagcccttgggccacgtctccttcaagctgtttgcagacaagtttccaaagacagcagaaaacttttgkgctctgagcactggagagaaagcatttggttataagggttcctgctttcacagaattattccagggtttatgtattagggtggtgacttcacacaccataacagcactggtggcaagtccatctatggggagaaatttgatgatgaaaacttcatcctaaagcatacaggtcatggcatcttgtccatggcaaatgctggacccagcacaaatggttcccagtttttcatctgcactgccaagagtgagtggttggatggcaagcaagtggtctttggcaagatgaaagaaggcatgaatattgtggaggccacgtagcgctttgggtccaggaatggcaagaccagcaagaagatcaccattgctgactatggacatctctaataagtttgacttgtgttttatcttaaccaccagactattccttcagtagctcaggagagcacccctccaccccatttgctcacagtatcccagaatctttgtgctctagctgcagttccctttgggttccatgttttccttgttcccttccatgcatagctggattgcagacttgagttaagtttatgattatgaaataaaaactaaataacaattgtc

SEQ ID NO: 6593 - DNA, 1065 bp, Homo sapiens
atgttggtgacatcacacccatcatccctatccggcatcagtgccatcagctgtcctggctgtgaggagcaggccagggaggaggatgaacacgaggatcctggaggtaccaggtccatccagcccctgctcctcaggaggtcactgagagttgaaacaggaaaactgatagaaaggaaaagttccataagagtgccagacaagctgcagggaccagtcatgtttgcactcaaaattaaatccaagtactattttccagagaaagaactcaatctgcctggagaagagcgctcctataaaagccgtggcttgtcagagaggccagagcagagcctgagtaacaccagctccccagatgccgctgccaccaggagccctgtactatcagccacggtcaaccccaccgtgttcttcaacattgccattgacagcgagcccttgggccacgtctccttcaagctgtttgcagacaagtttccaaagacagcagaaaacttttgkgctctgagcactggagagaaagcatttggttataagggttcctgctttcacagaattattccaggcactggtggcaagtccatctatggggagaaatttgatgatgaaaacttcatcctaaagcatacaggtcatggcatcttgtccatggcaaatgctggacccagcacaaatggttcccagtttttcatctgcactgccaagagtgagtggttggatggcaagcaagtggtctttggcaagatgaaagaaggcatgaatattgtggaggccacgtagcgctttgggtccaggaatggcaagaccagcaagaagatcaccattgctgactatggacatctctaataagtttgacttgtgttttatcttaaccaccagactattccttcagtagctcaggagagcacccctccaccccatttgctcacagtatcccagaatctttgtgctctagctgcagttccctttgggttccatgttttccttgttcccttccatgcatagctggattgcagacttgagttaagtttatgattatgaaataaaaactaaataacaattgtc

SEQ ID NO: 6594 - DNA, 3209 bp, Homo sapiens
caagtcaaggttgcagagtgtrtgcagccaggggtagcagccacttcaggatctgggtctggatttgtgctgagaaccactatgaccttttaaagccagtgaggaggttttctgggggcccagaagccctgagcccattggccagacctcctgggagaagcggagcggatttgcatcaaaaagaacactggcttcattgaaattctcctcatcttgagagaaacaaaaccacaaagaaaaggaaagttttaattctgagaaacttcactraggagcaattttttttgagcttctaaaaatagagaggaaatgagcctctttgggtcactctagttgccgcctcccctgccccatgcccacccccactgctcactcaaggctagcctctctcagtgggtgactgagctgtcttcagtggargcccgaggcagatgccacgcaattctggagctggatacggctgcccacacggggaccccagcatgctggacagcagagagaccccacaggagagccggcaggacatgattgtgaggaccacccaagaaaaattgaaaaccagctcactgactgacaggcagccactctccaaagagtccctgaaccatgctctcgagctctcagtgccagagaaggtgaataatgcccagtgggatgctccagaggaggcgctgtggacgactcgggccgatgggcgggtgcgcctgcgcatagaccccagctgcccacagcttccctacactgtgcatcggatgttctacgaggccctggataagtatggggacctcatcgctttgggcttcaagcgccaggacaagtgggaacacatctcctactcccaatactacctgctcgcccgcagagccgccaagggcttcctgaagctcggcctgaagcaggcccacagtgtggccatcctcggcttcaactccccggagtggttcttctcggcagtgggcacagtatttgcaggtggcatcgtcactggcatctacaccaccagctccccagaggcctgccagtacatcgcttatgactgctgcgccaatgtcatcatggtcgacacgcagaagcagctggaaaagatcctgaagatctggaaacagttgccacatctaaaggcagtcgtgatatataaagaacctcctccaaacaagatggccaatgtgtacacgatggaggaattcatggagctggggaatgaagtgcctgaggaagccctggacgccatcattgacacccagcagcccaaccagtgctgtgtgctagtctacacttccggcaccactgggaaccccaagggcgtgatgctgagtcaagacaatatcacgtggacrgcacggtacggcagccaggccggtgacatccggccggcagaagtccagcaggaggtggtagtcagctacctgcccctcagccatattgccgcccagatctacgacctgtggacaggcatccagtggggggcccaggtttgctttgccgaacccgacgccctgaaggggagcctggtgaacacgctgcgggaggtggagcccacatcacacatgggggtgccccgggtatgggagaagatcatggagcgcatccaggaggtggcggctcagtctggcttcatccggcgaaagatgctgctgtgggccatgtcggtgaccttggagcagaacctcacctgccccggcagcgacctgaagcccttcacaaccagactggcagattacctggtgctagccaaggttcgccaggcactgggatttgccaagtgtcaaaagaacttctatggagcggcccccatgatggcagagacacagcacttcttcctgggtctcaacatccgcttgtatgcgggctayggcctcagtgagacctcaggcccccacttcatgtccagtccctacaactaccggctgtacagctcaggcaagttggtgcccggctgtcgggtgaagctggtgaaccaggacgcagagggcattggygagatctgcctgtggggccgcaccatattcatgggctacctgaacatggaggacaagacttgtgaggccatcgacraggaaggctggctgcacacgggtgatgctggccgcctggacgccgatggcttcctctacatcactgggcgcctcaaagaattaatcatcacagctggtggggagaatgtgccccctgtgcccatcgaggaggccgtgaagatggagctgcccatcatcagcaaygccatgctcattggggaccagaggaagttcctgtccatgctgctcaccttgaagtgcactctggacccagacacctctgaccagactgataatctgactgaacaagctrtggagttctgccagagggtgggcagcagagccaccacagtgtccgagatcatagagaagaaggatgaggccgtgtaccaggccatcgaagaggggatccggagggtcaacatgaacgcggyggcccggccctaccacatccagaagtgggccattctcgagagagacttctccatttcgggtggagagttgggtcccacgatgaaactgaaacggctcacagttttggagaagtacaaaggtatcattgactccttttaccaagagcaaaaaatgtaatcagggcctatgcctgcagtttctatagaatagagggcaggcgttccgagcctcttcctgagccccaggtctcttcagtctgggcacaggcatttctgccaagtctgttagatctccaggtcagggcacagcactggctctacatttaccaggtcttacgccaacaatagctgacaattccaagaagcttcacgtgtgggtagttttaattcagtttaagtattgctttttgttcaggtgacaaatgagatcagctctccttccagaacgaaagggctgataatttttggccttagttcyaggtagattaaaaagctgctagctcacatacaggacagccagcagtaggctgtggagcgggtaggagagagatggctgatactgctcacgtgcgctgcaggaaaagcaatcagtcasaactcacctagcgacctgacttactctggaatcttggcgggcatcgccgaccctattattccattaccaggcactccgccacccacatgccaactgacttgatgcttaataaaactgctgctgcctgtttgattctatttaatgtataatttgaatattaaaccttttaacagaactgtcaacaag

SEQ ID NO: 6595 - DNA, 1427 bp, Homo sapiens
ctgggaatatgattatgcttaatctatgctcagtygaaaggggctggggctgctttctcccctcccttcttgactctctgttcacagaactcaggctgcctccagccagcctttgcccgctagactcactggccctgagcacttgaaggtgcagcaagtcactgagaatgagcactttcttctcggacacagcatggatctgcctggctgtccccacagtactatgtgggacagtattttgcaaatacaagaagagctcagggcagctgtggagctggatggtctgcctggcaggcctctgtgcagtctgcctgctcatcctgtcccctttttggggcttgatcctcttctcggtgtcatgcttcctcatgtatacttacttatctggccaagaattgttacctgtggatcagaaggcagtcctggtgacaggtggtgattgcgggcttggccatgctttgtgcaagtatctggatgagctgggyttcacggtatttgccggagttttgaatgaaaatggcccaggagctgaggaattgcgaagaacctgctctccrcgcctctcggtgctccaaatggacatcacgaagccagtgcagataaaagatgcttacagcaaggttgcagcaatgctgcaggacagaggactgtgggctgtgatcaacaatgctggggtgcttggctttccaactgatggggagcttcttcttatgactgactacaaacaatgcatggccgtgaacttctttggaactgtggaggtcacaaagacgtttttgcctcttcttagaaaatccaaagggaggctggtgaatgtcagcagcatgggaggaggggccccaatggaaaggctggcatcttatggctcatcaaaggcggctgtgaccatgttctcatcagttatgagactggagctttccaagtggggaattaaagttgcttccatccaacctggaggcttcctaacaaatatcgcaggcaccagtgacaagtgggaaaagctggagaaggacattctggaccacctccccgctgaggtacaggaagactacggccaggactacatcttagcacagcggaatttcctcctattgatcaactcgttagccagcaaggacttctctccggtgctgcgggacatccagcatgcyatcttggcgaagagcccttttgcctattacacgccagggaaaggcgcttacttgtggatctgccttgctcactatttgcctattggcatatatgattactttgctaaaagacattttggccaagacaagcccatgcccagagctctaagaatgcctaactacaagaaaaaggccacctaggcaatggaagccctcaaagaagtcggaatgtcatagtcttgaaatgaaagggaaactgggaaactgggtttctcattaaagttgtttcccactctg

SEQ ID NO: 6596 - DNA, 2131 bp, Homo sapiens
gcgtgagcggcgctgagtgacccgagtcgggacgcgggctgcgcgcgcgggaccccggagcccaaacccggggcaggcgggcagctgtgcccgggcggcacggccagcttcctgatttctcccgattccttccttctccctggagcggccgacaatgtccaccacggtcaatgtagattcccttgcggaatatgagaagagccagatcaagagagccctggagctggggacggtgatgactgtgttcagcttccgcaagtccacccccgagcggagaaccgtccaggtgatcatggagacgcggcaggtggcctggagcaagaccgcygacaagatcgagggcttcttggatatcatggaaataaaagaaatccgcccagggaagaactccaaagatttcgagcgagcaaaagcagttcgccagaaagaagactgctgcttcaccatcctrtatggcactcagttcgtcctcagcacgctcagcttggcagctgactctaaagaggatgcagttaactggctctctggcttgaaaatcttacaccaggaagcgatgaatgcgtccacgcccaccattatcgagagttggctgagaaagcagatatattctgtggatcaaaccagaagaaacagcatcagtctccgagagttgaagaccatcttgcccctgatcaactttaaagtgagcagtgccaagttccttaaagataagtttgtggaaataggagcacacaaagatgagctcagctttgaacagttccatctcttctataaaaaacttatgtttgaacagcaaaaatcgattctcgatgaattcaaaaaggattcgtccgtgttcatcctggggaacactgacaggccggatgcctctgctgtttacctgcatgacttccagaggtttctcatacatgaacagcaggagcattgggctcaggatctgaacaaagtccgtgagcggatgacaaagttcattgatgacaccatgcgtgaaactgctgagcctttcttgtttgtggatgagttcctcacgtacctgttttcacgagaaaacagcatctgggatgagaagtatgacgcggtggacatgcaggacatgaacaaccccctgtctcattactggatctcctcgtcacataacacgtaccttacaggtgaccagctgcggagcgagtcgtccccagaagcttacatccgctgcctgcgcatgggctgtcgctgcattgaactggactgctgggacgggcccgatgggaagccggtcatctaccatggctggacgcggactaccaagatcaagtttgacgacgtcgtgcaggccatcaaagaccacgcctttgttacctcgagatgtcccttgagctgggtggaggtgttgctgtgagacaatgaaattatggacgtcttttcgcacttggtgaaaacctttcaatgaaggcatatgatttctccatcgcagcattctcccctgtggggtcctagcccttctaagtgccaacctccatcaggcagatggaaggagctggtattaacagacactgtgcagtggcagcttacactctgctttgagagtttgctttcatttgcaggacataggtgcttatggttgtgagctgacagtcattcatcgaacattatctcattcatgactagaggaagttttttctggttaaaatagggctggaatcatctaacacctatagggctagaactctgtaatcaaacattaatgcattaatgttttggcagcaaaagccatccttattggtattaagagggatttaagaaaatgattgcaagcagcgttcattcgaatggttcagattttgctctcagttacattttgataccaacttactaggtagcctttgttgtaaaagctttttagctgttatgttctagtaagggtgtgtggatcaggatcggggagtgagctgggtccacgcttcccaggagtgatgaggctatgatttacttgagctggaacatggttaaggattttatttttatcatcgtcactttattttcacatttrccttcatttctattgagtgaygtgatttcctatttatggaagtgacatagctgcctttagaataattttgtttcatagtaaatgccatgcacaagcctc

SEQ ID NO: 6597 - DNA, 4668 bp, Homo sapiens
tccctccaggggcccaagagccactggtactcagtgtctgggtgggggcaggggggatttttgttctcccagcacctgcggctgttgagaccagagaagctggtggtcgaccacagcctggggtattagttcacccctagcttctccccagcgagaccccagggcccttgggcacaggggattaagcctctatctgcttacgtgcaagcggaagaaataggcccagagagcaacagtggcgggtctgcagtcacacagccaacttgcgcttgtggcagtggcaaggttgaagttctgagggtacccctcactcaagctccaggcgtcaggaaaagaacattccacgaagtccatctggaagacggtcctttccctgctgcccccagcttcctgatttctcccgattccttccttctccctggagcggccgacaatgtccaccacggtcaatgtagattcccttgcggaatatgagaagagccagatcaagagagccctggagctggggacggtgatgactgtgttcagcttccgcaagtccacccccgagcggagaaccgtccaggtgatcatggagacgcggcaggtggcctggagcaagaccgcygacaagatcgagggcttcttggatatcatggaaataaaagaaatccgcccagggaagaactccaaagatttcgagcgagcaaaagcagttcgccagaaagaagactgctgcttcaccatcctrtatggcactcagttcgtcctcagcacgctcagcttggcagctgactctaaagaggatgcagttaactggctctctggcttgaaaatcttacaccaggaagcgatgaatgcgtccacgcccaccattatcgagagttggctgagaaagcagatatattctgtggatcaaaccagaagaaacagcatcagtctccgagagttgaagaccatcttgcccctgatcaactttaaagtgagcagtgccaagttccttaaagataagtttgtggaaataggagcacacaaagatgagctcagctttgaacagttccatctcttctataaaaaacttatgtttgaacagcaaaaatcgattctcgatgaattcaaaaaggattcgtccgtgttcatcctggggaacactgacaggccggatgcctctgctgtttacctgcatgacttccagaggtttctcatacatgaacagcaggagcattgggctcaggatctgaacaaagtccgtgagcggatgacaaagttcattgatgacaccatgcgtgaaactgctgagcctttcttgtttgtggatgagttcctcacgtacctgttttcacgagaaaacagcatctgggatgagaagtatgacgcggtggacatgcaggacatgaacaaccccctgtctcattactggatctcctcgtcacataacacgtaccttacaggtgaccagctgcggagcgagtcgtccccagaagcttacatccgctgcctgcgcatgggctgtcgctgcattgaactggactgctgggacgggcccgatgggaagccggtcatctaccatggctggacgcggactaccaagatcaagtttgacgacgtcgtgcaggccatcaaagaccacgcctttgttacctcgagcttcccagtgatcctgtccatcgaggagcactgcagcgtggagcaacagcgtcacatggccaaggccttcaaggaagtatttggcgacctgctgttgacgaagcccacggaggccagtgctgaccagctgccctcgcccagccagctgcgggagaagatcatcatcaagcataagaagctgggcccccsaggcgatgtggatgtcaacatggaggacaagaaggacgaacacaagcaacagggggagctgtacatgtgggattccattgaccagaaatggactcggcactactgcgccattgcygatgccaagctgtccttcagtgatgacattgaacagactatggaggaggaagtgccccaggatataccccctacagaactacattttggggagaaatggttccacaagaaggtggagaagaggacgagtgccgagaagttgctgcaggaatactgcatggagacggggggcaaggatggcaccttcctggttcgggagagcgagaccttccccaatgactacaccctgtccttctggcggtcaggccgggtccagcactgccggatccgctccaccatggagggcgggaccctgaaatactacttgactgacaacctcaccttcagcagcatctatgccctcatccagcactaccgcgagacgcacctgcgctgcgccgagttcgagctgcggctcacggaccctgtgcccaaccccaacccccacgagtccaagccgtggtactatgacagcctgagccgcggagaggcagaggacatgctgatgaggattccccgggacggggccttcctgatccggaagcgagaggggagcgactcctatgccatcaccttcagggctaggggcaaggtaaagcattgtcgcatcaaccgggacggccggcactttgtgctggggacctccgcctattttgagagtctggtggagctcgtcagttactacgagaagcattcactctaccgaaagatgagactgcgctaccccgtgacccccgagctcctggagcgctacaatatggaaagagatataaactccctctacgacgtcagcagaatgtatgtggatcccagtgaaatcaatccgtccatgcctcagagaaccgtgaaagctctgtatgactacaaagccaagcgaagcgatgagctgagcttctgccgtggtgccctcatccacaatgtctccaaggagcccgggggctggtggaaaggagactatggaaccaggatccagcagtacttcccatccaactacgtcgaggacatctcaactgcagacttcgaggagctagaaaagcagattattgaagacaatcccttagggtctctttgcagaggaatattggacctcaatacctataacgtcgtgaaagcccctcagggaaaaaaccagaagtcctttgtcttcatcctggagcccaagsagcagggcgatcctccggtggagtttgccacagacagggtggaggagctctttgagtggtttcagagcatccgagagatcacctggaagattgacaccaaggagaacaacatgaagtactgggagaagaaccagtccatcgccatcgagctctctgacctggttgtctactgcaaaccaaccagcaaaaccaaggacaacttagaaaatcctgacttccgagaaatccgctcctttgtggagacgaaggctgacagcatcatcagacagaagcccgtcgacctcctgaagtacaatcaaaagggcctgacccgcgtctacccaaagggacaaagagttgactcttcaaactacgaccccttccgcctctggctgtgcggttctcagatggtggcactcaatttccagacggcagataagtacatgcagatgaatcacgcattgttttctctcaaygggcgcacgggctacgttctgcagcctgagagcatgaggacagagaaatatgacccgatgccacccgagtcccagaggaagatcctgatgacgctgacagtcaaggttctcggtgctcgccatctccccaaacttggacgaagtattgcctgtccctttgtagaagtggagatctgtggagccgagtatgacaacaacaagttcaagacgacggttgtgaatgataatggcctcagccctatctgggctccaacacaggagaaggtgacatttgaaatttatgacccaaacctggcatttctgcgctttgtggtttatgaagaagatatgttcagcgatcccaactttcttgctcatgccacttaccccattaaagcagtcaaatcaggattcaggtccgttcctctgaagaatgggtacagcgaggacatagagctggcttccctcctggttttctgtgagatgcggccagtcctggagagcgaagaggaactttactcctcctgtcgccagctgaggaggcggcaagaagaactgaacaaccagctctttctgtatgacacacaccagaacttgcgcaatgccaaccgggatgccctggttaaagagttcagtgttaatgagaaccagctccagctgtaccaggagaaatgcaacaagaggttaagagagaagagagtcagcaacagcaagttttactcatagaagctggggtatgtgtgtaagggtattgtgtgtgtgcgcatgtgtgtttgcatgtaggagaacgtgccctattcacactctgggaagacgctaatctgtgacatcttttyttcaagcctgccatcaaggacatttcttaagacccaactggcatgagttggggtaatttcctattattttcatcttggacaactttcttaacttatattctttatagaggattccccaaaatgtgctcctcatttttggcctctcatgttscaaacctcattgaataaaagcaatgaaaaccttgatcaattaagccttctgttgcacgacctgtgcagtgaacaggatttcttttctggccaagaagattctacctctaatgatccaggtaactgatgtccatggaggatgagctggaaatgtaagaaactattcatgagattctg

SEQ ID NO: 6598 - DNA, 4389 bp, Homo sapiens
gcgtgagcggcgctgagtgacccgagtcgggacgcgggctgcgcgcgcgggaccccggagcccaaacccggggcaggcgggcagctgtgcccgggcggcacggccagcttcctgatttctcccgattccttccttctccctggagcggccgacaatgtccaccacggtcaatgtagattcccttgcggaatatgagaagagccagatcaagagagccctggagctggggacggtgatgactgtgttcagcttccgcaagtccacccccgagcggagaaccgtccaggtgatcatggagacgcggcaggtggcctggagcaagaccgcygacaagatcgagggcttcttggatatcatggaaataaaagaaatccgcccagggaagaactccaaagatttcgagcgagcaaaagcagttcgccagaaagaagactgctgcttcaccatcctrtatggcactcagttcgtcctcagcacgctcagcttggcagctgactctaaagaggatgcagttaactggctctctggcttgaaaatcttacaccaggaagcgatgaatgcgtccacgcccaccattatcgagagttggctgagaaagcagatatattctgtggatcaaaccagaagaaacagcatcagtctccgagagttgaagaccatcttgcccctgatcaactttaaagtgagcagtgccaagttccttaaagataagtttgtggaaataggagcacacaaagatgagctcagctttgaacagttccatctcttctataaaaaacttatgtttgaacagcaaaaatcgattctcgatgaattcaaaaaggattcgtccgtgttcatcctggggaacactgacaggccggatgcctctgctgtttacctgcatgacttccagaggtttctcatacatgaacagcaggagcattgggctcaggatctgaacaaagtccgtgagcggatgacaaagttcattgatgacaccatgcgtgaaactgctgagcctttcttgtttgtggatgagttcctcacgtacctgttttcacgagaaaacagcatctgggatgagaagtatgacgcggtggacatgcaggacatgaacaaccccctgtctcattactggatctcctcgtcacataacacgtaccttacaggtgaccagctgcggagcgagtcgtccccagaagcttacatccgctgcctgcgcatgggctgtcgctgcattgaactggactgctgggacgggcccgatgggaagccggtcatctaccatggctggacgcggactaccaagatcaagtttgacgacgtcgtgcaggccatcaaagaccacgcctttgttacctcgagcttcccagtgatcctgtccatcgaggagcactgcagcgtggagcaacagcgtcacatggccaaggccttcaaggaagtatttggcgacctgctgttgacgaagcccacggaggccagtgctgaccagctgccctcgcccagccagctgcgggagaagatcatcatcaagcataagaagctgggcccccsaggcgatgtggatgtcaacatggaggacaagaaggacgaacacaagcaacagggggagctgtacatgtgggattccattgaccagaaatggactcggcactactgcgccattgcygatgccaagctgtccttcagtgatgacattgaacagactatggaggaggaagtgccccaggatataccccctacagaactacattttggggagaaatggttccacaagaaggtggagaagaggacgagtgccgagaagttgctgcaggaatactgcatggagacggggggcaaggatggcaccttcctggttcgggagagcgagaccttccccaatgactacaccctgtccttctggcggtcaggccgggtccagcactgccggatccgctccaccatggagggcgggaccctgaaatactacttgactgacaacctcaccttcagcagcatctatgccctcatccagcactaccgcgagacgcacctgcgctgcgccgagttcgagctgcggctcacggaccctgtgcccaaccccaacccccacgagtccaagccgtggtactatgacagcctgagccgcggagaggcagaggacatgctgatgaggattccccgggacggggccttcctgatccggaagcgagaggggagcgactcctatgccatcaccttcagggctaggggcaaggtaaagcattgtcgcatcaaccgggacggccggcactttgtgctggggacctccgcctattttgagagtctggtggagctcgtcagttactacgagaagcattcactctaccgaaagatgagactgcgctaccccgtgacccccgagctcctggagcgctacaatatggaaagagatataaactccctctacgacgtcagcagaatgtatgtggatcccagtgaaatcaatccgtccatgcctcagagaaccgtgaaagctctgtatgactacaaagccaagcgaagcgatgagctgagcttctgccgtggtgccctcatccacaatgtctccaaggagcccgggggctggtggaaaggagactatggaaccaggatccagcagtacttcccatccaactacgtcgaggacatctcaactgcagacttcgaggagctagaaaagcagattattgaagacaatcccttagggtctctttgcagaggaatattggacctcaatacctataacgtcgtgaaagcccctcagggaaaaaaccagaagtcctttgtcttcatcctggagcccaagsagcagggcgatcctccggtggagtttgccacagacagggtggaggagctctttgagtggtttcagagcatccgagagatcacctggaagattgacaccaaggagaacaacatgaagtactgggagaagaaccagtccatcgccatcgagctctctgacctggttgtctactgcaaaccaaccagcaaaaccaaggacaacttagaaaatcctgacttccgagaaatccgctcctttgtggagacgaaggctgacagcatcatcagacagaagcccgtcgacctcctgaagtacaatcaaaagggcctgacccgcgtctacccaaagggacaaagagttgactcttcaaactacgaccccttccgcctctggctgtgcggttctcagatggtggcactcaatttccagacggcagataagtacatgcagatgaatcacgcattgttttctctcaaygggcgcacgggctacgttctgcagcctgagagcatgaggacagagaaatatgacccgatgccacccgagtcccagaggaagatcctgatgacgctgacagtcaaggttctcggtgctcgccatctccccaaacttggacgaagtattgcctgtccctttgtagaagtggagatctgtggagccgagtatgacaacaacaagttcaagacgacggttgtgaatgataatggcctcagccctatctgggctccaacacaggagaaggtgacatttgaaatttatgacccaaacctggcatttctgcgctttgtggtttatgaagaagatatgttcagcgatcccaactttcttgctcatgccacttaccccattaaagcagtcaaatcaggattcaggtccgttcctctgaagaatgggtacagcgaggacatagagctggcttccctcctggttttctgtgagatgcggccagtcctggagagcgaagaggaactttactcctcctgtcgccagctgaggaggcggcaagaagaactgaacaaccagctctttctgtatgacacacaccagaacttgcgcaatgccaaccgggatgccctggttaaagagttcagtgttaatgagaaccagctccagctgtaccaggagaaatgcaacaagaggttaagagagaagagagtcagcaacagcaagttttactcatagaagctggggtatgtgtgtaagggtattgtgtgtgtgcgcatgtgtgtttgcatgtaggagaacgtgccctattcacactctgggaagacgctaatctgtgacatcttttyttcaagcctgccatcaaggacatttcttaagacccaactggcatgagttggggtaatttcctattattttcatcttggacaactttcttaacttatattctttatagaggattccccaaaatgtgctcctcatttttggcctctcatgttscaaacctcattgaataaaagcaatgaaaaccttgatcaattaagccttctgttgcacgacctgtgcagtgaacaggatttcttttctggccaagaagattctacctctaatgatccaggtaactgatgtccatggaggatgagctggaaatgtaagaaactattcatgagattctg

SEQ ID NO: 6599 - DNA, 2446 bp, Homo sapiens
cgcgcagtcgcgcgcgggtcgtgccgtaccaccgtcgcgggcaggctcggccacgagcgccagagccccgcgcctcccctcgcggcctgtcccaagtccctgccccgcaacagagcgtcacttccgccatccccggcagcggttggggcggggcgcacgggggagggggccaggtcggagggaagcccgcccgtgcccgagcccgcgcccgagcagggactacatttcccgaggggcctcggcggcggctgcggcgacgggcgcggcaacgtcccccggaagtggagcccgggacttccactcgtgcgtgaggcgagaggagccggagacgagaccagaggccgaactcgggttctgacaagatggccgggctgccccgcaggatcatcaaggaaacccagcgtttgctggcagaaccagttcctggcatcaaagccgaaccagatgagagcaacgcccgttattttcatgtggtcattgctggccctcaggattccccctttgagggagggacttttaaacttgaactattccttccagaagaatacccaatggcagcccctaaagtacgtttcatgaccaaaatttatcatcctaatgtagacaagttgggaagaatatgtttagatattttgaaagataagtggtccccagcactgcagatccgcacagttctgctatcgatccaggccttgttaagtgctcccaatccagatgatccattagcaaatgatgtagcggagcagtggaagaccaacgaagcccaagccatagaaacagctagagcatggactaggctatatgccatgaataatatttaaattgatacgatcatcaagtgtgcatcacttctcctgttctgccaagacttcctcctctttgtttgcatttaatggacacagtcttagaaacattacagaataaaaaagcccagacatcttcagtcctttggtgattaaatgcacattagcaaatctatgtcttgtcctgattcactgtcataaagcatgagcagaggctagaagtatcatctggattgttgtgaaacgtttaaaagcagtggcccctccctgcttttattcatttcccccatcctggtttaagtataaagcactgtgaatgaaggtagttgtcaggttagctgcaggggtgtgggtgtttttattttattttattttattttatgggctcctttcccccttttttggtgatctaattgcattggttaaaagcagctaaccaggtctttagaatatgctytagccaagtctaactttatttagacgctgtagatggacaagcttgattgttggaaccaaaatgggaacattaaacaaacatcacagccctcactaataacattgctgtcaagtgtagattccccccttcaaaaaaagcttgtgaccattttgwatggcttgtctggaaacttctgtaaawcttatgttttartaaaatwttttttgttattctactttgcctttgtacagtttattttactgtgtttatttcattttcccaatttgacaatcgtattttaaaattgaaactgatggaacattctttcttggtcttcaccatctgacaaattgaatggcaagaggtggattttgccagtttcttttcactgatgcagatttgtgttaagatagtactgaatggagtatttataaactggccctgagcatgcataaagcatcagtatctgacctttttttaaccttctaggaatttgaaataaatgtgtttgtgttgtctgattagatgatcattggtgtcttgccacaatgtttaaaaattactgtacaggaaagtcacagcaaagatagcagttgtgactgacatgtaggactttcacagttgtgccacatttttgcctaaaatttgggttatgacatttttcttggttcttatctgaaaatttcatctgtaacctttcatgtgtgttaagaaacactgatctgatcatttgggatttgctgaggcatttgtgagtcttccttataaacctgatgagcagatctcaactatctagcttgtgtgtcatcagaaaggtttatccctttgagagtatcaagtcctcagttaatgattcttgctttcatccctccactcgttttattctttaatttggaattcagtaatttttcttctttattgacgaattcctcccctcacaaaactgttctttcccacctctctccatatctaattcctgattcttgttatttttaagtcataaatgtagccagtcataaatacataaatgttaaccttcgggttgcaaccttgtctcttgcagtttaaggtaatggatattgtagcccatttgaattttcttcactcttattctcgtaattctggagtttcttcagattgtggtgtattttattgtgctcctatgtaagatgaagaattaactattaaaattacattttcaacatac

SEQ ID NO: 6600 - DNA, 2489 bp, Homo sapiens
cgcgcagtcgcgcgcgggtcgtgccgtaccaccgtcgcgggcaggctcggccacgagcgccagagccccgcgcctcccctcgcggcctgtcccaagtccctgccccgcaacagagcgtcacttccgccatccccggcagcggttggggcggggcgcacgggggagggggccaggtcggagggaagcccgcccgtgcccgagcccgcgcccgagcagggactacatttcccgaggggcctcggcggcggctgcggcgacgggcgcggcaacgtcccccggaagtggagcccgggacttccactcgtgcgtgaggcgagaggagccggagacgagaccagaggccgaactcgggttctgacaagatggccgggctgccccgcaggatcatcaaggaaacccagcgtttgctggcagaaccagttcctggcatcaaagccgaaccagatgagagcaacgcccgttattttcatgtggtcattgctggccctcaggattccccctttgagggagggacttttaaacttgaactattccttccagaagaatacccaatggcagcccctaaagtacgtttcatgaccaaaatttatcatcctaatgtagacaagttgggaagaatatgtttagatattttgaaagataagtggtccccagcactgcagatccgcacagttctgctatcgatccaggccttgttaagtgctcccaatccagatgatccattagcaaatgatgtagcggagcagtggaagaccaacgaagcccaagccatagaaacagctagagcatggactaggctatatgccatgaataatatttaaattgatacgatcatcaagtgtgcatcacttctcctgttctgccaagacttcctcctctttgtttgcatttaatggacacagtcttagaaacattacagaataaaaaagcccagacatcttcagtcctttggtgattaaatgcacattagcaaatctatgtcttgtcctgattcactgtcataaagcatgagcagaggctagaagtatcatctggattgttgtgaaacgtttaaaagcagtggcccctccctgcttttattcatttcccccatcctggtttaagtataaagcactgtgaatgaaggtagttgtcaggttagctgcaggggtgtgggtgtttttattttattttattttattttatttttgaggggggaggtagtttaattttatgggctcctttcccccttttttggtgatctaattgcattggttaaaagcagctaaccaggtctttagaatatgctytagccaagtctaactttatttagacgctgtagatggacaagcttgattgttggaaccaaaatgggaacattaaacaaacatcacagccctcactaataacattgctgtcaagtgtagattccccccttcaaaaaaagcttgtgaccattttgwatggcttgtctggaaacttctgtaaawcttatgttttartaaaatwttttttgttattctactttgcctttgtacagtttattttactgtgtttatttcattttcccaatttgacaatcgtattttaaaattgaaactgatggaacattctttcttggtcttcaccatctgacaaattgaatggcaagaggtggattttgccagtttcttttcactgatgcagatttgtgttaagatagtactgaatggagtatttataaactggccctgagcatgcataaagcatcagtatctgacctttttttaaccttctaggaatttgaaataaatgtgtttgtgttgtctgattagatgatcattggtgtcttgccacaatgtttaaaaattactgtacaggaaagtcacagcaaagatagcagttgtgactgacatgtaggactttcacagttgtgccacatttttgcctaaaatttgggttatgacatttttcttggttcttatctgaaaatttcatctgtaacctttcatgtgtgttaagaaacactgatctgatcatttgggatttgctgaggcatttgtgagtcttccttataaacctgatgagcagatctcaactatctagcttgtgtgtcatcagaaaggtttatccctttgagagtatcaagtcctcagttaatgattcttgctttcatccctccagtatttgctgtgggagctcgttttattctttaatttggaattcagtaatttttcttctttattgacgaattcctcccctcacaaaactgttctttcccacctctctccatatctaattcctgattcttgttatttttaagtcataaatgtagccagtcataaatacataaatgttaaccttcgggttgcaaccttgtctcttgcagtttaaggtaatggatattgtagcccatttgaattttcttcactcttattctcgtaattctggagtttcttcagattgtggtgtattttattgtgctcctatgtaagatgaagaattaactattaaaattacattttcaacat

SEQ ID NO: 6601 - DNA, 2416 bp, Homo sapiens
cgcgcagtcgcgcgcgggtcgtgccgtaccaccgtcgcgggcaggctcggccacgagcgccagagccccgcgcctcccctcgcggcctgtcccaagtccctgccccgcaacagagcgtcacttccgccatccccggcagcggttggggcggggcgcacgggggagggggccaggtcggagggaagcccgcccgtgcccgagcccgcgcccgagcagggactacatttcccgaggggcctcggcggcggctgcggcgacgggcgcggcaacgtcccccggaagtggagcccgggacttccactcgtgcgtgaggcgagaggagccggagacgagaccagaggccgaactcgggttctgacaagatggccgggctgccccgcaggatcatcaaggaaacccagcgtttgctggcagaaccagttcctggcatcaaagccgaaccagatgagagcaacgcccgttattttcatgtggtcattgctggccctcaggattccccctttgagggagggacttttaaacttgaactattccttccagaagaatacccaatggcagcccctaaagtacgtttcatgaccaaaatttatcatcctaatgtagacaagttgggaagaatatgtttagatattttgaaagataagtggtccccagcactgcagatccgcacagttctgctatcgatccaggccttgttaagtgctcccaatccagatgatccattagcaaatgatgtagcggagcagtggaagaccaacgaagcccaagccatagaaacagctagagcatggactaggctatatgccatgaataatatttaaattgatacgatcatcaagtgtgcatcacttctcctgttctgccaagacttcctcctctttgtttgcatttaatggacacagtcttagaaacattacagaataaaaaagcccagacatcttcagtcctttggtgattaaatgcacattagcaaatctatgtcttgtcctgattcactgtcataaagcatgagcagaggctagaagtatcatctggattgttgtgaaacgtttaaaagcagtggcccctccctgcttttattcatttcccccatcctggtttaagtataaagcactgtgaatgaaggtagttgtcaggttagctgcaggggtgtgggtgtttttattttattttattttattttatttttgaggggggaggtagtttaattttatgggctcctttcccccttttttggtgatctaattgcattggttaaaagcagctaaccaggtctttagaatatgctytagccaagtctaactttatttagacgctgtagatggacaagcttgattgttggaaccaaaatgggaacattaaacaaacatcacagccctcactaataacattgctgtcaagtgtagattccccccttcaaaaaaagcttgtgaccattttgwatggcttgtctggaaacttctgtaaawcttatgttttartaaaatwttttttgttattctactttgcctttgtacagtttattttactgtgtttatttcattttcccaatttgacaatcgtattttaaaattgaaactgatggaacattctttcttggtcttcaccatctgacaaattgaatggcaagaggtggattttgccagtttcttttcactgatgcagatttgtgttaagatagtactgaatggagtatttataaactggccctgagcatgcataaagcatcagtatctgacctttttttaaccttctaggaatttgaaataaatgtgtttgtgttgtctgattagatgatcattggtgtcttgccacaatgtttaaaaattactgtacaggaaagtcacagcaaagatagcagttgtgactgacatgtaggactttcacagttgtgccacattaacctttcatgtgtgttaagaaacactgatctgatcatttgggatttgctgaggcatttgtgagtcttccttataaacctgatgagcagatctcaactatctagcttgtgtgtcatcagaaaggtttatccctttgagagtatcaagtcctcagttaatgattcttgctttcatccctccactcgttttattctttaatttggaattcagtaatttttcttctttattgacgaattcctcccctcacaaaactgttctttcccacctctctccatatctaattcctgattcttgttatttttaagtcataaatgtagccagtcataaatacataaatgttaaccttcgggttgcaaccttgtctcttgcagtttaaggtaatggatattgtagcccatttgaattttcttcactcttattctcgtaattctggagtttcttcagattgtggtgtattttattgtgctcctatgtaagatgaagaattaactattaaaattacattttcaacatac
